United States Patent Application Publication US 2005/0228172 A9 - sequence listing, part 160

SEQ ID NO: 718470 - DNA, 1010 bp, Homo sapiens
atcacagggcacatggactcatgtggaaggagaggacatgamctgattcttttggtgaattttatttaggactaatttgactccctaaaagatcctcttaccttctgtacagataaggaaactctgggtcctttccttttcaataccttcaggctgtcaaagaataacacaaacaagcacagaagaatgagtctagatcctctgtccatgaaggaaaagtgattaagcaccagctcacttaagcatggctggtgcaagtttatccctgagagaagatccaactcatcttccccttttgttcatatctggaaggcacgggacatcaccggtacccattttagcctctgcgttctgtagcttggacaggcattatcttgatgtcactgtgggacactctcagctcctctgatcctgtatagcatctccagtaaacaactaaaagtgctttgtggagcagggattgccaagaggcaaatcaagagtgttcctctgacaagtgctgattcttgttgaggatgacgggaactgcatgggagtgtaggacaagtagatttgtctcttgaatttgagaatcagaaaaagagaaggaagagaaataggtgtacaggaaacatcttgactcagaaacaaacaaaaaattgtcaagtctatttcaaatgttaagttttactatcctgggtgaggtattaattaaagaaaggatgaactttatgctgttttaattcatttaaaatggcatgtcttgtgtcaaaagtaaatgttgtcaactaattaagtctcttcaatgagaagatcttttaatacaaaacctcttagatgtctgtttcttttcaggaaaagcttgactgtttgcatatccatacctctactaagaagcttttgaccacagtgtctttccagtttagcttttgctgctccattccttcatttgggcaagcactgctttgtttggactcagcaactacagtgatattcactttacctggaagacattcccaaatataaattaa

SEQ ID NO: 718471 - DNA, 1010 bp, Homo sapiens
atcacagggcacatggactcatgtggaaggagaggacatgaactgattcttttggtgaattttatttaggactaatttgactccctaaaagatcctcttaccttctgtacagataaggaaactctgggtcctttccttttcaataccttcaggctgtcaaagaataacacaaacaagcacagaagaatgagtctagatcctctgtccatgaaggaaaagtgattaagcaccagctcactyaagcatggctggtgcaagtttatccctgagagaagatccaactcatcttccccttttgttcatatctggaaggcacgggacatcaccggtacccattttagcctctgcgttctgtagcttggacaggcattatcttgatgtcactgtgggacactctcagctcctctgatcctgtatagcatctccagtaaacaactaaaagtgctttgtggagcagggattgccaagaggcaaatcaagagtgttcctctgacaagtgctgattcttgttgaggatgacgggaactgcatgggagtgtaggacaagtagatttgtctcttgaatttgagaatcagaaaaagagaaggaagagaaataggtgtacaggaaacatcttgactcagaaacaaacaaaaaattgtcaagtctatttcaaatgttaagttttactatcctgggtgaggtattaattaaagaaaggatgaactttatgctgttttaattcatttaaaatggcatgtcttgtgtcaaaagtaaatgttgtcaactaattaagtctcttcaatgagaagatcttttaatacaaaacctcttagatgtctgtttcttttcaggaaaagcttgactgtttgcatatccatacctctactaagaagcttttgaccacagtgtctttccagtttagcttttgctgctccattccttcatttgggcaagcactgctttgtttggactcagcaactacagtgatattcactttacctggaagacattcccaaatataaattaa

SEQ ID NO: 718472 - DNA, 1010 bp, Homo sapiens
atcacagggcacatggactcatgtggaaggagaggacatgaactgattcttttggtgaattttatttaggactaatttgactccctaaaagatcctcttaccttctgtacagataaggaaactctgggtcctttccttttcaataccttcaggctgtcaaagaataacacaaacaagcacagaagaatgagtctagatcctctgtccatgaaggaaaagtgattaagcaccagctcacttaagcatggctggtgcaagtttatccctgagagaagatccaactcatcttccccttttgttcatatctggaaggcacgggacatcaccggtacccattttagcctctgcgttctgtagcttggacaggcattatcttgatgtcactgtgggacactctcagctcctctgatcctgtatagcatctccagtaaacaactaaaagtgctttgtggagcagggattgccaagaggcaaatcaagagtgttcctctgacaagtgctgattcttgttgaggatgacgggaactgcaygggagtgtaggacaagtagatttgtctcttgaatttgagaatcagaaaaagagaaggaagagaaataggtgtacaggaaacatcttgactcagaaacaaacaaaaaattgtcaagtctatttcaaatgttaagttttactatcctgggtgaggtattaattaaagaaaggatgaactttatgctgttttaattcatttaaaatggcatgtcttgtgtcaaaagtaaatgttgtcaactaattaagtctcttcaatgagaagatcttttaatacaaaacctcttagatgtctgtttcttttcaggaaaagcttgactgtttgcatatccatacctctactaagaagcttttgaccacagtgtctttccagtttagcttttgctgctccattccttcatttgggcaagcactgctttgtttggactcagcaactacagtgatattcactttacctggaagacattcccaaatataaattaa

SEQ ID NO: 718473 - DNA, 1010 bp, Homo sapiens
atcacagggcacatggactcatgtggaaggagaggacatgaactgattcttttggtgaattttatttaggactaatttgactccctaaaagatcctcttaccttctgtacagataaggaaactctgggtcctttccttttcaataccttcaggctgtcaaagaataacacaaacaagcacagaagaatgagtctagatcctctgtccatgaaggaaaagtgattaagcaccagctcacttaagcatggctggtgcaagtttatccctgagagaagatccaactcatcttccccttttgttcatatctggaaggcacgggacatcaccggtacccattttagcctctgcgttctgtagcttggacaggcattatcttgatgtcactgtgggacactctcagctcctctgatcctgtatagcatctccagtaaacaactaaaagtgctttgtggagcagggattgccaagaggcaaatcaagagtgttcctctgacaagtgctgattcttgttgaggatgacgggaactgcatgggagtgtaggacaagtagatttgtctcttgaatttgagaatcrgaaaaagagaaggaagagaaataggtgtacaggaaacatcttgactcagaaacaaacaaaaaattgtcaagtctatttcaaatgttaagttttactatcctgggtgaggtattaattaaagaaaggatgaactttatgctgttttaattcatttaaaatggcatgtcttgtgtcaaaagtaaatgttgtcaactaattaagtctcttcaatgagaagatcttttaatacaaaacctcttagatgtctgtttcttttcaggaaaagcttgactgtttgcatatccatacctctactaagaagcttttgaccacagtgtctttccagtttagcttttgctgctccattccttcatttgggcaagcactgctttgtttggactcagcaactacagtgatattcactttacctggaagacattcccaaatataaattaa

SEQ ID NO: 718474 - DNA, 586 bp, Homo sapiens
tttcttacagttctggaggccgggaagtccgaggtcagggggctgcatctggcggcggccttcttgttgcgtcatccccatggcagaaggcatcactcacttaggtagaatgagcaagagactgtacttgcctcacgtgtgcctgggctcacggtgcctgcgctcacgggtgcctgccctcacggtgcctgcgttcacgggtgcctgccctcacgggtgcctgccctcacggtgcctgcgctcacgggtgcctgcgctcacggtgcctgggctcacggtgcctgcgctcacgggtgcctgcgctcacggtgcctgcgctcacgggtgcctgcgctcacggtgcctgggctcacggtgcctgcgctcacgggtgcctgccctcacgagcctgcgctcacgggtgcctgtgcttacaggtgcgcaccaccccccacaccctctaggtggcttytcagcttttaatctcagagggtgatgcctgctggcacccgccttgttctgctctgtgggcctggccagtctgaaagcaggggaggcctcaggcccagccgacagcccagcctctctgctttcacacgaagggaaa

SEQ ID NO: 718475 - DNA, 1115 bp, Homo sapiens
  misc_feature 788, 796, 802, 803, 807, 808, 810, 811, 815, 817: n = A,T,C or G
aataaaccccaagtggtgtttaatcctgggacttcccacaaagggccaggaactggcggcaagcagaggtcaggaaaggttcacagccttcctcggagtgggcggctgcagcgagggctggagacgtgcagggctttctcgggcagccgcgggggctcttggccccgtctgttgactcatttacctgaacagatggggctcttggttcccrggatgctgggccaaggtttcagggcaacttgactgccttccccagagccagaggaggaccccggagcccacctgggtacaggcagtcactgtcttccacagagccagcccagagccatggtgcctcccatgcgcggacggagagtgttcccctcctgcggcctctcaaacctcaggtcctcctgagttctcatgagcctgcctcaggtcctgatcaccaactgtatgggctaagttgtgtcccctctaacatttatttgctgaagcctgacccccagtgcctcagaatatgactgtatttggagatagtgccttcaaagaggtgattaagtcaaaatgaggtccttcgggtgggccctcaaccaatctgcctggtgtccttaaaggagagaaggttaggagacagacacacacagagggaagaccacacaaggacacagggagaaggcggccgtctacaggccaaggagcgaggcgtctgaagaaaccaacactaccaacatctccatctcagacttccagcttcccagagctgtgagaaaaatacagcggctgttgcagtcggcaagattatgtgnattgtganagcagnntggnntnnctgncncatcaaacaatcctctactatatcaaccaccagccctaactcaacctgtgcttaccacggaacgctggccctgggctacgccctgatgctgccacaggctggctcccacccagccacacatggccgcaccatagggtctttaaagaggtttaaattctaagaaagaaatcctgtatgttacacatgtaggcagtgttttcagcactcctcattcctctgtgtggattcatcttactatctgtcatcattttccttctgactgcaagacttcctgtagcatttgttgtagtgtgagtca

SEQ ID NO: 718476 - DNA, 1115 bp, Homo sapiens
  misc_feature 788, 796, 802, 803, 807, 808, 810, 811, 815, 817: n = A,T,C or G
aataaaccccaagtggtgtttaatcctgggacttcccacaaagggccaggaactggcggcaagcagaggtcaggaaaggttcacagccttcctcggagtgggcggctgcagcgagggctggagacgtgcagggctttctcgggcagccgcgggggctcttggccccgtctgttgactcatttacctgaacagatggggctcttggttcccaggatgctgggccaaggtttcagggcaacttgactgccttccccagagccagaggaggaccccggagcccacctgggtacaggcagtcactgtcttccacagagccagcccagagccatggtgcctcccrtgcgcggacggagagtgttcccctcctgcggcctctcaaacctcaggtcctcctgagttctcatgagcctgcctcaggtcctgatcaccaactgtatgggctaagttgtgtcccctctaacatttatttgctgaagcctgacccccagtgcctcagaatatgactgtatttggagatagtgccttcaaagaggtgattaagtcaaaatgaggtccttcgggtgggccctcaaccaatctgcctggtgtccttaaaggagagaaggttaggagacagacacacacagagggaagaccacacaaggacacagggagaaggcggccgtctacaggccaaggagcgaggcgtctgaagaaaccaacactaccaacatctccatctcagacttccagcttcccagagctgtgagaaaaatacagcggctgttgcagtcggcaagattatgtgnattgtganagcagnntggnntnnctgncncatcaaacaatcctctactatatcaaccaccagccctaactcaacctgtgcttaccacggaacgctggccctgggctacgccctgatgctgccacaggctggctcccacccagccacacatggccgcaccatagggtctttaaagaggtttaaattctaagaaagaaatcctgtatgttacacatgtaggcagtgttttcagcactcctcattcctctgtgtggattcatcttactatctgtcatcattttccttctgactgcaagacttcctgtagcatttgttgtagtgtgagtca

SEQ ID NO: 718477 - DNA, 1620 bp, Homo sapiens
tggcctaattggtgttttaaaacttaatttctctaagaaatatcctatagtgtgctgctttttacatcggggcaaaattaatttctttcctgctgcctgtgatactcaaaagtgctccagttgtgcatgctgtccatgtccatagtcactcattcattccgtatttattgaatgccaactaggagccaggtactagggatatagcagtaaagaagacaaacagaaacccctgccttcatggagtttctgttgtagctgaagccagacttacattcatcatgttctggggcaaaaaggcccaggtatcttcactggtaaattctatcaaatatttaaagaagaagtaatagcaatgcttcatgaattctttcagaaaatagaggagggaatactttccaacttcttcaatgaggataatattaacttaataccaaagctaggggatcacaaagatatcccaagaaaattacagaccaatatctctcatgagcatagatgcaaaattccttaatgtaatgtaagcaaactgaatctagtaacatataaaaaataagtatatacaccgtgaccaggcagattttatcgcaggaacacaaagttggtttaacgttaaaaaaaatcaattcatgtaatatactgtattaacagaatgaaggacaaaccacataatcatcttaatagatgcagagaaagcatttaacaaatctaatacccattcatgatgaaaaaagaaaagaaagaaaactctttcaataaataggaagaaagggaatgtcctcaatcagattaagggcatctacaaatattcataataagcatcatacttaacagcaaaaaactgaatgtttttttcctaagatcaggaacaagacaaggatgtctgcttttgcctcttctattaaacatgtactggaggttccagctaatgcaatagagcaataaacaaatctagattggaaatgaagatatgaaactgtccttattgcagatggcatgagtgtgtgtgtgtgtgtgtggtgtgtgtatgtagaagatcccaaggaatctgtaaaactgctataatgtataatgaggttaatattaaaaaaccaattgtatttctaatactatcaatgaatgacccaaaaatgaaattaagaaaacacaaacacagttctggtcacaacagcatcaacaacaataagatacttaggaaaacatttaatcaaataagtgcagaacttgcagaatttgtctactaaaaactacaaaataggccaagcatgtggctcccagcactttgggaggctgaggcaggagaactgcttgagcccaggagctcaagaccaacctgggcaacagagcaagaccccattgctattaaaaacaaaacaaaagctacaaaactttgctaagggaaactaaagtattgaaataaatgaaaagacattccatattcagatgttggaagacacaatattatcagatggcacttctccccaaagtgatgtataaattcaacatgtgcttatcaaaattctaacaggttttttttttgtggaaattaacaaactgattctaaaatttatatgaaaatgcaacagatytagaatagccaacacagtttgaaaaagaacaaaa

SEQ ID NO: 718478 - DNA, 630 bp, Homo sapiens
caaacacacatggctaaataggacctgttcatgcacgctccagccctgacctctcccagtcttccctgtcactgcagctttagctaaacaaacacctgggtgattgatctctcttccccttattctcacattctatccatgggtgagttccaccgagtcttcccccaaaacatcctgaattgatttcagctctattgctgatccctcaggccactaccacaggrtaaccaaacagatgcccaactcatgtgccagattctaccatttcccctgaaaaagccactgcctacatacaggtcagggtgactttttaaaaggttcaccagtgtcactcttgaaatctgcttagaaccctccatcagcttccctgcacaacaaataaaatccaaacccatccttatcatctggctctcagcctcgggtcctcagaaaggcctttcctgacaatccaataaatagcagcacgtggccgctgcctccctgcccaccgccactccctagttctgtggaacgtgtcgacacttcttggccatctccttgctctgtttatagtctggacccttcaccaggatgcccactccctagcacatggctagtgctctgtttttgaggtgatttccaagaggttgg

SEQ ID NO: 718479 - DNA, 992 bp, Homo sapiens
ccaagatctcaccagtgtgtgtcctagcgtaagagtctgtacagaaagtctaaccagactgggtttgatgctcacaatgtaagttctttctctagtgttctctaaatgttcatgaaaagcagttttctcttggtcctggagaatttgccatttagctctaggttgtctgtgtatttgagcttcaggacttaataatgacatatatgtataagggaccctcatagtattcacagctgattaagtctcacccctcctggaatgatcacgtgctttgcagcaaagaatagagttcatgcccttaggcaaaccgttatagaagttaactaaatttgaattctcccagggcctcttgagtgcattttttttttcttaagagttctctgagcttctatcaagtctaattgatttttagcacaggaagccttacctcccaatatagctttggaccctttttccttgtagccaatggcaaaagaaccatttataaattattaaacttgttcacagctaaacggcaccaaaatagcccaggaatattttaatattcgtagtttgctttgattaaaatacaaacttttcacgttagctctagtattatttttcacaaggcaagcaggttacagagctgaatgccacttaatttagtgtttaatcaagagaactactgtggtatcaggctgattaggttggctcaactgctgcctgctcaatttttccctataattctaggatattctttatggtgacaagtscccagacggtagaattccaatatgctatacatcagcttctccattattggattagctggatgtggcatcgttactgctgcactttcattcctatcattgatcgcatcatcccttccatttcacaattaatgcaagtctgttggattgattaatcttctcctgtgcttgggctgcagtcaatatattcctatggccgtgtgttagtgatctgcagggtttcttgcaaggcctgtggatttg

SEQ ID NO: 718480 - DNA, 992 bp, Homo sapiens
ccaagatctcaccagtgtgtgtcctagcgtaagagtctgtacagaaagtctaaccagactgggtttgatgctcacaatgtaagttctttctctagtgttctctaaatgttcatgaaaagcagttttctcttggtcctggagaatttgccatttagctctaggttgtctgtgtatttgagcttcaggacttaataatgacatatatgtataagggaccctcatagtattcacagctgattaagtctcacccctcctggaatgatcacgtgctttgcagcaaagaatagagttcatgcccttaggcaaaccgttatagaagttaactaaatttgaattctcccagggcctcttgagtgcattttttttttcttaagagttctctgagcttctatcaagtctaattgatttttagcacaggaagccttacctcccaatatagctttggaccctttttccttgtagccaatggcaaaagaaccatttataaattattaaacttgttcacagctaaacggcaccaaaatagcccaggaatattttaatattcgtagtttgctttgattaaaatacaaacttttcacgttagctctagtattatttttcacaaggcaagcaggttacagagctgaatgccacttaatttagtgtttaatcaagagaactactgtggtatcaggctgattaggttggctcaactgctgcctgctcaatttttccctataattctaggatattctttatggtgacaagtgyccagacggtagaattccaatatgctatacatcagcttctccattattggattagctggatgtggcatcgttactgctgcactttcattcctatcattgatcgcatcatcccttccatttcacaattaatgcaagtctgttggattgattaatcttctcctgtgcttgggctgcagtcaatatattcctatggccgtgtgttagtgatctgcagggtttcttgcaaggcctgtggatttg

SEQ ID NO: 718481 - DNA, 992 bp, Homo sapiens
ccaagatctcaccagtgtgtgtcctagcgtaagagtctgtacagaaagtctaaccagactgggtttgatgctcacaatgtaagttctttctctagtgttctctaaatgttcatgaaaagcagttttctcttggtcctggagaatttgccatttagctctaggttgtctgtgtatttgagcttcaggacttaataatgacatatatgtataagggaccctcatagtattcacagctgattaagtctcacccctcctggaatgatcacgtgctttgcagcaaagaatagagttcatgcccttaggcaaaccgttatagaagttaactaaatttgaattctcccagggcctcttgagtgcattttttttttcttaagagttctctgagcttctatcaagtctaattgatttttagcacaggaagccttacctcccaatatagctttggaccctttttccttgtagccaatggcaaaagaaccatttataaattattaaacttgttcacagctaaacggcaccaaaatagcccaggaatattttaatattcgtagtttgctttgattaaaatacaaacttttcacgttagctctagtattatttttcacaaggcaagcaggttacagagctgaatgccacttaatttagtgtttaatcaagagaactactgtggtatcaggctgattaggttggctcaactgctgcctgctcaatttttccctataattctaggatattctttatggtgacaagtgcccagacggtagaattccaatatgctatacatcagcttctccattattggattagctggatgtggcatcgttactgcygcactttcattcctatcattgatcgcatcatcccttccatttcacaattaatgcaagtctgttggattgattaatcttctcctgtgcttgggctgcagtcaatatattcctatggccgtgtgttagtgatctgcagggtttcttgcaaggcctgtggatttg

SEQ ID NO: 718482 - DNA, 1127 bp, Homo sapiens
tcttaattgctgagctctctggtgcccccttcagttgtgttgcctcatcctsgttctggccctaattctgagtgtcagccatgtgtgaaccattgtactaattgatgggtatgcaatgttgtgtcacttgagactctttcagtagtctgtcatagatttcccacatacagaaatgtcacacaataaggacacgtgttattttatgtaatataaagtccttacaagcctgggcagcatagcaagaccccatttaaaaaaaattagatgggcatggtggcatacacctgtagttccagctacttgggaggctgaggcaggaagatgatttgagcctaggggttcaagactgaagcgagctatgatggtgtcactgcattccagcctgggcaacagaacaagactctggggggaaaaaaataaaaaagaaagaaacaaaaaaccccaaaatcaaaaacccatgaaaaaccaaaaaaaaagtcttaacagaataagaaggcagggtactttcaatgacccaacaacatcatcacctagactatttctgtcctttcattttctcagtatagtggtttgacacttaggtttgtcttttctcagttgcaagacaggtagtgcagttcccttaatgtttcactgacttagtctgctcaggctgctacatcaagataccttagcctgggtaatgtatcaacaatgggagtacattgctcacagttctggaagctgggcattctaagatcagagacatcagtagattcagtgtccggtgagggctgagtctctgccttataactggtgccctggcgttgtgtcttcacatggtggaagggaaaaagcactccctcctgcctcttttggaagggcactaatcccatttgtgagggctatgacctcatgacgtaatcaccttctaaaaatcctagctcttaatactatcatgttggatattagatttcaccatatgaatttgtggggacatatacattcagaccatagccccctttaacctgaattgggtcttatgccctgtctacaaaggagactggcaaaagtgactacttggaatattcagcatcaatataaaaaagaaagctgtgctattaagagacaactgcagtaaggctcaa

SEQ ID NO: 718483 - DNA, 1263 bp, Homo sapiens
tattttgacaaaaatgcacaaatctttttttattaattttgtctacccaccagaatatactttcagctgagatctattttccttaagatgctcttcattacttctgtccaaattttccttaaatatacacaaacacctacaattcttaggttaggtcattttttttcctttataatctatatcatcttaatttttttcctcaccactcccatttattcttgaataaattttcaaggttctggcatgcattactgacttactttttcccctgtatactcaatttctttcttgtgtatgcatatgtgakcatgtgtgtgcacacgtgcaagcacctcagggatgaattttaattcagtgcatatagagtccttccttatcttactcagctttaaaacttttttaaaactcagttgtttattctcctgtggtgtgtattttcttctcagagttttctgctgaggtttctactatttgtttcctttttcctattcataataccaaccagttttcaaaagttatcttttggcaacattcctgtaagtctacagaatggtgttctcatttctttgttttatgtaatttaaaaaaaaaaaaaaaaacagtccatggggctcttcattttttcttttctgtttactaatgctgaattagaaaatgctgtagttctagagctgtttagcagataggatgtgcaatgttttctttgttctcattttctgtcaatttgatgcctttttattacactttctaggtttataactcctgatccttttcgccttcacatatgctactgggtctgtgctagaatccattatgattattctctcttatttcaatgtatttctttagataatgaaacaaagaactacataaaaatctcagggctcctgtaatccatacctgcctgccacccctgaatctggcccaatgttgtggcataaccttcagcatatacaacaggacagcaccaggcttctcagtgcttcagcagcccttccctttcttgaaaactgtcccagatgtctgctatattttccagacgtacccttttctgaaggactgtgaagcttggctcggggcagtgctctgctcccatctagaagcactgactattcggtagaagaatggctgcctacttcttttctcgttcttttagtcaatactaaagatccttgatattacatagtacataacatcattcaccatacatagtacattcagtcaaaaaaatccctgccaacatggatatcccccaccaatttt

SEQ ID NO: 718484 - DNA, 1263 bp, Homo sapiens
tattttgacaaaaatgcacaaatctttttttattaattttgtctacccaccagaatatactttcagctgagatctattttccttaagatgctcttcattacttctgtccaaattttccttaaatatacacaaacacctacaattcttaggttaggtcattttttttcctttataatctatatcatcttaatttttttcctcaccactcccatttattcttgaataaattttcaaggttctggcatgcattactgacttactttttcccctgtatactcaatttctttcttgtgtatgcatatgtgagcatgtgtgtgcacacgtgcaagcacctcagggatgaattttaattcagtgcatatagagtccttccttatcttactcagctttaaaacttttttaaaactcagttgtttattctcctgtggtgtgtattttcttctcagagttttctgctgaggtttctactatttgtttcctttttcctattcataataccaaccagttttcaaaagttatcttttggcaacattcctgtaagtctacagaatggtgttctcatttctttgttttatgtaatttaaaaaaaaaaaaaaaaacagtccatggggctcttcattttttcttttctgtttactaatgctgaattagaaaatgctgtagttctagagctgtttagcagataggatgtgcaatgttttctttgttctcattttctgtcaatttgatgcctttttattacactttctaggtttataactcctgatccttttcgccttcacatatgctactgggtctgtgctagaatccattatgattattctctcttatttcaatgtatttctttagataatgaaacaaagaactacataaaaatctcagggctcctgtaatccatacctgcctgccacccctgaatctggcccaatgttgtggcataaccttcagcatatacaacaggacagcaccaggcttctcagtgcttcagcagcccttccctttcttgaaaactgtcccagatgtctgctatattttccagacgtacccttttctgaaggactrtgaagcttggctcggggcagtgctctgctcccatctagaagcactgactattcggtagaagaatggctgcctacttcttttctcgttcttttagtcaatactaaagatccttgatattacatagtacataacatcattcaccatacatagtacattcagtcaaaaaaatccctgccaacatggatatcccccaccaatttt

SEQ ID NO: 718485 - DNA, 1263 bp, Homo sapiens
tattttgacaaaaatgcacaaatctttttttattaattttgtctacccaccagaatatactttcagctgagatctattttccttaagatgctcttcattacttctgtccaaattttccttaaatatacacaaacacctacaattcttaggttaggtcattttttttcctttataatctatatcatcttaatttttttcctcaccactcccatttattcttgaataaattttcaaggttctggcatgcattactgacttactttttcccctgtatactcaatttctttcttgtgtatgcatatgtgagcatgtgtgtgcacacgtgcaagcacctcagggatgaattttaattcagtgcatatagagtccttccttatcttactcagctttaaaacttttttaaaactcagttgtttattctcctgtggtgtgtattttcttctcagagttttctgctgaggtttctactatttgtttcctttttcctattcataataccaaccagttttcaaaagttatcttttggcaacattcctgtaagtctacagaatggtgttctcatttctttgttttatgtaatttaaaaaaaaaaaaaaaaacagtccatggggctcttcattttttcttttctgtttactaatgctgaattagaaaatgctgtagttctagagctgtttagcagataggatgtgcaatgttttctttgttctcattttctgtcaatttgatgcctttttattacactttctaggtttataactcctgatccttttcgccttcacatatgctactgggtctgtgctagaatccattatgattattctctcttatttcaatgtatttctttagataatgaaacaaagaactacataaaaatctcagggctcctgtaatccatacctgcctgccacccctgaatctggcccaatgttgtggcataaccttcagcatatacaacaggacagcaccaggcttctcagtgcttcagcagcccttccctttcttgaaaactgtcccagatgtctgctatattttccagacgtacccttttctgaaggactgtgaagcttggctcggggcagtgctctgctcccatctagaagcactgactattcggtagaagaatggctgcctacttcttttctmgttcttttagtcaatactaaagatccttgatattacatagtacataacatcattcaccatacatagtacattcagtcaaaaaaatccctgccaacatggatatcccccaccaatttt

SEQ ID NO: 718486 - DNA, 1602 bp, Homo sapiens
gtaaatctccttaaaatgttaaggaaaggatgacaaagtgtggggtagatattgtgaaggaaaatcttggggtctgaaaatcactaatctaaaggaaaaagtcaagctgggaactgcttagagcaaacctgcctccctttctattcagagtcatccatctgctcactgagaaaaatgcatatctgattgcttcctttggaaaggctaatcagaaactcaaaagaatgcaaccattttttctactatctacctatgacctggaagtccccttaacacatcacrttgtcccacctttctggacagaaccaatatacaacttacatatactgagtgatagctcatgtctccctaaaatgaataaaaccaagctgtgccccgaccacctccggcacatatcatcaggacctcctggggctgtcatgggcgcacgtccttaactttggcaaaacaaacttcctaaattgactaagacctgtctcacatagttgggtttcacaatatcaaacaagattgaccatgaattgatagtaatttatactggaatttatgtacatgacaggagggtataattttgctattttctctactatgtatatatgtgaaacatttcttaatataatctcttaaaacttaaaaaaatgtgtgggaatcagctgtagttgtgccagaggaaacaatatagcctagaattcatatataagaaaaaagattatataaaaaaatcttatccatattaaaagtttataaaagaacactaactaaattccaaagaaaatacaagaaaaaggtgatacagactaggagatcataaaactaaaatataagcaacaataaagagaataaaaaagacaaaatatttttgaaaatccagttgagttgggatgtttctgatgagacagagaagtcaaatgtgagaaaaattgtaaatgatgaaagtcaatatcagggataaacagaggtgttacaatagattctgtagatattacaaaaacaataaaaaagttatagaaacacacaaataaaatttaaaagctacattaaatggataattttctggaaataaacaattatgacacaagaagaaaaagctgagcattgtttactattataaatgtagaatttataattacaaagcttttcatgctttacagaaatattgtatcaattattttaaacaaaattatattcgatttgacataaagttttccaaagaactgaaaatttcagaagagtgacagactcgtgttactaatccagtatcacctttatgccaaacattaggttgttgcaaaagtaatttcagtttttgccgttgaaagtaatggcaaaaaccacgattacttttgcaccaacctaatagagaatactgagagaacagaacattattggtatcttacctcacggattttgaagccaaaccttaaattcaacaaggtacggaatgaataataaaggaacaatatgttggatgtgataatggaatgcctgtttagcttaatattaaaaaagcagtcatactttgccacagcaatatattaaagaagcaaaattgtataacatttttactagatgcatttgtaaaagcaccaaactaggactaga

SEQ ID NO: 718487 - DNA, 1602 bp, Homo sapiens
gtaaatctccttaaaatgttaaggaaaggatgacaaagtgtggggtagatattgtgaaggaaaatcttggggtctgaaaatcactaatctaaaggaaaaagtcaagctgggaactgcttagagcaaacctgcctccctttctattcagagtcatccatctgctcactgagaaaaatgcatatctgattgcttcctttggaaaggctaatcagaaactcaaaagaatgcaaccattttttctactatctacctatgacctggaagtccccttaacacatcacgttgtcccacctttctggacagaaccaatatacaacttacatatactgagtgatagctcatgtctccctaaaatgaataaaaccaagctgtgccccgaccacctccggcacatatcatcaggacckcctggggctgtcatgggcgcacgtccttaactttggcaaaacaaacttcctaaattgactaagacctgtctcacatagttgggtttcacaatatcaaacaagattgaccatgaattgatagtaatttatactggaatttatgtacatgacaggagggtataattttgctattttctctactatgtatatatgtgaaacatttcttaatataatctcttaaaacttaaaaaaatgtgtgggaatcagctgtagttgtgccagaggaaacaatatagcctagaattcatatataagaaaaaagattatataaaaaaatcttatccatattaaaagtttataaaagaacactaactaaattccaaagaaaatacaagaaaaaggtgatacagactaggagatcataaaactaaaatataagcaacaataaagagaataaaaaagacaaaatatttttgaaaatccagttgagttgggatgtttctgatgagacagagaagtcaaatgtgagaaaaattgtaaatgatgaaagtcaatatcagggataaacagaggtgttacaatagattctgtagatattacaaaaacaataaaaaagttatagaaacacacaaataaaatttaaaagctacattaaatggataattttctggaaataaacaattatgacacaagaagaaaaagctgagcattgtttactattataaatgtagaatttataattacaaagcttttcatgctttacagaaatattgtatcaattattttaaacaaaattatattcgatttgacataaagttttccaaagaactgaaaatttcagaagagtgacagactcgtgttactaatccagtatcacctttatgccaaacattaggttgttgcaaaagtaatttcagtttttgccgttgaaagtaatggcaaaaaccacgattacttttgcaccaacctaatagagaatactgagagaacagaacattattggtatcttacctcacggattttgaagccaaaccttaaattcaacaaggtacggaatgaataataaaggaacaatatgttggatgtgataatggaatgcctgtttagcttaatattaaaaaagcagtcatactttgccacagcaatatattaaagaagcaaaattgtataacatttttactagatgcatttgtaaaagcaccaaactaggactaga

SEQ ID NO: 718488 - DNA, 1602 bp, Homo sapiens
gtaaatctccttaaaatgttaaggaaaggatgacaaagtgtggggtagatattgtgaaggaaaatcttggggtctgaaaatcactaatctaaaggaaaaagtcaagctgggaactgcttagagcaaacctgcctccctttctattcagagtcatccatctgctcactgagaaaaatgcatatctgattgcttcctttggaaaggctaatcagaaactcaaaagaatgcaaccattttttctactatctacctatgacctggaagtccccttaacacatcacgttgtcccacctttctggacagaaccaatatacaacttacatatactgagtgatagctcatgtctccctaaaatgaataaaaccaagctgtgccccgaccacctccggcacatatcatcaggacctcctggggctgtcatgggcgcacgtccttaactttggcaaaacaaacttcctaaattgactaagacctgtctcacatagttgggtttcacaatatcaaacaagattgaccatgaattgatagtaatttatactggaatttatgtacatgacaggagggtataattttgctattttctctactatgtatatatgtgaaacatttcttaatataatctcttaaaacttaaaaaaatgtgtgggaatcagctgtagttgtgccagaggaaacaatatagcctagaattcatatataagaaaaaagattatataaaaaaatcttatccatattaaaagtttataaaagaacactaactaaattccaaagaaaatacaagaaaaaggtgatacagactaggagatcataaaactaaaatataagcaacaataaagagaataaaaaagacaaaatatttttgaaaatccagttgagttgggatgtttctgatgagacagagaagtcaaatgtgagaaaaattgtaaatgatgaaagtcaatatcagggataaacagaggtgttacaatagattctgtagatattacaaaaacaataaaaaagttatagaaacacacaaataaaatttaaaagctacattaaatggataattttctggaaataaacaattatgacacaagaagaaaaagctgagcattgtttactattataaatgtagaatttataattacaaagcttttcatgctttacagaaatattgtatcaattattttaaacaaaattatattcgatttgacataaagttttccaaagaactgaaaatttcagaagagtgacagactcgtgttactaatccagtatcacctttatgccaaacattaggttgttgcaaaagtaatttcagtttttgccgttgaaagtaatggcaaaaaccacgattacttttgcaccaacctaatagagaatactgagagaacagaacattattggtatcttacctcacggattttgaagccaaaccttaaattcaacaaggtacggaatgaataataaaggaacaatatgttggatgtgataatggaatgcctgtttagcttaatattaaaaaagcagtcatactttgccacagcaatatattaaagaagcaaaattgtataacatttttactagatgcatttgtaaaagcaccaaactaggamtaga

SEQ ID NO: 718489 - DNA, 677 bp, Homo sapiens
acacacacacacacacacacacacacatttgtatatacaacatacatatgcacacatatatacacacagtgcacacatatacttacctgaatatatatgtacacatatactgtatatatgtatgtgggtatacatttatgaacatatatacacttgtacacagrcatatatattggtataaagaaatgtgtttacacttacactttagagaaccaagtatcatagataattcattttgtggacaaaatttttcaaataaaatgtagtgtaaataaagtacttaattttgtactctccaagtgatttttttttttgagacaagagtctcactctgttgcccaggctggagtgcagtggcccgatctcggctcatcacaacctccgctttgtgggtttaaacaattctcctgcctcagcctcccaagtagctgggactacaggcacacaccaccatgcctggctaatttttgtacttttagtagagatggggtttcactatgttggcccggctggtcttgaactcctgaccttgtgatgtgcctgcctcagcctcccaaagtgctgggattacaggtgtgagccaccacacccggcctccaagtgttttaaaatattaatacctgactcagtgaatgtttgacatttttatcactaattgagtgtgccaattcttaaat

SEQ ID NO: 718490 - DNA, 677 bp, Homo sapiens
acacacacacacacacacacacacacatttgtatatacaacatacatatgcacacatatatacacacagtgcacacatatacttacctgaatatatatgtacacatatactgtatatatgtatgtgggtatacatttatgaacatatatacacttgtacacaggcatatatattggtataaagaaatgtgtttacacttacactttagagaaccaagtatcatagataattcattttgtggacaaaatttttcaaataaaatrtagtgtaaataaagtacttaattttgtactctccaagtgatttttttttttgagacaagagtctcactctgttgcccaggctggagtgcagtggcccgatctcggctcatcacaacctccgctttgtgggtttaaacaattctcctgcctcagcctcccaagtagctgggactacaggcacacaccaccatgcctggctaatttttgtacttttagtagagatggggtttcactatgttggcccggctggtcttgaactcctgaccttgtgatgtgcctgcctcagcctcccaaagtgctgggattacaggtgtgagccaccacacccggcctccaagtgttttaaaatattaatacctgactcagtgaatgtttgacatttttatcactaattgagtgtgccaattcttaaat

SEQ ID NO: 718491 - DNA, 677 bp, Homo sapiens
acacacacacacacacacacacacacatttgtatatacaacatacatatgcacacatatatacacacagtgcacacatatacttacctgaatatatatgtacacatatactgtatatatgtatgtgggtatacatttatgaacatatatacacttgtacacaggcatatatattggtataaagaaatgtgtttacacttacactttagagaaccaagtatcatagataattcattttgtggacaaaatttttcaaataaaatgtagtgtaaataaagtacttaattttgtactctccaagtgatttttttttttgagacaagagtctcactctgttgcccaggctggagtgcagtggcccgatctcggctcatcrcaacctccgctttgtgggtttaaacaattctcctgcctcagcctcccaagtagctgggactacaggcacacaccaccatgcctggctaatttttgtacttttagtagagatggggtttcactatgttggcccggctggtcttgaactcctgaccttgtgatgtgcctgcctcagcctcccaaagtgctgggattacaggtgtgagccaccacacccggcctccaagtgttttaaaatattaatacctgactcagtgaatgtttgacatttttatcactaattgagtgtgccaattcttaaat

SEQ ID NO: 718492 - DNA, 677 bp, Homo sapiens
acacacacacacacacacacacacacatttgtatatacaacatacatatgcacacatatatacacacagtgcacacatatacttacctgaatatatatgtacacatatactgtatatatgtatgtgggtatacatttatgaacatatatacacttgtacacaggcatatatattggtataaagaaatgtgtttacacttacactttagagaaccaagtatcatagataattcattttgtggacaaaatttttcaaataaaatgtagtgtaaataaagtacttaattttgtactctccaagtgatttttttttttgagacaagagtctcactctgttgcccaggctggagtgcagtggcccgatctcggctcatcacaacctccgcyttgtgggtttaaacaattctcctgcctcagcctcccaagtagctgggactacaggcacacaccaccatgcctggctaatttttgtacttttagtagagatggggtttcactatgttggcccggctggtcttgaactcctgaccttgtgatgtgcctgcctcagcctcccaaagtgctgggattacaggtgtgagccaccacacccggcctccaagtgttttaaaatattaatacctgactcagtgaatgtttgacatttttatcactaattgagtgtgccaattcttaaat

SEQ ID NO: 718493 - DNA, 603 bp, Homo sapiens
tgcttgtgctagggtgaggtgttgttatacaggataatatacagaaacaggaaagcataatcaattgtgaaaaatttggaaaatatgggtttttatgttaacagtttttaaaatcaactatacacataagtgacctacatagctagaaattctrcagacaaatgtatactggcatcttagtgtttgaagtggaataatttcccgaaaagcattaagtcacagaacccataataattgaagcagttttctcaaaaaaaaaaaaaaattccaggccaagaatgcaatcacaacactttccacacgtcattggcattgtgacattctctgtcattcgggattcaaaccgtgcattcagtgcaaattcttcaatcttcctaataaaaagtttttaacatccaagctctttttattacatatcataacattgctctgatcggcttgtcaaatatatatttctttcctttccattgtccctgtcctagtgcagattttcagtacatttcctgggatgattgaagtagacacttaattggtttctctgcttcaggtctttcttatcttcattcctttctacacatttcttccagattaatctttctaaag

SEQ ID NO: 718494 - DNA, 603 bp, Homo sapiens
tgcttgtgctagggtgaggtgttgttatacaggataatatacagaaacaggaaagcataatcaattgtgaaaaatttggaaaatatgggtttttatgttaacagtttttaaaatcaactatacacataagtgacctacatagctagaaattctacagacaaatgtatactggcatcttagtgtttgaagtggaataatttcccgaaaagcattaagtcacagaacccataataattgaagcagttttctcaaaaaaaaaaaaaaattccaggccaagaatgcaatcacaacactttccacacgtcattggcattgtgacattctcygtcattcgggattcaaaccgtgcattcagtgcaaattcttcaatcttcctaataaaaagtttttaacatccaagctctttttattacatatcataacattgctctgatcggcttgtcaaatatatatttctttcctttccattgtccctgtcctagtgcagattttcagtacatttcctgggatgattgaagtagacacttaattggtttctctgcttcaggtctttcttatcttcattcctttctacacatttcttccagattaatctttctaaag

SEQ ID NO: 718495 - DNA, 603 bp, Homo sapiens
tgcttgtgctagggtgaggtgttgttatacaggataatatacagaaacaggaaagcataatcaattgtgaaaaatttggaaaatatgggtttttatgttaacagtttttaaaatcaactatacacataagtgacctacatagctagaaattctacagacaaatgtatactggcatcttagtgtttgaagtggaataatttcccgaaaagcattaagtcacagaacccataataattgaagcagttttctcaaaaaaaaaaaaaaattccaggccaagaatgcaatcacaacactttccacacgtcattggcattgtgacattctctgtcattcgggattcaaaccgtgcattcagtgcaaattcttcaatcttcctaataaaaagtttttaacatccaagctctttttattacatatcataacattgctctgatcrgcttgtcaaatatatatttctttcctttccattgtccctgtcctagtgcagattttcagtacatttcctgggatgattgaagtagacacttaattggtttctctgcttcaggtctttcttatcttcattcctttctacacatttcttccagattaatctttctaaag

SEQ ID NO: 718496 - DNA, 532 bp, Homo sapiens
gttggccaggctggtctcgaactcctgacctcaagtgatctgcccccctcggcctcccaaagcactgagattacaagtgtgagccatcgcacctggtcctaacatccttttctttctgaagatcccattcagaacataaaatgaaatttagttatcctgtttctctaggctcttcttaactatgatttcacttgttttcttatttytatttccttcaaaattttataaatattcttatctgggaattagtttcttagtttcttagttaatctggaaattagtttcttagtttctaagttaagaaactaagaaatagtttctcctatttctctttagttaacattccctaacttaacataaaaatactacttttcaaaaaatgttgaacaagttcaacatcaagaagcatttcacaagaagctgtcttcacaacaggcaaaaggtagattttaaatctacaattgttctttcatgcttgattttttaaagtatggccaataacaaaagcagtaagatttatttgtagtacaga

SEQ ID NO: 718497 - DNA, 532 bp, Homo sapiens
gttggccaggctggtctcgaactcctgacctcaagtgatctgcccccctcggcctcccaaagcactgagattacaagtgtgagccatcgcacctggtcctaacatccttttctttctgaagatcccattcagaacataaaatgaaatttagttatcctgtttctctaggctcttcttaactatgatttcacttgttttcttatttctatttccttcaaaattttataaatattcttatctgggaattagtttcttagtttcttagttaatctggaaattagtttcttagtttctaagttaagaaactaagaaatagtttctcctatttctctttagttaacattccctaacttaacataaaaatactacttttcaaaaaatgtygaacaagttcaacatcaagaagcatttcacaagaagctgtcttcacaacaggcaaaaggtagattttaaatctacaattgttctttcatgcttgattttttaaagtatggccaataacaaaagcagtaagatttatttgtagtacaga

SEQ ID NO: 718498 - DNA, 768 bp, Homo sapiens
acccacaaagatccagcttagaatctttcatccccacaccatctgtgcctattaccaattggttgtgcatgtgtgcacacatgcatgtgcacatacgtgcatgtgtatttccatattccaaaaaacaaataagaaatataatctcccggcttgtggcattctattgtttcccagaaattttagtataaagaatataaattctgatgatatgctgggtgttgatgggggcaaaaaatgttgacctcatttaaaaaatgtttttttactttatcatagggggctttcagactttttttcttctatttcctatagaggaacaatttaagtaatattttcagcttgaatacagaccatatgtatatggaacttataaatgcagttacataccacataatgatgttttggtcaacaagggactgcatgcatgayggggatcccataagattataatactgtgtttttactgcaccttttctgtgtgtagatacacaagtacttaccactgtgttacagatgcctgcagtattcagttcagtagcatgctatacaggctcttagcctaggagcagtaggctataccatatagcctaggattatgtaagtacactctatgatgttcacacaatgacaaaatcacctaatgatacatttctcagactgtatccccattgttaagcaatacataattatattttagggagtctgtgtgctgtaaatttttttttccaatttcaaatctttgttatttatgtaattctcaaaagttgt

SEQ ID NO: 718499 - DNA, 2603 bp, Homo sapiens
cctgtcaaggttctttgttatttttttagtggtatctttataacttcatgactatagctatttccctataactaataatttgggggtacctatgtgaaatttatgactttattctttacttattttccttatagagaattggatgctattttcaactggtttcaattcttggaaaacaatgcaattaatcttctgtgcttaggtcataaaatgactaaattactgccatttttgcatgctaaatatcctataacacctcctacttgatggtctggtcaggtgagaaaccaccacaaccatactgcctgttagaccccaaaattaacttcacttctctgtgtttctttgctgagggttgaagtctccaggttatcagctaccattgtgcagtcccctagcttctkcagagttcattgatccctttgtttttctatctatgttccacaacctccatactctaccctgcaactacctgccactaatctccaaaggatttacactcatctttcaagattcagctcaagtatcacctaataaatgaagtcttttctcattctgtgcatactcctgttttgcacttatcctaccatataacatttcaatatctagattactcgtgatttttcttctacaataagctttccaggggaagagacaatatctaattcatcttcatattccaaggacctgtgatttaacataagaccatagttcagagttttctgaatatatcaacaaacttttctaagttgttttattagtttcttcatctgaactatttgttaggctctgtacaccttcctatcagaattaattcatcagtggaatacactagactcgccttcctcaggtaaattgcactctagcactacttatgatcccttagaataccgaaaaagcagactactggttctgtactctttgacctagttgatttatgcctctcagtagcaaaaatgttttaaattattccttacatgtgtaagaaagatctaaatgtaaagattctattagttttatctccatacaaactatgttttatttaactgtatcactcacagtgcttatatatgcatgtatcttgtttgtgtatgaatagtgaaaaagataggaaagagagagtatatctgcattcatatatatacttatttgtggaggagtgagtttcatgtcattgaaataatcacacagaaaataaccacccataatatttgttatagaaacatgttattagacaatcaaaggttatttttgaaaccatatttctataatactatatgtattttttccttgatttgtataaatgtaggatattttctttgtccctataaatagtttgcatggttgttttgttaacttccatcttttattccccaaatatctataaaaataaacattacatggaggttaacttacacttgcattaatatagaatttctcatgtgctgtctatttaaaggaaaagttgtgatgagtatgtctatactttcacatgctaaacaaattcctaatataattgggatgtttgtaatatgaaatgttatgaaacttaatttgccaaaggaagctaaaatttaaaatataaacattaacccaacagaatatgttaaccataaaactagtaaactaattttactctatgttttatgaaacaatcagtaggaattagaaattgcacaatttactggttctttaccttgaaaatgcgtagtatacgaaaaaattgaacaacttttataaagactattacttcaatctcattaaaaatatacttaatggtgtctatttcaataagtattacatgtaagatgccaattaatgtaattgctaactcgaatatgttccaggcatgtgaaaaaaagtccttcctcattgctgctatctgttgatttaaaaggaaattacattatcatgtttgtttctgcttttactacaccattttccacaataatttaaacatcatgttaggcttttctcttatctactccacatgtatgaaatatcctcaggaaaccaaaatcaaacaaacaagttcatcaaatttatcttgtaataaaggaatactcctagaactattaatttaggattgggtttaaaggacaggtataatgaaaacaaacaaatgtatataatgacaccagtaaaaagtagcgacaatggaaaggcaaattcagacaaaaatgtagtacgccagggtgttttaatttaaaacaagttgccctaaatgccataaaaatcctgggggttgcatccattttttattattttataatttatatccaaaatgatgattctgagtagtcaaaacaaaattaatttatgtttgttgtgacacatgtgggcaaagtttttattaaagtagttcaagatttaaaaatatatttattaaaagattatgctttcttcactaaattcacttgtgtaatttcattctgggataacacagaataagttatttttaatttctcaaaaaaattcgatgccctctctcaccattcctattcaacatagtgttggaagttctggccagggcaatcaggcaggagaaggaaataaagggtattcagttaggaaaaaaggaagtcaaattgtccctgtttgca

SEQ ID NO: 718500 - DNA, 2603 bp, Homo sapiens
cctgtcaaggttctttgttatttttttagtggtatctttataacttcatgactatagctatttccctataactaataatttgggggtacctatgtgaaatttatgactttattctttacttattttccttatagagaattggatgctattttcaactggtttcaattcttggaaaacaatgcaattaatcttctgtgcttaggtcataaaatgactaaattactgccatttttgcatgctaaatatcctataacacctcctacttgatggtctggtcaggtgagaaaccaccacaaccatactgcctgttagaccccaaaattaacttcacttctctgtgtttctttgctgagggttgaagtctccaggttatcagctaccattgtgcagtcccctagcttctgcagagttcattgatccctttgtttttctatctatgttccacaacctcyatactctaccctgcaactacctgccactaatctccaaaggatttacactcatctttcaagattcagctcaagtatcacctaataaatgaagtcttttctcattctgtgcatactcctgttttgcacttatcctaccatataacatttcaatatctagattactcgtgatttttcttctacaataagctttccaggggaagagacaatatctaattcatcttcatattccaaggacctgtgatttaacataagaccatagttcagagttttctgaatatatcaacaaacttttctaagttgttttattagtttcttcatctgaactatttgttaggctctgtacaccttcctatcagaattaattcatcagtggaatacactagactcgccttcctcaggtaaattgcactctagcactacttatgatcccttagaataccgaaaaagcagactactggttctgtactctttgacctagttgatttatgcctctcagtagcaaaaatgttttaaattattccttacatgtgtaagaaagatctaaatgtaaagattctattagttttatctccatacaaactatgttttatttaactgtatcactcacagtgcttatatatgcatgtatcttgtttgtgtatgaatagtgaaaaagataggaaagagagagtatatctgcattcatatatatacttatttgtggaggagtgagtttcatgtcattgaaataatcacacagaaaataaccacccataatatttgttatagaaacatgttattagacaatcaaaggttatttttgaaaccatatttctataatactatatgtattttttccttgatttgtataaatgtaggatattttctttgtccctataaatagtttgcatggttgttttgttaacttccatcttttattccccaaatatctataaaaataaacattacatggaggttaacttacacttgcattaatatagaatttctcatgtgctgtctatttaaaggaaaagttgtgatgagtatgtctatactttcacatgctaaacaaattcctaatataattgggatgtttgtaatatgaaatgttatgaaacttaatttgccaaaggaagctaaaatttaaaatataaacattaacccaacagaatatgttaaccataaaactagtaaactaattttactctatgttttatgaaacaatcagtaggaattagaaattgcacaatttactggttctttaccttgaaaatgcgtagtatacgaaaaaattgaacaacttttataaagactattacttcaatctcattaaaaatatacttaatggtgtctatttcaataagtattacatgtaagatgccaattaatgtaattgctaactcgaatatgttccaggcatgtgaaaaaaagtccttcctcattgctgctatctgttgatttaaaaggaaattacattatcatgtttgtttctgcttttactacaccattttccacaataatttaaacatcatgttaggcttttctcttatctactccacatgtatgaaatatcctcaggaaaccaaaatcaaacaaacaagttcatcaaatttatcttgtaataaaggaatactcctagaactattaatttaggattgggtttaaaggacaggtataatgaaaacaaacaaatgtatataatgacaccagtaaaaagtagcgacaatggaaaggcaaattcagacaaaaatgtagtacgccagggtgttttaatttaaaacaagttgccctaaatgccataaaaatcctgggggttgcatccattttttattattttataatttatatccaaaatgatgattctgagtagtcaaaacaaaattaatttatgtttgttgtgacacatgtgggcaaagtttttattaaagtagttcaagatttaaaaatatatttattaaaagattatgctttcttcactaaattcacttgtgtaatttcattctgggataacacagaataagttatttttaatttctcaaaaaaattcgatgccctctctcaccattcctattcaacatagtgttggaagttctggccagggcaatcaggcaggagaaggaaataaagggtattcagttaggaaaaaaggaagtcaaattgtccctgtttgca

SEQ ID NO: 718501 - DNA, 615 bp, Homo sapiens
tgacaatgcttatttgatattgtctctcagagctgcaaactagattatacaagtcattagcgtcagatagctttaaagttgtgaccttcctttacatgaattttctagccagtttcctatcctttgcaagaggtaacaaaacatgaaaccctagaatgtgtgagttcagrcattaggtatataataaggaggctctctgtccagggctgctttctgtcttgcaggggctagtgagtcttgtgtgtttttattttattctcacatttgtgttttttttagaaaagtgaatgatcaataatggcttatcttttataataaaatcttccatttttaataaggtgctcctggaaatccctcacagagccaaaaggaagtttggagagcagccataaggataagaatgatgtgagatgaatctggggttgcacagctagtaccctagtttctctgaaattgtttcttctaagcccactccccatccttctcctgcctgttttagatatgacctttacattactcaaggacaagcaataaaatattttgcactttgttttatttctttcaaggaacttcacaagagcagtcctgtatctgcttttcttaccattgaaccta

SEQ ID NO: 718502 - DNA, 3116 bp, Homo sapiens
aatgttctgtcctggaagaacatactgtcctataagaatcctcttccatagattcatcacaaaaagttgaggtgatcctaacctcctccttccacctagtacctatcctctaggaatccactgggagaggccatcagaggtagaggtagaggtgcccatctccagtcaagatgctgagaagatcccaggcttgacccaccatctgtcccaaccccagccttcatcccttaaggcaagccagggaagcctccccttttctccacacacattccttcttcatgttctcagcattgcccccacaaaggtgtgccagggatatttagtttaaccaattctttatttgacctatgaaaatgtttaaggcacagccaaagtttcctaccattggctgggtccagaacttctgaacgttgacagagaccaccctgtgtatcagcaacaaatcaggcttccctggtttgtccccaaagtgagaaacttttctgtcccatttccagaggcccctagggcaagataaccaagccctgtaactctcagtaatgggacctaaggaaagggaattttcatcttcctagaacattttttcccatttccaaaataaaaataatcaagggctaccctccattaattagtgtctaatgctactctttaaatgctacttcaacatttagtttattcatagttatcctattactttggtttaagatgggccagattaagaaccagcaataaaataatgagcaggaggccacatctgagactatcaccttggggaagttttgcagatgcaccagtcccattagtgtgaatcaggccactgcccctgctaaggataggcaaagagctccctcttctggctacaggtcacataggccgatactcttcgatcttacaaggtggctgacaattgagcttataaactctactacggctgggagatgtgccagatcctgcagatcaaatgaataatggagagtcaggactctgaagaaactcatagtttcaaggatgccactaaaggagggccaaaaaatgcactttcaaactgcaatccagctaacctagtttgcaggtgtcataacttgttccctgagctctgccctctaattatcgctaatgatgatcaacacctacacagccagccaccctgcattcccaggggcaaggacttgggctggctaatgaagagggccagagtctgactttcagaagaccaggtcagaagctgaatgggaaaatcaggccacctagcctggcctggccagcccatcctaatcccccatggcaggtcacagggtaaatttacatgaggctgaattttgagaaaagagcaactttcagggcctttcgcccagctgcccaccactggagtgagtctagcagctaataaaccaaagggcatttttccaggttctagctgggccagtccagggctgaggtcacaatgcccctgtagacacaaatgcatgtgccagrgatttagccgcctcccacccatgtgcagcagcaccctttgggaagcaatggcttttcttcctcaattcaatactttaggacctctgcctggacttcttgaaataaagtgcagagatgtcaccgtaagtaccatgtacactgggtctgttttgttttgtcttgtttgagtctctctgtgtcacaggctggagtgcaatggtgcgatctcagctcactgcaacctgcgactccctggttcacacaattctcccgcttcagcctcccaagtagctgggtttacaggcacgcgccaccacgtccagctaatttttgtatttttagtagacatggggtttcaccatgttggccaggatggtctcaatctcctgacctcatgatctgcctacctcagcctcccaaagtactgggattacaggtgtaagccaccatgcccagcccattgggggtctttaaagaaggagatcaaaggcagcctgcaccatatgtatctgtagacttcaggtctgtttggccccacaccatggtgctacctaccacctgctttatgtgcctcccctcccaggtctgctaatattagggtttggagaacttatagtttgaagggggaatctcaatataatacaacttttgatggtcatattccagagacatctcaggcataatggataatgaagctttgatataaattttaagtcatctccaatagtcccaatgatgtaaaaggataataaatggactctacacacatacaccctgatgcctacatctcaagaacattaaagatgaggaggaaatttaaaaaataaaaaatacatatgggtgtgtatatcctatgtgtgtgtagtatttgtggtgcctatggtagatacatgaacagaagtaattacactcaactcttgacagctattacctccatggaagggaatggcattagttattggtggtggcagtggagaagaaaggaggcagaagggagacttttcctgtgcatacctctttatgtcttcttttttttatttttatttatttttatttttttgacagagtctcactctgtcactcaggctggagtgcagtggcgcaatctcggctcactgcaacctcccctcccgaattcaagagattctcctgcctcagcctcctgagtagctgggattagaggcacccaccaacacacctggctaatttttgtatttttagttgagacagggtttcaccacgttggccaggctagtcttgaactcctgacctcaagtgatctgcccgccttggcctcgcaaagtgctgggattacaggcgtgagctaccacgcccggcccctctttacatctttaatactaaacaaggagaatgtactcctgtattacttgtgctcctcaaaagcaaatgcctatacatgtatcactcgcatcacagcacgacctgagatctatttctacttctacccttagcttatttgagcattcattgttaaacagaaatggtttacctgggactggcttttcccctcttctgtgtgaccctggttgaattataccattaatctgggcttcctttttctcatttgtaaaataagggagttgagcctgttggtgtaaaagaccttcccagcactgacattctgtgattctattacaggt

SEQ ID NO: 718503 - DNA, 994 bp, Homo sapiens
tggttccaattctacgtctgactgtattactgattacctacatgtccttaaatgaaacactttgccaggatgactcttagacttctcatctatgaaattgagatgaaaattgttattcttcctaccatcctgcatttcctgtgtgaataaaatgaacactagctatgaacacaaaacactattaaatttctctttttttccctgattataattattgctaaaatcaccaaaaaagctataatttaaataacacttagtgtggacctggaagtatacgaatcattgtgcataaattaacttagctaaaattcataactaatgtatcaggtaaatatttttcctcccatcttacagaggaaaaatctacgaagtctaatggtgaagtgatatggccaagtctcactgtaactaaatgaattggagttgaaactctgaaatattagactccaaagttctttatcttaatcaaaatgaaacttaaactgaacgtaaaactttacatttttaattgactcttacaatattttaaagtttaaatttaaaaataattatgtaaaagatatgttttctctttaacatttttattctaaaaaattaaataagcataaacacattatttacaaagaattcttttctcctcttgcaatcttttacattttattgttagtttttattggatatttacaaataatatttgaatattaagtacaaagtgatgtatgatacatgtatacaatttggaaagattaaatcaagctaattaacatacctattacctcaaatacttatcatttatttttcctgtctaactgttgtacmcttggaccaacagctcctcatttccactactctctagtctcaagtaactatcattatgctgtctgcttgtatgtgtttgatttttttatgttctacatgtaagtgagaatatgtggtgtctgtttttctgtgtctggcttatttcacttagcataatgccttccaagttcatcca

SEQ ID NO: 718504 - DNA, 543 bp, Homo sapiens
gaagaygacctgagcaccatttaaactcctgggtctgggaaaatccctgctctttgccaaattgccctgtggtgagcatcagtcttgctgggcagaggcttggagtagggctagtagttgggcctcttggctgggatattcaagccagatcctataaattatgggagccaccagctcagttttccaggtgggctatgctgttcactagttactctgattgagcaccaccactggcaggtacacagggccaccacaaagatctgtgtgctgactgctatgggctctaccatcttgctttgtttccacttggcctcagatattctgcctatgctgttacaccttcttttcctgtacagtgaggccaaagttggctttctgagaagtgtctcaaaacatgagaaagactagatgtggttctcttttctcactttagaaaccatgagccttggacaatcctctctttttggtactatgtcaactacaaagacatatttttaagaatcaccataacataatcctgaacatttgtaaataaaacctttt

SEQ ID NO: 718505 - DNA, 543 bp, Homo sapiens
gaagacgacctgagcaccatttaaactcctgggtctgggaaaatccctgctctttgccaaattgccctgtggtgagcatcastcttgctgggcagaggcttggagtagggctagtagttgggcctcttggctgggatattcaagccagatcctataaattatgggagccaccagctcagttttccaggtgggctatgctgttcactagttactctgattgagcaccaccactggcaggtacacagggccaccacaaagatctgtgtgctgactgctatgggctctaccatcttgctttgtttccacttggcctcagatattctgcctatgctgttacaccttcttttcctgtacagtgaggccaaagttggctttctgagaagtgtctcaaaacatgagaaagactagatgtggttctcttttctcactttagaaaccatgagccttggacaatcctctctttttggtactatgtcaactacaaagacatatttttaagaatcaccataacataatcctgaacatttgtaaataaaacctttt

SEQ ID NO: 718506 - DNA, 689 bp, Homo sapiens
caccaaaaaaacacttacgattatgttgcctacagtattcagtgcagtaacatgctgtgaaggtttgtagcctaggagcaatgggccacgccatacagcctagctgtgcggtggctacgtcatctcrgtttgtgtaagaacactctatgttcacactatgatgaaaacacctaatgacacatttctcagagtccctgtggttaagtggtgcatgactgcattttctaattcagttagaagatataggtcaggaaacagctttaaagaagtcatgggtgccgtcgagcacttcctctgttggaaacggccaacaaccattgagggtaaagcaaactctggttcctgtctgattctatacccctaataccccaaagtgagttccaggcaaagtaaagatctgagtgcaaaaaacaaaatcattaagtataaaaataaaattataaatattctagaagaaaataagatggacacttacattatcttcaggaaggattttctgagcacaatactaaacccaaaaactgtcgaggaaaaatttttaacttccacagattagaaaaaaagaaacaacaccgtaaacaaaatagaaagaaaaatatcaagctgggggtaactatttgctgagtatccaataaagaattgtttttatcactctaaaatacacatatttacagaccaatttaaaatga

SEQ ID NO: 718507 - DNA, 2362 bp, Homo sapiens
tattagatatatatatatctaataatataggtgatataagttaggcagaggaagggtgtcacttctttagaatttcttgtttgtttatattttttaagtaaataacattatttagccctattaaataaaaatatttccatttaaaaatagtttgtatgcaagtagtaaatttataattttctaggaataaagtttgaaaatactgcacatataatttgcctacctgtactattaatagattgtaataaaaaggaaaatttgaaaacaaaaacaataaaagaacagcagctcatttacatagaatctctgagctgttcaagtcaattttcttttgccttttggcaaatgtttttcatcggcttcagatgtagaatgcatttgtattggctacaatagctctctaatagctgaagatgcagcatgagtccaaagtctaatagcaaccttaaaataaatcacttttacaccatgtaataaggcaaagccattttactaatggatcacaaagagggtatgaacatgacacaaatgttagtctaaattgaatatggtgaacactattacttctgtagacttcactgctaatgcctgtataagctcttcaacagactggattatcagacttttttttaaatgttcaaaatggatgttcttacgtggcttaatgtaaattgtagaactgataatgtttgtgtcccaaaagttcatactaaaagatctcttatatttttcttatcttctgtattttcaaaggatatttctgaatagatccttttatttagaagtcgttattgattacaaaataaaaacccagaagacacacacgtataccctaaaaccaattccaaaagcccagacaatgcctggtggagtataaatgacattctttgaaattgcttatgtacacagacatacaagtgcacttagtagatgtaattacagcttttacaacagtctaattaaacagcacatccatcatatatattgtctgtattgctaagaattggataaatcactttgaagcaaagcaagcagtgagttgcttcttcctccccacctgctgttactaactgtaaacaagcagcagccacggggagaaaacaatctttcatatcagaaagtgataaatgatatgatttcctgttctcagtgcttcttggctgagaccaaaaaaaatctatatgtgcactgtaattattgcacattatttacttggaaatgaaatttatcctgtgatgtgaatcaacaccrttatttttctatttagacaaaagagaaagataatttttcccaagatgataaagtagtgactatgcagaaggggtgtgcctgacaaacaaactaaattaatttcaaatgataacttccatcaaatgcatgattggctctttctttgtggcacaatttttctataatttaaatgaaaggaaaagagagtttagtattcacattttaaaatcaatacagtcttgattttcatgttgggcttacttaaatgttggaaatttgaaaagaattgactcattaggaagaagaactagtatattgataagtgacttcagatcattgttgagaaaacttaaaatcagccttatgagctcaccgtaaggttaccaagttacacagtcctaaggtgtccagttgtctagatgttaaggggagaaagtcaaaggattggtgaagagtaaagaacggcataaacattacttttcttagagaaatttgaaaagccatcaccattttagggacttactgaaaagtagaaagtaatgagataggggttttcttacttattgaaggtaaaacctgattccttcttttcttttatgagaaaaactgaaaacaaagaaaaaaacttggtctttcaaatcggtaacatagtgaaaagcatcagtgggaaggacaagcattgaaaggccatcatttcttactccacggaaaagcgttccttggcaaccgcatgggaaggaaaagtatgcctttctgctcactgacttctgactattcactgaatttatccacttcattaaaatcccagaattattactagtcaaacacggctttataaattacttaagatgacccaaagaaatgatttcacaatgctttcctctgggtgaacaccagaaaagaaatcagcttacagtcagaagaggcaacacctgtgtggcaactgtttccacagtttcatcaaacttcctgagcaccagttggtggtcccttcaatgcctgctcatggaaggaaagcccaggcatgactaaacagcagtggaaaagccacatggacagagctaggactccacccactcttttggattatttctttgttttctgttcctgggaactgaagagatggaaaggt

SEQ ID NO: 718508 - DNA, 1407 bp, Homo sapiens
atgcattcatatggagactgaatttatatgtctatgtttttttcctgggtcctgcagcattagagttcaaggtgcctatgtacactctccttgggcaaccacagttactctttcgacttgagttattatctaagtgctgctcattcccaaatctctaccctcagcagagacatctctactgagctcttgacccatatattcaactgactcttagaccctcctctcaaatgcctctggcacttctacttccgcatctaaaactgaacttctgtctccaaatgtacttcccttcatagctttccagagtatcgtcttctctattccctaatatataacttttatgtgattctttattcctccacctctcccattcaaaaacattcttacagccctagcatttctaccccttaatattaggtgtgtatactcccttctatctcctctgtccctgcataaacacaagcattcctcaactcagctgcctcctaatgaccttcatctctccaatattgttccattatggatgctagccccaaagagacgctttaaaaattcacacctcattgtgtctttccctagcttaacaattttcagctatttggcattctgtgtggaataatgtgtaaaaactgtagcatggtttccaaggcttctcatgagataatccctgcttacttcaggcttcaccaccactgccacttccccacatctactgcatttcaacctgtttaattacattattcattataaagatgtccaatatctaaagcagacttcctcctttgtcttttacttacaattgtttaaatggctcctcttttttccttcccttgttattgagtaaaaaaaaaaaattcaaaaatttctttaaagaagtgtgtctgcagaattatttgtcaggctctgcaaataaagttgtagaaaaatattaattgcaggatttttgatgttttgcttaaagatacatggtgtcaaagtttcagtgtttctgaaagacagctgaagttcataaaatgcatggagtaaacaaataaaatgtctggctatagaccaccaggaacatatctacagtgcagcaatgaaggcctctgcaaaaagcattaagtgggaattgttaaaggattatggcttgttgtgaatgattttttgagggctgcaggaagcagaggttttctctgaactgggtgttctcaggaagagggaataattccataatttgatctcttagatttttgggttttgttgttgttgttcttgttgtttttactgagaaasgaggagtaacagttggagccgtgattggtaaagaagcagcattcactgaggcgagatgggagggagggaaattggtcatgtttgtggtttgcgcagttccttgtttttatctgtactcagtgaaagttagaa

SEQ ID NO: 718509 - DNA, 1407 bp, Homo sapiens
atgcattcatatggagactgaatttatatgtctatgtttttttcctgggtcctgcagcattagagttcaaggtgcctatgtacactctccttgggcaaccacagttactctttcgacttgagttattatctaagtgctgctcattcccaaatctctaccctcagcagagacatctctactgagctcttgacccatatattcaactgactcttagaccctcctctcaaatgcctctggcacttctacttccgcatctaaaactgaacttctgtctccaaatgtacttcccttcatagctttccagagtatcgtcttctctattccctaatatataacttttatgtgattctttattcctccacctctcccattcaaaaacattcttacagccctagcatttctaccccttaatattaggtgtgtatactcccttctatctcctctgtccctgcataaacacaagcattcctcaactcagctgcctcctaatgaccttcatctctccaatattgttccattatggatgctagccccaaagagacgctttaaaaattcacacctcattgtgtctttccctagcttaacaattttcagctatttggcattctgtgtggaataatgtgtaaaaactgtagcatggtttccaaggcttctcatgagataatccctgcttacttcaggcttcaccaccactgccacttccccacatctactgcatttcaacctgtttaattacattattcattataaagatgtccaatatctaaagcagacttcctcctttgtcttttacttacaattgtttaaatggctcctcttttttccttcccttgttattgagtaaaaaaaaaaaattcaaaaatttctttaaagaagtgtgtctgcagaattatttgtcaggctctgcaaataaagttgtagaaaaatattaattgcaggatttttgatgttttgcttaaagatacatggtgtcaaagtttcagtgtttctgaaagacagctgaagttcataaaatgcatggagtaaacaaataaaatgtctggctatagaccaccaggaacatatctacagtgcagcaatgaaggcctctgcaaaaagcattaagtgggaattgttaaaggattatggcttgttgtgaatgattttttgagggctgcaggaagcagaggttttctctgaactgggtgttctcaggaagagggaataattccataatttgatctcttagatttttgggttttgttgttgttgttcttgttgtttttactgagaaaggaggagtaacagttggagccrtgattggtaaagaagcagcattcactgaggcgagatgggagggagggaaattggtcatgtttgtggtttgcgcagttccttgtttttatctgtactcagtgaaagttagaa

SEQ ID NO: 718510 - DNA, 1407 bp, Homo sapiens
atgcattcatatggagactgaatttatatgtctatgtttttttcctgggtcctgcagcattagagttcaaggtgcctatgtacactctccttgggcaaccacagttactctttcgacttgagttattatctaagtgctgctcattcccaaatctctaccctcagcagagacatctctactgagctcttgacccatatattcaactgactcttagaccctcctctcaaatgcctctggcacttctacttccgcatctaaaactgaacttctgtctccaaatgtacttcccttcatagctttccagagtatcgtcttctctattccctaatatataacttttatgtgattctttattcctccacctctcccattcaaaaacattcttacagccctagcatttctaccccttaatattaggtgtgtatactcccttctatctcctctgtccctgcataaacacaagcattcctcaactcagctgcctcctaatgaccttcatctctccaatattgttccattatggatgctagccccaaagagacgctttaaaaattcacacctcattgtgtctttccctagcttaacaattttcagctatttggcattctgtgtggaataatgtgtaaaaactgtagcatggtttccaaggcttctcatgagataatccctgcttacttcaggcttcaccaccactgccacttccccacatctactgcatttcaacctgtttaattacattattcattataaagatgtccaatatctaaagcagacttcctcctttgtcttttacttacaattgtttaaatggctcctcttttttccttcccttgttattgagtaaaaaaaaaaaattcaaaaatttctttaaagaagtgtgtctgcagaattatttgtcaggctctgcaaataaagttgtagaaaaatattaattgcaggatttttgatgttttgcttaaagatacatggtgtcaaagtttcagtgtttctgaaagacagctgaagttcataaaatgcatggagtaaacaaataaaatgtctggctatagaccaccaggaacatatctacagtgcagcaatgaaggcctctgcaaaaagcattaagtgggaattgttaaaggattatggcttgttgtgaatgattttttgagggctgcaggaagcagaggttttctctgaactgggtgttctcaggaagagggaataattccataatttgatctcttagatttttgggttttgttgttgttgttcttgttgtttttactgagaaaggaggagtaacagttggagccgtgattggtaaagaagcagcattcactgaggcgagatgggagggagggaaattggtcatgtttgtggtttgcrcagttccttgtttttatctgtactcagtgaaagttagaa

SEQ ID NO: 718511 - DNA, 673 bp, Homo sapiens
aaaaaagtagtattaagattgcagtcagttaacaatatagtgatgccggcggctaggactcggagacaaaggagtagaagaactgctgtaattagtactaatcagatgaagaggggtgtgtgatattgggacatggctgggggttttatattaacaattgtggtaataaagttaatagcccctgaagtagaagaaacacctgtcaagtggagtgaaaagatagtgaaatctacagaggcacctgcatgtgttaggtttcctgctaagggaggagagactgttcagccggttccagtgccggcttctactatagtggatgcaagtaataataggaaggagggtgggaggagtcagaagctcatattatttatgcagagaaatgctatatcgggggcgccaattatcgggggactaatcagttgccaagacctccaattatagtattactataaagaaaattatgacaaatgcataggctataacaatgacataaatttgatcatctagtagagttcagctcgaataagrcttaaagctgtactgactatccctgctcatgtgacaaataataaatataatgtcccgatatctttatggttggttgagaatagtcaactgtcagccaacataaatgaagtgagaaaaaagggtaaaatgattgagtagggcatta

SEQ ID NO: 718512 - DNA, 673 bp, Homo sapiens
aaaaaagtagtattaagattgcagtcagttaacaatatagtgatgccggcggctaggactcggagacaaaggagtagaagaactgctgtaattagtactaatcagatgaagaggggtgtgtgatattgggacatggctgggggttttatattaacaattgtggtaataaagttaatagcccctgaagtagaagaaacacctgtcaagtggagtgaaaagatagtgaaatctacagaggcacctgcatgtgttaggtttcctgctaagggaggagagactgttcagccggttccagtgccggcttctactatagtggatgcaagtaataataggaaggagggtgggaggagtcagaagctcatattatttatgcagagaaatgctatatcgggggcgccaattatcgggggactaatcagttgccaagacctccaattatagtattactataaagaaaattatgacaaatgcataggctataacaatgacataaatttgatcatctagtagagttcagctcgaataagacttaaagctgtactgactatccctgctcatgtgmcaaataataaatataatgtcccgatatctttatggttggttgagaatagtcaactgtcagccaacataaatgaagtgagaaaaaagggtaaaatgattgagtagggcatta

SEQ ID NO: 718513 - DNA, 673 bp, Homo sapiens
aaaaaagtagtattaagattgcagtcagttaacaatatagtgatgccggcggctaggactcggagacaaaggagtagaagaactgctgtaattagtactaatcagatgaagaggggtgtgtgatattgggacatggctgggggttttatattaacaattgtggtaataaagttaatagcccctgaagtagaagaaacacctgtcaagtggagtgaaaagatagtgaaatctacagaggcacctgcatgtgttaggtttcctgctaagggaggagagactgttcagccggttccagtgccggcttctactatagtggatgcaagtaataataggaaggagggtgggaggagtcagaagctcatattatttatgcagagaaatgctatatcgggggcgccaattatcgggggactaatcagttgccaagacctccaattatagtattactataaagaaaattatgacaaatgcataggctataacaatgacataaatttgatcatctagtagagttcagctcgaataagacttaaagctgtactgactatccctgctcatgtgacaaataataaatataatgtcccgatatctttatggttggttgagawtagtcaactgtcagccaacataaatgaagtgagaaaaaagggtaaaatgattgagtagggcatta

SEQ ID NO: 718514 - DNA, 1033 bp, Homo sapiens
gcgcactctaatggagaccacggcagacatagtgagagagaaaaaggtgagtaaatatctgaaacggaggcagaaacagagagaatgaaaagccctgtgaatggaagggagagcgaaaagggaaaatggtcctatttacaaatgacagatgtgaaaccggggttcacatcaacagtgtcactgccaggaaggagggtcatgctagccatgtcaccggtagtgtgkcccgcagggacgccgacctgctggagcgtcgtgccagcatgggctctggcagccacgtgggccagcaggagggtcctgctgcacagctgtggggtgaggatagactgggtggtgatatcggccattacaggggactcttctgctggcaagagtgtgacagtagcaagtagatggacaggcctgcgtgtgaggaaggaatgcaggaggggctcttgtgcggctggttgtggggccctcaccggaaatgtggagaaatggccaggtaactgcgtcatgtgggctagtagattggccagggcttcgaactgaaggacaataacggggagtagctgtcaggccctgggagtgtctgagtgtaagtggagatgggtttggggtcactgagggatgcgtgggagccatccctgtataggtacaggtcatagggagatagtctcgtgaggcctgtgagtgtctagggttgtcctgggtgcctggggctgactgtgggagaaatctggggaaggctggagagaagctgggagacccaggagagtccctgaaggcagggggtgaagaggtgaaagaaatggggggagggttgcagtaaggtccgtgagtttgtaggtgattcctgggtgcgggaagctaggggcaggtgaaatctggagatggttggagagtagctgagagagacagaagagtccctgagggttgggggtgagaacatgagggagactagggagtaagtcagtgaaattcgtgagttcggtggtgtatcgtgggtgcctggaactgactccagctggaatctagagaagttttgaca

SEQ ID NO: 718515 - DNA, 1033 bp, Homo sapiens
gcgcactctaatggagaccacggcagacatagtgagagagaaaaaggtgagtaaatatctgaaacggaggcagaaacagagagaatgaaaagccctgtgaatggaagggagagcgaaaagggaaaatggtcctatttacaaatgacagatgtgaaaccggggttcacatcaacagtgtcactgccaggaaggagggtcatgctagccatgtcaccggtagtgtggcccgcagggacgccgacctgctggagcgtcgtgccagcatgggctctggcagccacgtgggccagcaggagggtcctgctgcacagctgtggggtgaggatagactgggtggtgatatcggccattacaggggmctcttctgctggcaagagtgtgacagtagcaagtagatggacaggcctgcgtgtgaggaaggaatgcaggaggggctcttgtgcggctggttgtggggccctcaccggaaatgtggagaaatggccaggtaactgcgtcatgtgggctagtagattggccagggcttcgaactgaaggacaataacggggagtagctgtcaggccctgggagtgtctgagtgtaagtggagatgggtttggggtcactgagggatgcgtgggagccatccctgtataggtacaggtcatagggagatagtctcgtgaggcctgtgagtgtctagggttgtcctgggtgcctggggctgactgtgggagaaatctggggaaggctggagagaagctgggagacccaggagagtccctgaaggcagggggtgaagaggtgaaagaaatggggggagggttgcagtaaggtccgtgagtttgtaggtgattcctgggtgcgggaagctaggggcaggtgaaatctggagatggttggagagtagctgagagagacagaagagtccctgagggttgggggtgagaacatgagggagactagggagtaagtcagtgaaattcgtgagttcggtggtgtatcgtgggtgcctggaactgactccagctggaatctagagaagttttgaca

SEQ ID NO: 718516 - DNA, 2229 bp, Homo sapiens
gatggggcccaggtttgctgtggaatacctgggccatagcgtatctaatgctgcaaaacagcttcaggtatgcctgggtgatttccagtccagtgattaggagttgactgtgtatctagaatagtcttcatgtttgaggctgagtatcttttcaatatgtaaacctaaggttaaaaaaaacaaaaaacaaaaccaaaaacactttttctgatgagatacaagccaaagtaaaaatttccacatctaaacatcctttggtaaatattgaattaccgtttgatggaaagctaaatcctgctggattcgtggatccgcaaatccataactctcctcttcttttcccctcccttcgtggtcctagagggaaggcaatttgaagagtgttaatggtaggctaagttttttaaaaattccatctacacccacttgtaataacctgatgggaggagagtcagggctttcactcggtctttaattaagaaagttgttttggtaagctttaaataccagggtgttatggaggcctcttagcaccagcactaggaagggcaaaccctttgccattatagcatttggccaaaagctagcaagcccatttatgtataagaaggaaatgtttttaaatcatcaaagaaaaatttaagataagcatgagtctaataacagctaaaactttagtattctcataagaggaattattaatccataaatcatcatagtattaaatgagctctaatatttgaagtggtgaatagatctagttctctgggtctagtcacattgagcaccaatttaaatggcctgtgactgtctagacattgaaaagacacgtaaagtcctaggtgaggggatggcaagtcttttcctgtaaaaatccaggtagcattttaggctccacatgtctctgtcatatactgtttgatttgagatgagggttatttgtttacaaccctttaaaaatgtaaaaaccaatctttgctcacaggccatacaaaaacaggctggatgtagcctgcagctatagtttgctggctctgttttaaatgaactattctgttttgtagtgtccttccgtattttcgttgagacccaagatgacaagtttcattggctctatctatgttgactcatcatagacggacttataatcaagatcatttcgtcactcggtttcctagtcacctttttatattttatctttgccctggggctagaagtctctgttaagcatagccatcagttgacatagaaatggcagtgccagacgtcaacattctactttgagttagatgctgaatgggggagagaagttggastggattgggataaagtccatggttgacacagaccacagataactcctatgaaatgaggcccaaacctctgagcaaggcacccacagcccttgtatctactcttctcctgatacctcttcatgtataccctgtgtccttgccattcaagtaacttgcagagccctgggtgggccgcactctctctcaccagtggtggggtcgttccacacaaagttgaaatatctgtctcttccctgcagcccttcctcatttattggacagagatgccgtcacctccatctctatgtttgcacaggagtttataaatgaagcatttagaggtctagagaaatgtggtgattccccattggcaaatattacctttcaaaagtgggggaacagttgtattcttctttgtataataacttcatcttgccttacatctctaaaccagccagagaatcaagcacaaaacaattccagggccttggatgcgatacacagtgtagcagagtacatacgtgtatgggctttgaagtcaggctgagctgagctctagttctttgttttcccacttacctgctgcaagttccccatctgtaaagtagggagtaagaatgacctttcaattattaggaataaatgggatttccctctgtaaagcatttagttcagagtctgacatgtagtaattgctcgataaatggtaacttttattcattccagagcgtttattgagaacctactatgcctaggataattcctgaccaatacaagagagacagtttccatggagatgtgatcggtaaggtggtggagactcagagtgatggatgggctccctttgattggtggtccaggaagcctctaggaggaggaggtggcaacatttaaactgagaccttaatgatattgatgagttcctgttttatca

SEQ ID NO: 718517 - DNA, 2229 bp, Homo sapiens
gatggggcccaggtttgctgtggaatacctgggccatagcgtatctaatgctgcaaaacagcttcaggtatgcctgggtgatttccagtccagtgattaggagttgactgtgtatctagaatagtcttcatgtttgaggctgagtatcttttcaatatgtaaacctaaggttaaaaaaaacaaaaaacaaaaccaaaaacactttttctgatgagatacaagccaaagtaaaaatttccacatctaaacatcctttggtaaatattgaattaccgtttgatggaaagctaaatcctgctggattcgtggatccgcaaatccataactctcctcttcttttcccctcccttcgtggtcctagagggaaggcaatttgaagagtgttaatggtaggctaagttttttaaaaattccatctacacccacttgtaataacctgatgggaggagagtcagggctttcactcggtctttaattaagaaagttgttttggtaagctttaaataccagggtgttatggaggcctcttagcaccagcactaggaagggcaaaccctttgccattatagcatttggccaaaagctagcaagcccatttatgtataagaaggaaatgtttttaaatcatcaaagaaaaatttaagataagcatgagtctaataacagctaaaactttagtattctcataagaggaattattaatccataaatcatcatagtattaaatgagctctaatatttgaagtggtgaatagatctagttctctgggtctagtcacattgagcaccaatttaaatggcctgtgactgtctagacattgaaaagacacgtaaagtcctaggtgaggggatggcaagtcttttcctgtaaaaatccaggtagcattttaggctccacatgtctctgtcatatactgtttgatttgagatgagggttatttgtttacaaccctttaaaaatgtaaaaaccaatctttgctcacaggccatacaaaaacaggctggatgtagcctgcagctatagtttgctggctctgttttaaatgaactattctgttttgtagtgtccttccgtattttcgttgagacccaagatgacaagtttcattggctctatctatgttgactcatcatagacggacttataatcaagatcatttcgtcactcggtttcctagtcacctttttatattttatctttgccctggggctagaagtctctgttaagcatagccatcagttgacatagaaatggcagtgccagacgtcaacattctactttgagttagatgctgaatgggggagagaagttggactggattgggataaagtccatggttgacacagaccacagataactcctatgaaatgaggcccaaacctctgagcaaggcacccacagcccttgtatctactcttctcctgatacctcttcatgtataccctgtgtccttgccattcaagtaacttgcagagccctgggtgggccgcactctctctcaccagtggtggggtcgttccacacaaagttgaaatatctgtctcttccctgcagcccttcctcatttattggacagagatgccgkcacctccatctctatgtttgcacaggagtttataaatgaagcatttagaggtctagagaaatgtggtgattccccattggcaaatattacctttcaaaagtgggggaacagttgtattcttctttgtataataacttcatcttgccttacatctctaaaccagccagagaatcaagcacaaaacaattccagggccttggatgcgatacacagtgtagcagagtacatacgtgtatgggctttgaagtcaggctgagctgagctctagttctttgttttcccacttacctgctgcaagttccccatctgtaaagtagggagtaagaatgacctttcaattattaggaataaatgggatttccctctgtaaagcatttagttcagagtctgacatgtagtaattgctcgataaatggtaacttttattcattccagagcgtttattgagaacctactatgcctaggataattcctgaccaatacaagagagacagtttccatggagatgtgatcggtaaggtggtggagactcagagtgatggatgggctccctttgattggtggtccaggaagcctctaggaggaggaggtggcaacatttaaactgagaccttaatgatattgatgagttcctgttttatca

SEQ ID NO: 718518 - DNA, 956 bp, Homo sapiens
tgctgttttactacctatattttcacttgytaaatcataatattctattaaatatttgttcagtcactgtcaatggttatagactataccacagcaaacaattcattactattaaacatctgggttgtttccaactctgtagtaaagaccttacatacactctattattccttagaacaaattcctgtaagtgaaacgtgacattattttttgtcatttttctcttttactgtggtaaaatatataaaacgtaagatttgtcatcttaaccgttttaaaatgtacaactcagtatcattaattatactcacaatgttgtgcaaccattgttactattttcaaaacacttttatcaccaccaaggagaaactaccctttaagtaacctcccccaacttctttctcccacccaacccccagtaacctttcatatatttctttacctattaatctgcctattcaagatatttcatttatgtgagctcatacaaaatttgtccctttatgtcaggcttactgcacttaacacaaagttttcaaggttcatccatgttgtaccatgtattagattttcattacatttaatggctgagtaacattcagttgtatgtagataccacattatggttttctatgcatcttttaatagacacgggttgtttccaccttttggatattgtgaataatcctactgtaaacattcaaatacaagtatctattacatttaagacttttttttttaaactgttccttgcgtagcagggctacctcataggcagtgtgcccacagtagccacatttaagacttttggtaactatggcccaattgcctttcagcaagaaagtcactaaaactcatagccatatacatacatacatacacacatatatatatgtatacgaatgctcattttatcatgatctgccatcttaacagatttaaatggcacttagatt

SEQ ID NO: 718519 - DNA, 956 bp, Homo sapiens
tgctgttttactacctatattttcacttgttaaatcataatattctattaaatatttgttcagtcactgtcaatggttatagactataccacagcaaacaattcattactattaaacatctgggttgtttccaactctgtrgtaaagaccttacatacactctattattccttagaacaaattcctgtaagtgaaacgtgacattattttttgtcatttttctcttttactgtggtaaaatatataaaacgtaagatttgtcatcttaaccgttttaaaatgtacaactcagtatcattaattatactcacaatgttgtgcaaccattgttactattttcaaaacacttttatcaccaccaaggagaaactaccctttaagtaacctcccccaacttctttctcccacccaacccccagtaacctttcatatatttctttacctattaatctgcctattcaagatatttcatttatgtgagctcatacaaaatttgtccctttatgtcaggcttactgcacttaacacaaagttttcaaggttcatccatgttgtaccatgtattagattttcattacatttaatggctgagtaacattcagttgtatgtagataccacattatggttttctatgcatcttttaatagacacgggttgtttccaccttttggatattgtgaataatcctactgtaaacattcaaatacaagtatctattacatttaagacttttttttttaaactgttccttgcgtagcagggctacctcataggcagtgtgcccacagtagccacatttaagacttttggtaactatggcccaattgcctttcagcaagaaagtcactaaaactcatagccatatacatacatacatacacacatatatatatgtatacgaatgctcattttatcatgatctgccatcttaacagatttaaatggcacttagatt

SEQ ID NO: 718520 - DNA, 590 bp, Homo sapiens
caaatataataaatcagtgatggcgaggtaagggcaggagcaccagtagcaggtgggcagggtgtgggctgggtgttggcaccagagggctatttaaaaaataagatcagtaatgattttctgtattttgctagcatttcttcttagcttttatatttcctttcatcatgtaggagctaaaacactatgacaaaattttgggttttttttgagacrgagtctcactgtgtcacccaggctggagtgcagtggcgcgatctttgcttactgcaacctcccacctcccggttcgagtgattctcctgcctcagactcccgagtaggaacaaaaatatttttaagatcaaaaagaaccatcaagaaaatggcttccttttcaaccacttgtggtagaaaatctgcaagaacacacagcaagaggtataatattgaaaactagaagcaaaataattattatttccagctttagaaaggaggtggcctagttgatcaaataatgagaaattacaaagttggttgactacattattaaaatccagttttgcaaacctcaatagtgaggcctttaaaatggaccagttgccaaagga

SEQ ID NO: 718521 - DNA, 590 bp, Homo sapiens
caaatataataaatcagtgatggcgaggtaagggcaggagcaccagtagcaggtgggcagggtgtgggctgggtgttggcaccagagggctatttaaaaaataagatcagtaatgattttctgtattttgctagcatttcttcttagcttttatatttcctttcatcatgtaggagctaaaacactatgacaaaattttgggttttttttgagacggagtctcactgtgtcrcccaggctggagtgcagtggcgcgatctttgcttactgcaacctcccacctcccggttcgagtgattctcctgcctcagactcccgagtaggaacaaaaatatttttaagatcaaaaagaaccatcaagaaaatggcttccttttcaaccacttgtggtagaaaatctgcaagaacacacagcaagaggtataatattgaaaactagaagcaaaataattattatttccagctttagaaaggaggtggcctagttgatcaaataatgagaaattacaaagttggttgactacattattaaaatccagttttgcaaacctcaatagtgaggcctttaaaatggaccagttgccaaagga

SEQ ID NO: 718522 - DNA, 590 bp, Homo sapiens
caaatataataaatcagtgatggcgaggtaagggcaggagcaccagtagcaggtgggcagggtgtgggctgggtgttggcaccagagggctatttaaaaaataagatcagtaatgattttctgtattttgctagcatttcttcttagcttttatatttcctttcatcatgtaggagctaaaacactatgacaaaattttgggttttttttgagacggagtctcactgtgtcacccaggctggagtgcagtggcgygatctttgcttactgcaacctcccacctcccggttcgagtgattctcctgcctcagactcccgagtaggaacaaaaatatttttaagatcaaaaagaaccatcaagaaaatggcttccttttcaaccacttgtggtagaaaatctgcaagaacacacagcaagaggtataatattgaaaactagaagcaaaataattattatttccagctttagaaaggaggtggcctagttgatcaaataatgagaaattacaaagttggttgactacattattaaaatccagttttgcaaacctcaatagtgaggcctttaaaatggaccagttgccaaagga

SEQ ID NO: 718523 - DNA, 766 bp, Homo sapiens
tgatggctttgataagtgtatatataatgtacatatactgcaattagtcataataaaccctgggaagtagaacttagggacaggaatcataaaacaacacatacattgtctgaacttttgcaaagagcaaatattttcataaaaaataaaaattaattatagtagtcagtcttatttttatttaaagataatagactttttcctaattatacaattatacatttttaatttaaaaatgttcgaaaatacatatatttacctagtcttaactactacctagaaataatcaccaaaaacattattgtgtatattatacttcccttccctagtgtaatgaaactttttgcaaaattcttatatagcataaatactgttttccagatgccatatcatatcatagatatcccttcatgtcattaaatgcgaagttttcccttgcaggctttaccatcatttgtttaatccctctacggatgcccacttaactagattctatttttctccattataaacaaggttctgtagaacatcttgttagataaatatttgtcttcatccttaattagttaattaaggaagcttcctaggagtgtgacttggacacaccaatgagagtgcttacttttagcgatcttagtaaatattgtttatttttttctccagaaaaacattatcacatacttttgtttctatttaatgtggccatttcatttgcytttttttcattatttgtattgatattacatttaaaaactacttttctttg

SEQ ID NO: 718524 - DNA, 600 bp, Homo sapiens
tcttttttctaaaattttataattttacatgtgagtccattatctatttgagttaatttttgtataagagtgaggtttaagtcaaggtttttttcttttgcttatggatatacaattacttctgcattatttgttaaaaaragaacaagaatcatgtcaaagatgggattccctagaaaataaaatatgtgaaggagatatctgtatacaaagtgaaagaataaggagtgactggagtgagatatagtctcaaaaatagccttaatagcccccagaaagaactcgagttgggatatctctgtagactggtactacattggaacactagagccagagctgtataactcccagtgcctccccatcctcacgcactggttctatgcatgctgcctctgaaaaaggaagtgaccttggatgaggagactctcaggcaattccaaaagggggaaacaagaagacctgtcaatcaccaacaccaccagcacttgcctgaatgagttcttctgtctcgagtagatgatccaggcagctaatttcagcatccactggaaataataaatgcaaaatttagaataggttttcctctggaagtgggcacga

SEQ ID NO: 718525 - DNA, 2858 bp, Homo sapiens
aattaacttgcagttaattcttacagtagtatgagtttgggcctcttaaaaaaagaactaaaaccaactccctgcctgagaatagaaacacacacacacacacacacacacacacacacaccaaattgaataatcttgttttctcgcttacaattgtgggcattcatttatggaattcttggcagctatgttagcataaaaccccacctataattatcattcatattagaataatatttcacaaatgtggtcagtattgtcttctgcaacattacagttagttggtggaataagttctagtgttgtacagcactatagggtaaccacagtaaacaacagtgtgttgtcttttttttcagatacctgggagagaggatttttcatgttaccaacacaaagaaatgataaaggtttgaggtcatgggcatgctaattaccctgatttgatcattatacattttatacatctactgaaatatcccactgtaccccataaatatgtacaattattatgtgtcaagtaaaatatgaatatatatagtaaataaataaatgaagtaatttgccattacttaacatttcattaaatgtatgtttccaaaattatatttgttcttgagaccttttgagtgatcacagtttctgctattctccataaggcctcagtttgacagggtgatgaaatcttgaataaaacacaaaggaatgtgtttgtatttgcagtgcttcccttgcaggtgaaatggccaccagacccaggctttctggaatgcattcattttctgcagttgaaagggacaatcccggatctgaaagaaagagccacagtgactccaagagtggagccagggcatgctggacactgcatagctatggccaagtgtgtcacctctgagggagatgtgagagaaacgcagagggatcgcttgtgactgtgccttctcgatgtatgatggactgttctgctcaaatagtaagtgtgaccaaggagccggtgaacataggaaacaaagaatatttcatttgacattataaggaatgcgacaattctagtcacttgaaagtgaactatatctgtcgagaattcctagttttaattgggaagaaatgcgcttctcttcttgaaaagccacaggttattgctgttatgtctaatatcagtcctctctggatttctcaaaagattttctgtatatcctaccattttccttctgttgctgcagtttggaagtagtttgttatcaggattatcaaagcatcattgctatttatgacaatgactttaagaaatgcaagaatatttggaacactgtagaaaaaatattttagcctggaaggcaaatactaatttcaggaaccattgatctgttataaaacaggaccactcagacatttagctctaagactttcacatatccgttgttagaggcgtatagtggggggcatgactcagcttctgcttaagtacaaggtgttgtctgcagcgaaggaagaatttgattgtagtatcaacagaaccagacagaactctttgaatataattatatatcttggaaactgactcatcaaagctattagattacatggcatcatttaagcatcactgggctctgtacttttcattatctgtactyttcattatggagtataataggctttatttggtacagaaattgggtctaagatgaaacaacttgtgatttttgaataaacttttggggattagttactttgatgttgtcaagatagcaccatagtaagtcctctgtctttcctcttgatttatttataatttagaatcagtttatgattttaaaaaatgtgacagacacagtggcatgcaccagtagtaccagccacatgggaaactgaggcagaaggatcacttgatcccagaagatagagaccaccctgggcaacatagtgagagccccatctcaaaaaaaaaaaatcagttcccaataccattccagaacacttttaatataaccagatgaaattgtgatcactactttactgtaatgtttaaaatggtcctcagtccatatttaagtacaatcttagtgtttctgtgcaacctaatatattagaaacaaaaattgtattgcatttgaataggaaatactctgaattgagggttatttcttttaacagttgcaattagattggttagtgacaattatctgtaattttcaggcaatgcctaggcaagtgcccaaggcacagtagcctcctccttgcctccgtgtgtgtgtgtgtgtgtgtgtgtgtgtgtgtgtgtgtagggtggtaacatttctgggaatttgtcttaacataaaatgataccacctttcacaaaacgacctagaggaagttggaaatcccactatcctggcttcctgctgagcaatatctgcttctctttctgactcaggctgatgcatctgtatacttagcttcacttctccagtaaataagggagagctttattataaaagacaacttctattgattttcaagggggtgggtggttgtcaagctcactcctttctatgcactgagggaaaattattgtaagcgatctgtaaaacaatagatgaaaaaagaggagataaaaattaaataaaatttaaataaaaactaggatcctaagtggaaaaatagctttaaattagaaattgataccaaaaaataatgatatgtaatctaaggtgaaaatattttgaagactatcacgatatctcccttaaatgttatttagttctgaaaaatatgtattgaagaactgttatattttactttatgtcatattaagtgtggtaaaattaaagagaaacaagtagataaaagtaaagattgtattattattttatcac

SEQ ID NO: 718526 - DNA, 2858 bp, Homo sapiens
aattaacttgcagttaattcttacagtagtatgagtttgggcctcttaaaaaaagaactaaaaccaactccctgcctgagaatagaaacacacacacacacacacacacacacacacacaccaaattgaataatcttgttttctcgcttacaattgtgggcattcatttatggaattcttggcagctatgttagcataaaaccccacctataattatcattcatattagaataatatttcacaaatgtggtcagtattgtcttctgcaacattacagttagttggtggaataagttctagtgttgtacagcactatagggtaaccacagtaaacaacagtgtgttgtcttttttttcagatacctgggagagaggatttttcatgttaccaacacaaagaaatgataaaggtttgaggtcatgggcatgctaattaccctgatttgatcattatacattttatacatctactgaaatatcccactgtaccccataaatatgtacaattattatgtgtcaagtaaaatatgaatatatatagtaaataaataaatgaagtaatttgccattacttaacatttcattaaatgtatgtttccaaaattatatttgttcttgagaccttttgagtgatcacagtttctgctattctccataaggcctcagtttgacagggtgatgaaatcttgaataaaacacaaaggaatgtgtttgtatttgcagtgcttcccttgcaggtgaaatggccaccagacccaggctttctggaatgcattcattttctgcagttgaaagggacaatcccggatctgaaagaaagagccacagtgactccaagagtggagccagggcatgctggacactgcatagctatggccaagtgtgtcacctctgagggagatgtgagagaaacgcagagggatcgcttgtgactgtgccttctcgatgtatgatggactgttctgctcaaatagtaagtgtgaccaaggagccggtgaacataggaaacaaagaatatttcatttgacattataaggaatgcgacaattctagtcacttgaaagtgaactatatctgtcgagaattcctagttttaattgggaagaaatgcgcttctcttcttgaaaagccacaggttattgctgttatgtctaatatcagtcctctctggatttctcaaaagattttctgtatatcctaccattttccttctgttgctgcagtttggaagtagtttgttatcaggattatcaaagcatcattgctatttatgacaatgactttaagaaatgcaagaatatttggaacactgtagaaaaaatattttagcctggaaggcaaatactaatttcaggaaccattgatctgttataaaacaggaccactcagacatttagctctaagactttcacatatccgttgttagaggcgtatagtggggggcatgactcagcttctgcttaagtacaaggtgttgtctgcagcgaaggaagaatttgattgtagtatcaacagaaccagacagaactctttgaatataattatatatcttggaaactgactcatcaaagctattagattacatggcatcatttaagcatcactgggctctgtacttttcattatctgtactcttcattatggagtataataggctttatttggtacagaaattgggtctaagatgaaacaacttgtgatttttgaataaacttttggggattagttactttgatgttgtcaagatagcaccatagtaagtcctctgtctttcctcttgatttatttataatttagaatcagtttatgattttaaaaaatgtgacagacacagtggcatgcaccagtagtaccagccacatgggaaactgaggcagaaggatcacttgatcccagaagatagagaccaccctgggcaacatagtgagagccccatctcaaaaaaaaaaaatcagttcccaataccattccagaacacttttaatataaccagatgaaattgtgatcactactttactgtaatgtttaaaatggtcctcagtccatatttaagtacaatcttagtgtttctgtgcaacctaatatattagaaacaaaaattgtattgcatttgaataggaaatactctgaattgagggttatttcttttaacagttgcaattagattggttagtgacaattatctgtaattttcaggcaatgcctaggcaagtgcccaaggcacagtagcctcctccttgcctcygtgtgtgtgtgtgtgtgtgtgtgtgtgtgtgtgtgtgtagggtggtaacatttctgggaatttgtcttaacataaaatgataccacctttcacaaaacgacctagaggaagttggaaatcccactatcctggcttcctgctgagcaatatctgcttctctttctgactcaggctgatgcatctgtatacttagcttcacttctccagtaaataagggagagctttattataaaagacaacttctattgattttcaagggggtgggtggttgtcaagctcactcctttctatgcactgagggaaaattattgtaagcgatctgtaaaacaatagatgaaaaaagaggagataaaaattaaataaaatttaaataaaaactaggatcctaagtggaaaaatagctttaaattagaaattgataccaaaaaataatgatatgtaatctaaggtgaaaatattttgaagactatcacgatatctcccttaaatgttatttagttctgaaaaatatgtattgaagaactgttatattttactttatgtcatattaagtgtggtaaaattaaagagaaacaagtagataaaagtaaagattgtattattattttatcac

SEQ ID NO: 718527 - DNA, 960 bp, Homo sapiens
ggaaggaaaactctatgcaaaggtattgataattgatagcttaggcttaatttttaaaactcttttgttgaaatatctcaccattctgaaaagtaaaaatggacttaatttatctccaactgtataatttaatgattttattaaaacactttatactcaaacattaagaaaaaatgttttctgtgtgactttggacaaatggcttgttctttggattttggtttcttcatctgtaaaatgagttgaattagctgacctctaaggatcctgccagctctaaaattccatgtgcattttagatatttaaaatccaaaatttccatttgccagtattaaagctctttttgttaaagttcactcaatttgcacattgctgacatgaaaattcttgggaaaaaatcttgaaatgtttagttcattcatcaatatcaatctgacaatcatgggctttgaactgtaattattcacattgttcccacttcactacaatgcaaaatatgtaacagttcatctcactgtaataaaatataattggctttcctttatattcccacagctcagcataatgcctggaacaggctaattrtataatgatacaggtttaactgaatgaacaaatggttgcatggatgaacaaacaaattaaccttttatcttccattaccattgaagacaatgtagaagtaaataaagaaaagttgtgaaacaagtctctcacctgagggaggcagaggttctgctaattatagcaaatttccagtggttaaagaatgagtgatgtgggaatagtaatatgaggcctgttacttagggggaaataggtcctaattttaaagaatagttgacatgaacttccaaaaagctacacatatttcataactagctgtgtattatgtggtgtttctatttcaaatttaagataccttttaatgcaaatatactacataagtctagctaata

SEQ ID NO: 718528 - DNA, 2161 bp, Homo sapiens
  misc_feature 388, 389, 390, 391, 392, 393, 394, 395, 396, 397, 398, 399,400, 401, 402, 403, 404, 405, 406, 407, 408, 409, 410, 411,412, 413, 414, 415, 416, 417, 418, 419, 420, 421, 422, 423,424, 425, 426, 427, 428, 429, 430, 431, 432, 433, 434: n = A,T,C or G
  misc_feature 435, 436, 437, 438, 439, 440, 441, 442, 443, 444, 445, 446,447, 448, 449, 450, 451, 452, 453, 454, 455, 456, 457, 458,459, 460, 461, 462, 463, 464, 465, 466, 467, 468, 469, 470,471, 472, 473, 474, 475, 476, 477, 478, 479, 480, 481: n = A,T,C or G
  misc_feature 482, 483, 484, 485, 486, 487: n = A,T,C or G
taacaaaattattgaatgcatctaaagcttgtattcaattgtagtagtaaatgtgtacatttaamaaatctatctaaatcaactagtaaatgtaatcaaacatcagtaaagaataagaatttcagcagttataaataaataacaattaaaagccatagaaaaatcaattaaagtttggttttattgaaaagattaagaaaaccgacaaacagattaaaagaaaaaagaagatacctcaaataattaaattcataaataaaagaggagctattactactgatgccacaaaagtaggaaaagaagagattataaaagtttaattccaagtatatgccaaaaaatatgataagctaatagaaatagacaaatgtctagaaatacagattannnnnnnnnnnnnnnnnnnnnnnnnnnnnnnnnnnnnnnnnnnnnnnnnnnnnnnnnnnnnnnnnnnnnnnnnnnnnnnnnnnnnnnnnnnnnnnnnnnnccttttaagcaccagtacaatgtgtgaaacgaaatgtgaaattgaggcatatatgtaattttatgtgtaaaatattccctttttttctggtgatgaagtatgtttaacatgagatatatcctcttaataaatttttaactgctcaatagaatcttgttaactataggtgctctgttgacagcagatctctaaaacttattcatctgttataactgaattttatacccattgaacagctaccccaatttcccctccttccagaccctggcaaccagtattctactctatttctaggagtttaactattttagatatcttatgtaagtggaatcaggcagtattaaaacatactttcaattagtaatgactataattcggataatttaaataagagaaagcaaacatcactactactagcttttgggggaaaatattacaaatagggatattgtgataaaagtgtacaatattttttatatttgtgcacttagatccgtgttcaaactttgccacctatacatgtatagcacatttgaatatgtgctacagtatgccatttataaagactgaaaataacattttataaaatattattatttatttggcaacctcatgagctttggcttcaaaaatacctgatttacaaagcataatcctagtgctggagaacagatcagtggctgccaaaggttagggttggttggaagatgtgattagtgagggataacatgaaaacatgtactttctttgtggtgatagagcagttctgcatccagattatggtgatggttacataaatccgcacttcatagatctatacacacacatcacacatacactcacacacacctacacaagagtacatgtaaaatccttagaaatatgaatagggtctgaacctaagttaatggtatggaaacaatgtcaatttcctgattttggcaacatactaggttaagttagatataattattggggaaagttggctgaaaataacacggtcattctttttactattttttaacttcttgtgagtcaaattatttaaaaataattggtattaaacaaagacaaaaaatctaaaatttctaaaatcaaagcctttatgaatttgaacatattatttgatttcttttgtagaccttgatttcttcacctgtaaaaatggaatgatagtagaatttctatctcattattgtcatgcttaaaccataccatttatgtaagtgcccagtaccgtgtctggtgaacaataatgcttaaacactgagttccccacttttttgtggctgttggtttacaggtggtttttaagttcctaagtggaagtttgtttaaaaagaggcagtcaaaataaacagcaatgtctcagagcatcatctgaacaagaaaggaaggtgttctccatcccttgaagtggtctcagtcctcttttattgtttagctctcatgtgagtcttcacaaataacctcaagaattgctacaacaccaacagagaattaactctcattgagtttttagctcagtagattctgggtcctaaaatttatggactcacctgctttttaaatctttcccatttagaaatattcaatttaaatcttccttcagtaagtaattgttaactattaacaatcctaacattataataaagtcagaagtaacatttatta

SEQ ID NO: 718529 - DNA, 2161 bp, Homo sapiens
  misc_feature 388, 389, 390, 391, 392, 393, 394, 395, 396, 397, 398, 399,400, 401, 402, 403, 404, 405, 406, 407, 408, 409, 410, 411,412, 413, 414, 415, 416, 417, 418, 419, 420, 421, 422, 423,424, 425, 426, 427, 428, 429, 430, 431, 432, 433, 434: n = A,T,C or G
  misc_feature 435, 436, 437, 438, 439, 440, 441, 442, 443, 444, 445, 446,447, 448, 449, 450, 451, 452, 453, 454, 455, 456, 457, 458,459, 460, 461, 462, 463, 464, 465, 466, 467, 468, 469, 470,471, 472, 473, 474, 475, 476, 477, 478, 479, 480, 481: n = A,T,C or G
  misc_feature 482, 483, 484, 485, 486, 487: n = A,T,C or G
taacaaaattattgaatgcatctaaagcttgtattcaattgtagtagtaaatgtgtacatttaaaaaatctatctaaatcaactagtaaatgtaatcaaacatcagtaaagaataagaatttcagcagttataaataaataacaattaaaagccatagaaaaatcaattaaagtttggttttattgaaaagattaagaaaacygacaaacagattaaaagaaaaaagaagatacctcaaataattaaattcataaataaaagaggagctattactactgatgccacaaaagtaggaaaagaagagattataaaagtttaattccaagtatatgccaaaaaatatgataagctaatagaaatagacaaatgtctagaaatacagattannnnnnnnnnnnnnnnnnnnnnnnnnnnnnnnnnnnnnnnnnnnnnnnnnnnnnnnnnnnnnnnnnnnnnnnnnnnnnnnnnnnnnnnnnnnnnnnnnnnccttttaagcaccagtacaatgtgtgaaacgaaatgtgaaattgaggcatatatgtaattttatgtgtaaaatattccctttttttctggtgatgaagtatgtttaacatgagatatatcctcttaataaatttttaactgctcaatagaatcttgttaactataggtgctctgttgacagcagatctctaaaacttattcatctgttataactgaattttatacccattgaacagctaccccaatttcccctccttccagaccctggcaaccagtattctactctatttctaggagtttaactattttagatatcttatgtaagtggaatcaggcagtattaaaacatactttcaattagtaatgactataattcggataatttaaataagagaaagcaaacatcactactactagcttttgggggaaaatattacaaatagggatattgtgataaaagtgtacaatattttttatatttgtgcacttagatccgtgttcaaactttgccacctatacatgtatagcacatttgaatatgtgctacagtatgccatttataaagactgaaaataacattttataaaatattattatttatttggcaacctcatgagctttggcttcaaaaatacctgatttacaaagcataatcctagtgctggagaacagatcagtggctgccaaaggttagggttggttggaagatgtgattagtgagggataacatgaaaacatgtactttctttgtggtgatagagcagttctgcatccagattatggtgatggttacataaatccgcacttcatagatctatacacacacatcacacatacactcacacacacctacacaagagtacatgtaaaatccttagaaatatgaatagggtctgaacctaagttaatggtatggaaacaatgtcaatttcctgattttggcaacatactaggttaagttagatataattattggggaaagttggctgaaaataacacggtcattctttttactattttttaacttcttgtgagtcaaattatttaaaaataattggtattaaacaaagacaaaaaatctaaaatttctaaaatcaaagcctttatgaatttgaacatattatttgatttcttttgtagaccttgatttcttcacctgtaaaaatggaatgatagtagaatttctatctcattattgtcatgcttaaaccataccatttatgtaagtgcccagtaccgtgtctggtgaacaataatgcttaaacactgagttccccacttttttgtggctgttggtttacaggtggtttttaagttcctaagtggaagtttgtttaaaaagaggcagtcaaaataaacagcaatgtctcagagcatcatctgaacaagaaaggaaggtgttctccatcccttgaagtggtctcagtcctcttttattgtttagctctcatgtgagtcttcacaaataacctcaagaattgctacaacaccaacagagaattaactctcattgagtttttagctcagtagattctgggtcctaaaatttatggactcacctgctttttaaatctttcccatttagaaatattcaatttaaatcttccttcagtaagtaattgttaactattaacaatcctaacattataataaagtcagaagtaacatttatta

SEQ ID NO: 718530 - DNA, 2161 bp, Homo sapiens
  misc_feature 388, 389, 390, 391, 392, 393, 394, 395, 396, 397, 398, 399,400, 401, 402, 403, 404, 405, 406, 407, 408, 409, 410, 411,412, 413, 414, 415, 416, 417, 418, 419, 420, 421, 422, 423,424, 425, 426, 427, 428, 429, 430, 431, 432, 433, 434: n = A,T,C or G
  misc_feature 435, 436, 437, 438, 439, 440, 441, 442, 443, 444, 445, 446,447, 448, 449, 450, 451, 452, 453, 454, 455, 456, 457, 458,459, 460, 461, 462, 463, 464, 465, 466, 467, 468, 469, 470,471, 472, 473, 474, 475, 476, 477, 478, 479, 480, 481: n = A,T,C or G
  misc_feature 482, 483, 484, 485, 486, 487: n = A,T,C or G
taacaaaattattgaatgcatctaaagcttgtattcaattgtagtagtaaatgtgtacatttaaaaaatctatctaaatcaactagtaaatgtaatcaaacatcagtaaagaataagaatttcagcagttataaataaataacaattaaaagccatagaaaaatcaattaaagtttggttttattgaaaagattaagaaaaccgacaaacagattaaaagaaaaaagaagatacctcaaataattaaattcataaataaaagagkagctattactactgatgccacaaaagtaggaaaagaagagattataaaagtttaattccaagtatatgccaaaaaatatgataagctaatagaaatagacaaatgtctagaaatacagattannnnnnnnnnnnnnnnnnnnnnnnnnnnnnnnnnnnnnnnnnnnnnnnnnnnnnnnnnnnnnnnnnnnnnnnnnnnnnnnnnnnnnnnnnnnnnnnnnnnccttttaagcaccagtacaatgtgtgaaacgaaatgtgaaattgaggcatatatgtaattttatgtgtaaaatattccctttttttctggtgatgaagtatgtttaacatgagatatatcctcttaataaatttttaactgctcaatagaatcttgttaactataggtgctctgttgacagcagatctctaaaacttattcatctgttataactgaattttatacccattgaacagctaccccaatttcccctccttccagaccctggcaaccagtattctactctatttctaggagtttaactattttagatatcttatgtaagtggaatcaggcagtattaaaacatactttcaattagtaatgactataattcggataatttaaataagagaaagcaaacatcactactactagcttttgggggaaaatattacaaatagggatattgtgataaaagtgtacaatattttttatatttgtgcacttagatccgtgttcaaactttgccacctatacatgtatagcacatttgaatatgtgctacagtatgccatttataaagactgaaaataacattttataaaatattattatttatttggcaacctcatgagctttggcttcaaaaatacctgatttacaaagcataatcctagtgctggagaacagatcagtggctgccaaaggttagggttggttggaagatgtgattagtgagggataacatgaaaacatgtactttctttgtggtgatagagcagttctgcatccagattatggtgatggttacataaatccgcacttcatagatctatacacacacatcacacatacactcacacacacctacacaagagtacatgtaaaatccttagaaatatgaatagggtctgaacctaagttaatggtatggaaacaatgtcaatttcctgattttggcaacatactaggttaagttagatataattattggggaaagttggctgaaaataacacggtcattctttttactattttttaacttcttgtgagtcaaattatttaaaaataattggtattaaacaaagacaaaaaatctaaaatttctaaaatcaaagcctttatgaatttgaacatattatttgatttcttttgtagaccttgatttcttcacctgtaaaaatggaatgatagtagaatttctatctcattattgtcatgcttaaaccataccatttatgtaagtgcccagtaccgtgtctggtgaacaataatgcttaaacactgagttccccacttttttgtggctgttggtttacaggtggtttttaagttcctaagtggaagtttgtttaaaaagaggcagtcaaaataaacagcaatgtctcagagcatcatctgaacaagaaaggaaggtgttctccatcccttgaagtggtctcagtcctcttttattgtttagctctcatgtgagtcttcacaaataacctcaagaattgctacaacaccaacagagaattaactctcattgagtttttagctcagtagattctgggtcctaaaatttatggactcacctgctttttaaatctttcccatttagaaatattcaatttaaatcttccttcagtaagtaattgttaactattaacaatcctaacattataataaagtcagaagtaacatttatta

SEQ ID NO: 718531 - DNA, 1933 bp, Homo sapiens
aacatatttatatgattaagatcgtatcacttgaactgtcactttagtctccaatagtcctgagttattacatattcaaatttcattgtacagatattttctccctccttcctccctcccccattctgttctttccttcattccttcctctgccacctcctctctcccttccttcctttcttcttttcttttgagacagggtcttacctcacccaggctggagtgcagtggtgcaatcatgggtcaccacagcctctatctrctgagctcaagcaatctctccacctccacctcccaagtagcttggactacaggtgtgcaccaactgcacctggatgatttcttaaatttattttttgtagttacaaggcctcacaatgttgcctaggcttgtctgggactcctggaatcaagcagtcctcccacctctgcctcccaaagtgctaggatcacagacatgagccacctcagccagacagacattttcttaagaatggaaatgactttaccccactaatctatcatgaaaactaatactcagcagaatgaactttaggccatactatggtaacaagccatttagggataatcctgatattatgttatgctcttatcatagcagtggtttttaaggcagtttattgttattcttctactgtttataatatattatacatagtttgcaataacttgatttatattttgatatatattccacacagcgaatctgtgtggtatggaatgaaatgaattgtatttatatgcaaaaaagccaagttttttgttgttgttgttgttactcctgtcatgcaaatgctttgaacaagttgtttaatggttgttagttttagttttatcatatgcattcctttattaattattctgagctcacagagttgagaattaaataaagttactaattcaagcattaatgtattcatttactcattattgaatgaatgtttcttgggttgttgttatgtgagaggcactgctaggtaataagcataaataatgaaataaagtgaattattgatttctactttcctggagtacacagtctagtgggtgagacagacctaattaaaataattacaccaataaaaatttaacttaagttagaataaaggagaaaggtatgcagtattatttaaccgtatacaatagataacctcagtctaatgataaggcaagaatattcttaaacagtaacatttccatagcacttgacaccacctaactctaagctatttagggagttattagttctgtgtctccctatataagagaatataaactctatgagagcttcagtattttgttcactctatcccccagtgtctaaaatactgcatgagtgaatggatagttgaaactagcagggtttattatgttagtaaatttgataattaatgacttctattgtcatattgtggtgcttagcagaaactcaaataactttttttaagattatcatactttttaagtaacttcatttagagaaaaaaggttattaatttattcattaacatccccttgacatttataaaatgcctaccctattttgaacacagttacttactagaattacaaaaatgaatgtcacaatctttacactgataaagttcgcaggctttcataaagatctagtcctgtaaaagaataagtaacataatatgtgtaacgtgctgtattaataaaacccccggttgatcaggtatctcagtaaaactgaaagtttaacttaatttcaaaatctctaattatttcatcaatcgcaaacacaaaatattgtcatctctattctttaaaaatggaaattaaggaaccagtgatgtaaacagatgatctgtgccacgcttggcaaaactggtaattttgaccagaactgcctatttcttaatttcttttaagacttttttttacccatatg

SEQ ID NO: 718532 - DNA, 1933 bp, Homo sapiens
aacatatttatatgattaagatcgtatcacttgaactgtcactttagtctccaatagtcctgagttattacatattcaaatttcattgtacagatattttctccctccttcctccctcccccattctgttctttccttcattccttcctctgccacctcctctctcccttccttcctttcttcttttcttttgagacagggtcttacctcacccaggctggagtgcagtggtgcaatcatgggtcaccacagcctctatctgctgagctcaagcaatctctccacctccacctcccaagtagcttggactacaggtgtgcaccaactgcacctggatgatttcttaaatttattttttgtagttacaaggcctcacaatgttgcctaggcttgtctgggactcctggaatcaagcagtcctcccacctctgcctcccaaagtgctaggatcacagacatgagccacctcagccagacagacattttcttaagaatggaaatgactttaccccactaatctatcatgaaaactaatactcagcagaatgaactttaggccatactatggtaacaagccatttagggataatcctgatattatgttatgctcttatcatagcagtggtttttaaggcagtttattgttattcttctactgtttataatatattatacatagtttgcaataacttgatttatattttgatatatattccacacagcgaatctgtgtggtatggaatgaaatgaattgtatttatatgcaaaaaagccaagttttttgttgttgttgttgttactcctgtcatgcaaatgctttgaacaagttgtttaatggttgttagttttagttttatcatatgcattcctttattaattattctgagctcacagagttgagaattaaataaagttactaattcaagcattaatgtattcatttactcattattgaatgaatgtttcttgggttgttgttatgtgagaggcactgctaggtaataagcataaataatgaaataaagtgaattattgatttctactttcctggagtacacagtctagtgggtgagacagacctaattaaaataattacaccaataaaaatttaacttaagttagaataaaggagaaaggtatgcagtattatttaaccgtatacaatagataacctcagtctaatgataaggcaagaatattcttaaacagtaacatttccatagcacttgacaccacctaactctaagctatttagggagttattagttctgtgtctccctatataagagaatataaactctatgagagcttcagtattttgttcactctatcccccagtgtctaaaatactgcatgagtgaatggatagttgaaactagcagggtttattatgttagtaaatttgataattaatgacttctattgtcatattgtggtgcttagcagaaactcaaataactttttttaagattatcatactttttaagtaacytcatttagagaaaaaaggttattaatttattcattaacatccccttgacatttataaaatgcctaccctattttgaacacagttacttactagaattacaaaaatgaatgtcacaatctttacactgataaagttcgcaggctttcataaagatctagtcctgtaaaagaataagtaacataatatgtgtaacgtgctgtattaataaaacccccggttgatcaggtatctcagtaaaactgaaagtttaacttaatttcaaaatctctaattatttcatcaatcgcaaacacaaaatattgtcatctctattctttaaaaatggaaattaaggaaccagtgatgtaaacagatgatctgtgccacgcttggcaaaactggtaattttgaccagaactgcctatttcttaatttcttttaagacttttttttacccatatg

SEQ ID NO: 718533 - DNA, 1933 bp, Homo sapiens
aacatatttatatgattaagatcgtatcacttgaactgtcactttagtctccaatagtcctgagttattacatattcaaatttcattgtacagatattttctccctccttcctccctcccccattctgttctttccttcattccttcctctgccacctcctctctcccttccttcctttcttcttttcttttgagacagggtcttacctcacccaggctggagtgcagtggtgcaatcatgggtcaccacagcctctatctgctgagctcaagcaatctctccacctccacctcccaagtagcttggactacaggtgtgcaccaactgcacctggatgatttcttaaatttattttttgtagttacaaggcctcacaatgttgcctaggcttgtctgggactcctggaatcaagcagtcctcccacctctgcctcccaaagtgctaggatcacagacatgagccacctcagccagacagacattttcttaagaatggaaatgactttaccccactaatctatcatgaaaactaatactcagcagaatgaactttaggccatactatggtaacaagccatttagggataatcctgatattatgttatgctcttatcatagcagtggtttttaaggcagtttattgttattcttctactgtttataatatattatacatagtttgcaataacttgatttatattttgatatatattccacacagcgaatctgtgtggtatggaatgaaatgaattgtatttatatgcaaaaaagccaagttttttgttgttgttgttgttactcctgtcatgcaaatgctttgaacaagttgtttaatggttgttagttttagttttatcatatgcattcctttattaattattctgagctcacagagttgagaattaaataaagttactaattcaagcattaatgtattcatttactcattattgaatgaatgtttcttgggttgttgttatgtgagaggcactgctaggtaataagcataaataatgaaataaagtgaattattgatttctactttcctggagtacacagtctagtgggtgagacagacctaattaaaataattacaccaataaaaatttaacttaagttagaataaaggagaaaggtatgcagtattatttaaccgtatacaatagataacctcagtctaatgataaggcaagaatattcttaaacagtaacatttccatagcacttgacaccacctaactctaagctatttagggagttattagttctgtgtctccctatataagagaatataaactctatgagagcttcagtattttgttcactctatcccccagtgtctaaaatactgcatgagtgaatggatagttgaaactagcagggtttattatgttagtaaatttgataattaatgacttctattgtcatattgtggtgcttagcagaaactcaaataactttttttaagattatcatactttttaagtaacttcatttagagaaaaaaggttattaatttattcattaacatccccttgacatttataaaatgcctaccctattttgaacacagttacttactagaattacaaaaatgaatgtcacaatctttacactgataaagttcgcaggctttcataaagatctagtcctgtaaaagaataagtaacataatatgtgtaacgtgctgtattaataaaacccccggttgatcaggtatctcagtaaaactgaaagtttaacttaatttcaaaatctctaattatttcatcaatcgcaaacacaaaatattgtcatctctattctttaaaaatggaaattaaggaaccagtratgtaaacagatgatctgtgccacgcttggcaaaactggtaattttgaccagaactgcctatttcttaatttcttttaagacttttttttacccatatg

SEQ ID NO: 718534 - DNA, 1007 bp, Homo sapiens
agagaaatgtttgcagtatgcagagagtatatacaaaggtaaaagtttttatcaacatttcctgtcctcaatatgatttacactaaaaattttgtgaataatatcatgatatacaaatgtgataatccaagaaaaaaattgaaatgaaatgttctctagtttagtagttattgactattgataatcagcataaatattccataggatttaaaatcagcagatgtgattttagtataatccaaccctatgggccctattttccacctttagaccttcatgaccttaattaytcttccactacacttcaagtccctcaatgcctccttaaatatgttatatatttttccccacatagcatattttttactaacattgattaagtttgatatatactagttatttcaagacagacaagaataaaagggcatgctcttgtcatagggttaccaaattcagcagataaatattcaaaatcaatagttacaacagaatgttggataaaaatatttattttagatctggggaatatttctacaaaaaatatttattgtttacctaaaattcaaatttacctagatattttgcattttacacagcattcttattctgttctcaggatgatcaccatttgattaggaagacagaaacacacaaaaacaaccataacaaaatacactaattaccatggtcacactctggaaaatagtcatgtgttaaatcttgaatgttaactgttcttcaaacgtgttgatgaaacgtgatgatgactggcaactctgtggtaatccctctgttgggagcttggaaacaaagaaaaatgtgattgagttttccaatgtcacgagttaatgaataattaaaaaaaagagtagaaatacaggtgaagtgtttaaggaggagatcaatcagacagaatgatgttttagagatttcaacacatagcaggaagtaaaacacaaaagtaattcatccaaaagaagtatagaatacaaaatgtgaatacttgc

SEQ ID NO: 718535 - DNA, 1437 bp, Homo sapiens
ttttccaacagaggaacagaagattagttctttttttcatcctgccaaagccattcagtggaagaggggtgtggagtaaaagcaccagttcttgcttccaccagraggtgggtggggtgaaagattaactccctgctcagtcccactgaagccatagggggaaggcatgttttttcctttgatgttaggctgggggtgggtgagtgttccccaaaaggtcttctgctgttagatcattcctttcccagtgtttgggctaggaggaaacaaggttccttgagattcccctcaccatccaccatgcctgttggcagatctaggtttgaggcttctgcaatgtcctgtttgggatacatggaaggcagtaagaaaccccagggagctcatgtctctatcatccttagagtctcagggtccctaggctcctggccttcattgcatgttggtctgttgtgttatatccaggtatttttctttttgtattttttttgaagttgtgagagggaggagttaggaaaagtaaggttactacattggtagaaatggggaatctgaagtagatttttgtatattggctttctataaattgaccttgataaacttatttattcaaatcatttatgcattgttttgggtttcctatttatttatccattacatctgcaaataatgatagttttttttttgcttcttaatccatattctttatttcttttacttaattttttggtgtccattgtaataaaaatgactaaaggtgttagtaattattatatttgttctcaatctgataatctgtgacaatattttactattaaatatgatgtttgctgtaatattttaaaagttttaaattttaattattatggatacacattagttatacataatggttatatttatcgcatatatgtgatatcttgatacaagcttacaatgtacaatgatcaaatctagcataattggaatatccatcacctcaagcattcatcaattctttgtgttaggaacatttcaatcccactcttttagttattttgaaatataataaattattatttactatagttgccctattgtgtccctctttttttgtggttgctgcaaatctcttccattactaactggtaagtgggtaaggtaatgttattttttgtatagtctttgtgttaatgggatgaaatacattgattttccttttagcttttgtcttttcatttttaaagtattatttgtatacaataaagtttacaattttataggtaaagtttgttgaattttggtaattgtgtataactgagtaatcaccaccacaaccatagagcagctcctacgcaataaaatattttttattcttcctttgaaatgaatctcttcctcaaagactctgcctcaagcaatacctgatctactgtttgtcaggatagttttgttgca

SEQ ID NO: 718536 - DNA, 1437 bp, Homo sapiens
ttttccaacagaggaacagaagattagttctttttttcatcctgccaaagccattcagtggaagaggggtgtggagtaaaagcaccagttcttgcttccaccagaaggtgggtggggtgaaagattaactccctgctcagtcccactgaagccatagggggaaggcatgttttttcctttgatgttaggctgggggtgggtgagtgttccccaaaaggtcttctgctgttagatcattcctttcccagtgtttgggctaggaggaaacaaggttcctwgagattcccctcaccatccaccatgcctgttggcagatctaggtttgaggcttctgcaatgtcctgtttgggatacatggaaggcagtaagaaaccccagggagctcatgtctctatcatccttagagtctcagggtccctaggctcctggccttcattgcatgttggtctgttgtgttatatccaggtatttttctttttgtattttttttgaagttgtgagagggaggagttaggaaaagtaaggttactacattggtagaaatggggaatctgaagtagatttttgtatattggctttctataaattgaccttgataaacttatttattcaaatcatttatgcattgttttgggtttcctatttatttatccattacatctgcaaataatgatagttttttttttgcttcttaatccatattctttatttcttttacttaattttttggtgtccattgtaataaaaatgactaaaggtgttagtaattattatatttgttctcaatctgataatctgtgacaatattttactattaaatatgatgtttgctgtaatattttaaaagttttaaattttaattattatggatacacattagttatacataatggttatatttatcgcatatatgtgatatcttgatacaagcttacaatgtacaatgatcaaatctagcataattggaatatccatcacctcaagcattcatcaattctttgtgttaggaacatttcaatcccactcttttagttattttgaaatataataaattattatttactatagttgccctattgtgtccctctttttttgtggttgctgcaaatctcttccattactaactggtaagtgggtaaggtaatgttattttttgtatagtctttgtgttaatgggatgaaatacattgattttccttttagcttttgtcttttcatttttaaagtattatttgtatacaataaagtttacaattttataggtaaagtttgttgaattttggtaattgtgtataactgagtaatcaccaccacaaccatagagcagctcctacgcaataaaatattttttattcttcctttgaaatgaatctcttcctcaaagactctgcctcaagcaatacctgatctactgtttgtcaggatagttttgttgca

SEQ ID NO: 718537 - DNA, 1437 bp, Homo sapiens
ttttccaacagaggaacagaagattagttctttttttcatcctgccaaagccattcagtggaagaggggtgtggagtaaaagcaccagttcttgcttccaccagaaggtgggtggggtgaaagattaactccctgctcagtcccactgaagccatagggggaaggcatgttttttcctttgatgttaggctgggggtgggtgagtgttccccaaaaggtcttctgctgttagatcattcctttcccagtgtttgggctaggaggaaacaaggttccttgagattcccctcaccatccaccatgcctgttggcagatcyaggtttgaggcttctgcaatgtcctgtttgggatacatggaaggcagtaagaaaccccagggagctcatgtctctatcatccttagagtctcagggtccctaggctcctggccttcattgcatgttggtctgttgtgttatatccaggtatttttctttttgtattttttttgaagttgtgagagggaggagttaggaaaagtaaggttactacattggtagaaatggggaatctgaagtagatttttgtatattggctttctataaattgaccttgataaacttatttattcaaatcatttatgcattgttttgggtttcctatttatttatccattacatctgcaaataatgatagttttttttttgcttcttaatccatattctttatttcttttacttaattttttggtgtccattgtaataaaaatgactaaaggtgttagtaattattatatttgttctcaatctgataatctgtgacaatattttactattaaatatgatgtttgctgtaatattttaaaagttttaaattttaattattatggatacacattagttatacataatggttatatttatcgcatatatgtgatatcttgatacaagcttacaatgtacaatgatcaaatctagcataattggaatatccatcacctcaagcattcatcaattctttgtgttaggaacatttcaatcccactcttttagttattttgaaatataataaattattatttactatagttgccctattgtgtccctctttttttgtggttgctgcaaatctcttccattactaactggtaagtgggtaaggtaatgttattttttgtatagtctttgtgttaatgggatgaaatacattgattttccttttagcttttgtcttttcatttttaaagtattatttgtatacaataaagtttacaattttataggtaaagtttgttgaattttggtaattgtgtataactgagtaatcaccaccacaaccatagagcagctcctacgcaataaaatattttttattcttcctttgaaatgaatctcttcctcaaagactctgcctcaagcaatacctgatctactgtttgtcaggatagttttgttgca

SEQ ID NO: 718538 - DNA, 1437 bp, Homo sapiens
ttttccaacagaggaacagaagattagttctttttttcatcctgccaaagccattcagtggaagaggggtgtggagtaaaagcaccagttcttgcttccaccagaaggtgggtggggtgaaagattaactccctgctcagtcccactgaagccatagggggaaggcatgttttttcctttgatgttaggctgggggtgggtgagtgttccccaaaaggtcttctgctgttagatcattcctttcccagtgtttgggctaggaggaaacaaggttccttgagattcccctcaccatccaccatgcctgttggcagatctaggtttgaggcttctgcaatgtcctgtttgggatacatggaaggcagtaagaaaccccagggagctcatgtctctatcatccttagagtctcagggtccctaggctcctggccttcattgcatgttggtctgttgtgttatatccaggtatttttctttttgtattttttttgaagttgtgagagggaggagttaggaaaagtaaggttactacattggtagaaatggggaatctgmagtagatttttgtatattggctttctataaattgaccttgataaacttatttattcaaatcatttatgcattgttttgggtttcctatttatttatccattacatctgcaaataatgatagttttttttttgcttcttaatccatattctttatttcttttacttaattttttggtgtccattgtaataaaaatgactaaaggtgttagtaattattatatttgttctcaatctgataatctgtgacaatattttactattaaatatgatgtttgctgtaatattttaaaagttttaaattttaattattatggatacacattagttatacataatggttatatttatcgcatatatgtgatatcttgatacaagcttacaatgtacaatgatcaaatctagcataattggaatatccatcacctcaagcattcatcaattctttgtgttaggaacatttcaatcccactcttttagttattttgaaatataataaattattatttactatagttgccctattgtgtccctctttttttgtggttgctgcaaatctcttccattactaactggtaagtgggtaaggtaatgttattttttgtatagtctttgtgttaatgggatgaaatacattgattttccttttagcttttgtcttttcatttttaaagtattatttgtatacaataaagtttacaattttataggtaaagtttgttgaattttggtaattgtgtataactgagtaatcaccaccacaaccatagagcagctcctacgcaataaaatattttttattcttcctttgaaatgaatctcttcctcaaagactctgcctcaagcaatacctgatctactgtttgtcaggatagttttgttgca

SEQ ID NO: 718539 - DNA, 1437 bp, Homo sapiens
ttttccaacagaggaacagaagattagttctttttttcatcctgccaaagccattcagtggaagaggggtgtggagtaaaagcaccagttcttgcttccaccagaaggtgggtggggtgaaagattaactccctgctcagtcccactgaagccatagggggaaggcatgttttttcctttgatgttaggctgggggtgggtgagtgttccccaaaaggtcttctgctgttagatcattcctttcccagtgtttgggctaggaggaaacaaggttccttgagattcccctcaccatccaccatgcctgttggcagatctaggtttgaggcttctgcaatgtcctgtttgggatacatggaaggcagtaagaaaccccagggagctcatgtctctatcatccttagagtctcagggtccctaggctcctggccttcattgcatgttggtctgttgtgttatatccaggtatttttctttttgtattttttttgaagttgtgagagggaggagttaggaaaagtaaggttactacattggtagaaatggggaatctgaagtagatttttgtatattggctttctataaattgaccttgataaacttatttattcaaatcatttatgcattgttttgggtttcctatttatttatccattacatctgcaaataatgatagttttttttttgcttcttaatccatattctttatttcttttacttaattttttggtgtccattgtaataaaaatgactaaaggtgttagtaattattatatttgttctcaatctgataatctgtgacaatattttactattaaatatgatgtttgctgtaatattttaaaagttttaaattttaattattatggatacacattagttatacataatggttatatttatcgcatatatgtgatatcttgatacaagcttacaatgtacartgatcaaatctagcataattggaatatccatcacctcaagcattcatcaattctttgtgttaggaacatttcaatcccactcttttagttattttgaaatataataaattattatttactatagttgccctattgtgtccctctttttttgtggttgctgcaaatctcttccattactaactggtaagtgggtaaggtaatgttattttttgtatagtctttgtgttaatgggatgaaatacattgattttccttttagcttttgtcttttcatttttaaagtattatttgtatacaataaagtttacaattttataggtaaagtttgttgaattttggtaattgtgtataactgagtaatcaccaccacaaccatagagcagctcctacgcaataaaatattttttattcttcctttgaaatgaatctcttcctcaaagactctgcctcaagcaatacctgatctactgtttgtcaggatagttttgttgca

SEQ ID NO: 718540 - DNA, 653 bp, Homo sapiens
tcctttgcagggacatggatgaagctggaagccatcatccttaccaaatgaacacaggaacagaaaaccaaacactgcatgttctcactcttaagtgggagttgaacattgagaacacatggacacagagctgggaacaatacacactagggtttgttaggggtggggtggtgacaggagggaacttcggtgcagcaaatcaccatggtacatgtatacctatgtaacaaacctgcacatgtatcccatttttttaaaagaaataaatagacaaaaagagaatatagtagtaagtggctagatagccttgcaaacggttgaggtaattttttgtcttgggatggcagaaaaaaaattgatcaaaagacatcagatagatggataaataggaggatgattggggaaarcataggagagtctgaaattgtgatttcaacctgatgctaagaattcccttacctcagtatccaagagaatagagactgaatcccaaagtttagggcaaaagtgaaaaaaacatgctggttgcacacctatttactatgtgcacttgagataactggatacaaccaatattttttaacaagttgtatattttagatatagaatatttcctctcactttagataaaggaataaccttcaaattcactc

SEQ ID NO: 718541 - DNA, 1061 bp, Homo sapiens
ttttttgagatggagcctctctctctgtcgcccaggctggagtgcggtggcgcgatctcggctcactgcaagctctgcctccagggttcaagcagttctcttgcctcagcctcccccgtagctgggactacaggcacccaccaccacgcccggctaattttttgtattttagtagagacggggtttcaccgtgttgcccaggctagtctccaacttctgagctcaggcaatccacctgcctcggcctcccgaagtgctgggattacaggcacatgccaccacgcccggccttaatttttgtatttttagtagagacagggtttcaccatgttagccaggcttgtcttactcctgacctcaggtgatccgcctgcctcagcctcccaaagtactgggattacaggagtgaaccaccacgcccggccgaattcttatttgttgggcaatatttacaaggcatttcgttcagttcttcaaggtagaatccacaattctgaaaatattccacttgtggccatagtatcagtttctcaaagttgggtgatgataagtgatggtagttgtgaacctgaataattttctttacattcttttagactctgttaaacgggagcttaatggtagatgccttcggattaaatgcctttaggttcacatttcttagaagacacagtgaagttatttgyaagaaggaaaagcacaggagttaaaattgatccattccagtggaacagacttgctctatctctagctgcagggttgatctcccaaatgttaaggttgccacagacttcaaagtttagggagtcaggccctcacgtcaattaggcctcctacctctttgcttgcatagcaccacgtatatccataacatcaccccaatcaaatcggatttattttttctttccattttcttaaatcttcatgacagaagaattcacccaaaaatgaatcccattgtctaccagtcatgttgaagatagtgagaactcaagaaaatgccattaaaataatggtgcaaacataatttagcttgaaattatacagtgtctgcttatttt

SEQ ID NO: 718542 - DNA, 2993 bp, Homo sapiens
gagacggggtttcatcacgctggccaggctggtcaccaacttctgacatcaagtgatccaccggcctcagcctcccaaaattgtgttctcaattttaacaatgtttttgttttctttgtgtcacttatcatttgcaggttttttatttgttttgttttgttttgccatttctctctgttgcccttaacagaaattaagcttcctgaggaaagaggctatatttatcctgaccactttgcatgtcaagcatttagtagagtaactaaaacaattcctagtacggaatgtgtacttagtaactacctgagttaatgaatgagtgaatgaaagcaagcattccaaaagttcccaaatgckttaaggattgttcttaaaaggttgacttaagggaggaaaaagacttaaaaaatattgtgtgtctgtatctgtgttagacacgaacgtgtgtgtgtgtatatatatatatgtgcatgtgagtatatgtgaagacatatatatgtatgtgtgtgtatatatatacatatataaatggagagataacatttatacacagattgtgagctaaatggagagataacatgtatacacagattgtgagctatctaggagaaactattgactattaaaatgccataaacattccagctaccacccccccaaaatatgaattgacattttaaagatctaaaaaaaataccaaattacatgtgaccaatattagaaaggagctatacttaacatcttacttcaattcactagtgacacaactgttttatggaacatttatatttatatgataaaaatttaatttttcccaaatgtccaaattacatttgaaaactaattttttaatgtttttagttattactgacattagcactaataagggtaaacaataggggaattaaaaaaactaatttaaatgtaggacattaggaattaaattttactttggtttcaatgctaagataaaaaatgttacaggacatgtaaactgtgaaatatgccatttaaaaagatttctcttatagcagtaatacatagcaatatgtaaaggccaactaatattttttgaccttgttgttctgccatttacatgatatggcattccaccagtgagtagaagatgtggcaaggggtcagagatgttcatgcccttgccatttaagagcttgacctgtgagttgcttatacagcactaccattaacatccttctggccataactgctggtcacatgacctcagcaggcttccaaagaacctggggaatgtgcttgttattctggccatccatgtacccagttaaaatttggaggaaaagtgttaatggagaaaactagcagtcacgaccacagctatgagagagcagacggagtatctatcacacaaatacaacacattagtaaacacttaactgaaaaactgtttcaaacattgatttctaataaagaaaataattgccacttttctttgcttacttattttattttatttttttaatttcaagattttgctcttgttgcccaggccggagtgtaatggtgtgatcttagctcactgcaacctccacctcccaggttcaagagattctctgcctcagcctcccgagtagctgggattacaggtgcctgccactacacctggctaattttctgtatttttagaagagataggatttaacttgccaggctggtctcaaactcctgacctcaggtaatccacccacctcagcctcccaaagtgctgggattacaggtgtgagccaccatgactggcctgcttacttatttttataaagccaaagacaatattaattttcagactaaaatatacggtcactaggtgtttcttttacagtgataacttctaattaacctaagaaacagaatgttaaattagaaaaaaaaattcttaaaggcatgcagttgacatattttacagaaatctatgggattaagaatttgtaccatttgttcaaagtatcctgattgccaacacagattcagaactcataactgatctattggctctcaggatatgattgttgtactaaaattacagatgtttctcataagtgtgagcaagatgttatgaatctccaagcatgaaagatattcccaaatcttaagagggagaagatgaaggttgatggatttcacacaaagtaaagttgcataaagttaccacaggtattttcaaaaagtgcatgatctttataatttaacgcctgcctactttttacttcctgtgtatcaggaaatgaaattggagactggtgtaattgtaacttagtactcaagaagtaggaagcagagatatctgggtggaaaggtaggcagtagttggatcataaaggatgttataggccttcataaaggggtgggcattgcactataagttcattgatcatgtgtatacagtatgtctttaaaagcctgaattggaacaccactagttcttaattctcttaattcagttagaataaaagaaggtatgggtttctaaagagcctaaaaaaccataaacataattatatctgtaaatgtgtccccatacatgctggcaagtagaaaaataactccatgtttattttctaccaagtgccctatataaaagataatgataacatgattgcttttaatagtaggaattaggcttttaaagtcaagacagtatacactcaggatctaaagtcttctttaacaggaaaagcaacatattactctgaaacaaacaaaaataaaatggagggaaaaaggaggtaaattcaaggtggaaggataggaaaagagacagaattccaggagtctgacttcctacatcatgtcccatagcgttatctgcacacacagctcctcatatacctttttacttatttcctccttttattacttttctccgttgaagagggaagacattagacatggaaataatgagtttgatttgaatgaattaaggaatgaatgagcaaacaaataaaccaatgggttta

SEQ ID NO: 718543 - DNA, 597 bp, Homo sapiens
tctctcccaattattgctggggaaactataaaaccactgatggatttaatgattttttatccactatcaaccactgttcacacagctttaaaaatttaacaattcactcaaatttctactaagtctgtcattaggaaaacttccttttaatatttgtattctcttttacatttttacacactaaatatcacagaaatatttaataaaccatgccctagctttatttaggattagaagaaatgagttccagtgaattgtaytgtcagttatattgacacttacttccaagactactaacttctaaacttcatttcctaagaaacctctaagtgaacatgatacaatagttcataaaaatgtcaaagcttttttctttgactagctgatattgagacaaataaactaaggtctgctgtaataatatgtctacagtaaaaaaaagtgaatcattccattaaacacattctgacttttaataaagaatttgaaatgcagaaacctggaaattggacaatgtggatcctggttctgatgccaagcgaccttgggcaattgcttggccttggtttcagcatttacaaaataaaggctgttgaa

SEQ ID NO: 718544 - DNA, 594 bp, Homo sapiens
aagtctagagtattctcctatgttcccagcagagtttaacttttatcttataaatataaatgttccatgtagatggaaattcctgaggactgtaatatctggggactaattttttttcctttaggctgcaggagtgtccaatcttttgccttttctgggctacactggaaaaataattgtcttgtgccacagataaaatatactaatgatagctgctgagctaaaaaaaaaatcgcaaaaatatctcatattgttttaacaaagttgatgaatttgtgtggggccgcattcaaagtcttcctaggctgcatgcagcccatgggccrcaggttggacaagcttgctttgggacattaacttagaatatgagatcaatagcttttcaaaacttatcttggaagccattatccttagcacactaacacagaaactgaaaaacaaatactgcctgttctcacttagaagtgggagctaaatgatgagaacacatggacacatataggggaacaacacacactggggcctttcaaagggtagatgttgagaggaaagagaagatcaggaaaaatcactaatggatactaggcttaatac

SEQ ID NO: 718545 - DNA, 1715 bp, Homo sapiens
catgtctgtctttttgtaatttttctcattaattctgtaggccctttcaacataaacatttatactatacatatattatactatattagttttgaaaattttctattaatttttaaatgttttttcttctccattatttctgtttgctacacattctgagtctatcttccacatattataacctttctcatatactttcttatactttacctttttatcgtgtagtctaggaaacttattttattcctgatcacatatttgctyttcagccatttttatagtatcaatcagaaaattcattatttttgttctcaaaaatcatattttaattttcaagaactttttgtcattctttattttatcatgacagcctggttttgttttaaaaatgcagtatcatttgaaaatctctaacgatattaagtatatattttaattatcttttttctcagatgatttgtttcctaggcagtcttattattgctaacacccatggtgctgattgttctcaactctcttgttagtcttgattgcctattcataattaattgaatgactagattgattaatataggcagggagcctggagacccacacagttgccaaaacaagaagtgactctcgaggtgaagtgggataaattctttccctcaggggcagattataatttctagtttccccagtcctatctgctgtggcagttaggacttgtccaaagctccagggtgcttttctcttaggacttcaaactcttcccagacagaccagagactttctgtaatttgctccagcgttttaccttgagagcaaatcttttcttaccagtcattctgtttggctgtgggaggaaggaaaggcttactctctgggctattttgtattcaatcatttaatgactttttctatggccccaaggcccacttctgttctttgaatttgttggtttttatttgggactcctttaggaataatttggggaaagaactcatacgtataccttgggctggtgtctccagggcctctctagatgtttgagcaggttaaaccctgcataattctatgcaaattgagcccctagagttatacagtacacagcttgaaaaacatagctctggtgtttcatctgctgtgacttcactgccagtctttatctagctcccaaaatgtttgcaaattcttagcattgtggtttcccaatgatctcattgttttattctcttgaaatattatgtaagtattcaatatgaccttggaaggaagaaaaaaatagtagtactggctaatgacttgaaccagaaaccttagactatatttagtaatacattttcctcctgatattacctataattggtctatgtcccctgcatattatctcaccaaaacccatagaagggagaaacaataaagctgaacacaataggtatatataaatttttcagtgttatttatgaaaaactgtggcttatccagagtaacacaaaaatcacagagattttttggaaactatgtttgtattagcctctgatactttaaataaagaaacattaaataaaggtgcatgtatataagtgagagtcatgaggatagaagttattattttttaaataatatttacatgtctgtatgtttctctatttaaaactttcagctatgtaaatatgatttaatgaaaaaaatgattagacattcttgaaacttctagtttaagagggaag

SEQ ID NO: 718546 - DNA, 600 bp, Homo sapiens
gatgacttaggatttttaccttggagaagtgtgtatttggggtggcaacgggtttatgaaacaattatttataaagatttgagagcctgccaaatgaagatcaaatcagtaattatcttacactgttttagaaaacacaataaaatggaaggtttaagaaggcaaatagccaggcacggtggctcacacctgtaatcccagcactttgggaggccgaggcaggcggatcacctgaggtcgggagttcgagaccagcctgaccaacatggakaaaccccaactccactacaaatacaaaattagccaggcatggtgactcatgcctgtaatctcagctacttgggaggctgaggcaggagaatcgcttgaacctgggaggcggaggttgccgtgagccgatatcgcgtcactgcactctagcctggacaacaagagtgaaaccccttctcaaaaaaaaaaaataaaataaaataaaataagaaagaaggcaaataaatatagatagcttgagttcaaagtttagtgcccttctttaatgactgtgtgacctaagatgtactagtcaggattctccagagaaacagaataaatagggtattt

SEQ ID NO: 718547 - DNA, 600 bp, Homo sapiens
gatgacttaggatttttaccttggagaagtgtgtatttggggtggcaacgggtttatgaaacaattatttataaagatttgagagcctgccaaatgaagatcaaatcagtaattatcttacactgttttagaaaacacaataaaatggaaggtttaagaaggcaaatagccaggcacggtggctcacacctgtaatcccagcactttgggaggccgaggcaggcggatcacctgaggtcgggagttcgagaccagcctgaccaacatggagaaaccccaactccactacaaatacaaaattagccaggcatggtgactcatgcctgtaatctcagctacttgggaggctgaggcaggagaatcgcttgaacctgggaggcggaggttgccgtgagccgatatcgcgtcactgcactctagcctggacaacaagagtgaaaccccttctcaaaaaawaaaaataaaataaaataaaataagaaagaaggcaaataaatatagatagcttgagttcaaagtttagtgcccttctttaatgactgtgtgacctaagatgtactagtcaggattctccagagaaacagaataaatagggtattt

SEQ ID NO: 718548 - DNA, 859 bp, Homo sapiens
tcttaggcctcgctctgtaaaatgtgcgagggtgaatacaggaatatttgatatccctgaacttaacacagaagtgttaatactttgtacacaaaaaaggtcatgcagatatttatgtggggaaaacacataataatatggaaacaatttttagaaatgaaacaaaacaagaagacagtgttctgagttctctgaaggtttgctgaatttctatcacgttaatcaattttacctggcatgcagtaaggttatatacgacccctgtggagtccataactgcccagccatatgcagaagaatgaaactagacccttgcctttcaccatatacaaaaaaataagaaggatttaatgatttaaatgtaagatctcaaactataaaaatcttagatggaaacctaggaatacccrtcttgatatcgagccttggcaaagaatttttggctaagtccccaaaagcaattgcaacaaaaacaaaaattgacaagtgggatctaattaaactaaagcttctgtacagtgaaagaaactatcaggagaagggatgaggggaagttgagagtgaccttctctttcctcttgttttttcaaatgccagggtgccatatttggggttagtatgtcctaaactccatcaacattttaattaaaacactttagggggatgagattttttcatgctgagtgtatgtatgtatgtgtgtgcacatgtttctagtttatataagtaaatgtacatttcttgtgtttctgagtttatgagcttgcacaagtcacctagtgacagtctctaaatgttagaattgccaacggtttccttaaatattctatttttgattctctgtcattagaacaaacca

SEQ ID NO: 718549 - DNA, 859 bp, Homo sapiens
tcttaggcctcgctctgtaaaatgtgcgagggtgaatacaggaatatttgatatccctgaacttaacacagaagtgttaatactttgtacacaaaaaaggtcatgcagatatttatgtggggaaaacacataataatatggaaacaatttttagaaatgaaacaaaacaagaagacagtgttctgagttctctgaaggtttgctgaatttctatcacgttaatcaattttacctggcatgcagtaaggttatatacgacccctgtggagtccataactgcccagccatatgcagaagaatgaaactagacccttgcctttcaccatatacaaaaaaataagaaggatttaatgatttaaatgtaagatctcaaactataaaaatcttagatggaaacctaggaatacccatcttgatatcgagcctyggcaaagaatttttggctaagtccccaaaagcaattgcaacaaaaacaaaaattgacaagtgggatctaattaaactaaagcttctgtacagtgaaagaaactatcaggagaagggatgaggggaagttgagagtgaccttctctttcctcttgttttttcaaatgccagggtgccatatttggggttagtatgtcctaaactccatcaacattttaattaaaacactttagggggatgagattttttcatgctgagtgtatgtatgtatgtgtgtgcacatgtttctagtttatataagtaaatgtacatttcttgtgtttctgagtttatgagcttgcacaagtcacctagtgacagtctctaaatgttagaattgccaacggtttccttaaatattctatttttgattctctgtcattagaacaaacca

SEQ ID NO: 718550 - DNA, 859 bp, Homo sapiens
tcttaggcctcgctctgtaaaatgtgcgagggtgaatacaggaatatttgatatccctgaacttaacacagaagtgttaatactttgtacacaaaaaaggtcatgcagatatttatgtggggaaaacacataataatatggaaacaatttttagaaatgaaacaaaacaagaagacagtgttctgagttctctgaaggtttgctgaatttctatcacgttaatcaattttacctggcatgcagtaaggttatatacgacccctgtggagtccataactgcccagccatatgcagaagaatgaaactagacccttgcctttcaccatatacaaaaaaataagaaggatttaatgatttaaatgtaagatctcaaactataaaaatcttagatggaaacctaggaatacccatcttgatatcgagccttggcaaagaatttttggctaagtccccaaaagcaattgcaacaaaaacaaaaattgacaagtgggatctaattaaactaaagcttctgtacagtgaaagaaactatcaggagaagggatgaggggaagttgagagtgaccttctctttcctsttgttttttcaaatgccagggtgccatatttggggttagtatgtcctaaactccatcaacattttaattaaaacactttagggggatgagattttttcatgctgagtgtatgtatgtatgtgtgtgcacatgtttctagtttatataagtaaatgtacatttcttgtgtttctgagtttatgagcttgcacaagtcacctagtgacagtctctaaatgttagaattgccaacggtttccttaaatattctatttttgattctctgtcattagaacaaacca

SEQ ID NO: 718551 - DNA, 859 bp, Homo sapiens
tcttaggcctcgctctgtaaaatgtgcgagggtgaatacaggaatatttgatatccctgaacttaacacagaagtgttaatactttgtacacaaaaaaggtcatgcagatatttatgtggggaaaacacataataatatggaaacaatttttagaaatgaaacaaaacaagaagacagtgttctgagttctctgaaggtttgctgaatttctatcacgttaatcaattttacctggcatgcagtaaggttatatacgacccctgtggagtccataactgcccagccatatgcagaagaatgaaactagacccttgcctttcaccatatacaaaaaaataagaaggatttaatgatttaaatgtaagatctcaaactataaaaatcttagatggaaacctaggaatacccatcttgatatcgagccttggcaaagaatttttggctaagtccccaaaagcaattgcaacaaaaacaaaaattgacaagtgggatctaattaaactaaagcttctgtacagtgaaagaaactatcaggagaagggatgaggggaagttgagagtgaccttctctttcctcttgttttttcaaatgccagggtgccatatttggggttagtatgtcctaaactccatcaacattttaattaaaacactttwgggggatgagattttttcatgctgagtgtatgtatgtatgtgtgtgcacatgtttctagtttatataagtaaatgtacatttcttgtgtttctgagtttatgagcttgcacaagtcacctagtgacagtctctaaatgttagaattgccaacggtttccttaaatattctatttttgattctctgtcattagaacaaacca

SEQ ID NO: 718552 - DNA, 668 bp, Homo sapiens
gctactcgggaggctgaggcaggagaatggtgtgaacccgggaggcggagcttgcagtgagccgagattgcgctactgcattccagcctgggcgacagagcaagactccatctacaaaaaaataaataaataaaataaaaaataatgataatatggctgggcgcggtggctcacgcctgtaatcccaggactttggaataaaataaaacaaaaacaaaacaaaacaaaattccactttggaaaacaatgaagtaatagagggcatcaataactttcagctataaagaacactacccacagcctggggaagacgcattgcaaaggcaaaatgaaataattcctggakctcacacgtggccaggaggaccgtttgctcccaacagccagattggtacagacctcacagtgcacagagtgaaaggaagaggacttagaaggacctcaccttggcagtgccaccgaattagtcttccattacaggctgtactgctattgcctaagaaagtttaagagcaaactgtaaaataatcagactgtttccacggaacgtaactgtgctctagaaagtaactcatatatatttataagaataaaaaaattcccagaattggcaacataaaatcacaatgttgggcattcagtcaaaaattaccagttctgcaaagcat

SEQ ID NO: 718553 - DNA, 1804 bp, Homo sapiens
gagttgtttacctgctatgaacaataataaaaaatgttatcttggctgtttagaagtacccagtcattaaaaggaaagccagtggaggtgggagtattgactgggaagggccacagggagactttctggcttgatagaaatgtcatgtgtcttgatagggctgtgggttatgcgtataaattaatttgtcaaaaatcatgggactatgtttttaagttctgtgcctttcactctatgaaaattataactcaataaaagtactagtaaaattttaaaaatgtaaactgtggtaaaggaaagacttcttgcttatttctcaaaatcctggcttgtaccttgtttagaccctctgtctcacattacacaaaggcatctcaggaaatggaacaccagcctgtggcttgctctggagagtggcccagtgtcttatgccatggccatattttactgttgagatggcagaataatggacttactgtgtgcaagtgtgctcatgtgcacacacgtatgggggttcacatggtgtatatgcatctgaatgtgttccattccttttttgagcctcattttctccttctacctaaagggaatcataacattggctctatcttactaagaacacctgtgatttggttcagtgagatcacagatttgaaacatcttccaaaactcttaacattgatgattgtgttcaaattattattttctgattcaaaaacagatgtgttgtgggaagggtgtgaataagtagatacatgtccctaaactgcctattaactttcttcccctgaaaatccccagggtttatctttctcagaaaatgcttcagcaggtagcagcatttatagctgctgcttctttcttcataaacagtcaaaaaaggtgtcctggagttcgagaccagcctggccaatgtggtgaaaccccgtttctattaaaaatacaaaaattagctgggtgtggtggcaggcacctgtaatcccagctactcgggaggctgacgcaggagaattgcttgaayctgggaggcggagtttgcagtgagccgagactgcaccattgcactccagcctgggctacaagagagaaaactccgtcaaaaaaaaaaaaaaaaaaaaaaaaagtgtcctatcatctcctgagcagcacatacttactgactgcctacaatatgctatttttacagagactctagagacatgtttttttttgtttttgtttttgttttttcctgggtcagtagtacagctttgttcctaagcaaactaggctaaagatcaacctactgagattagttgtgtggccactttcccctgaccccaagtgtcttttctgtaccaagcatgtgtcttcaacctggatgagtttctcacctatggaaactgaaataatttccaaggcttttgtcttctaagcttgatctcaatctgctgaaaggggtggagtggatgcttttcaagtaaataatgcactggggctcttattccagtgcctcagaaatatttgagttgctagcatatggggagttatgattggaatatccattccaatggcaactttccttccacagagattttctgtaaagaatttgcatttgtatacctttacaacaactataaaagtttgagttgagtacttggaaatttagtgaatctactctcaagggtaattagaggagaatcaaataagaattgggaatatcaaaagagtcaacatagaggtggaactgaagtgtttttgcttgtttgtttgttttttgtaataaagctttgggcaagattaaaaaaaaaaaaaagtagaagcc

SEQ ID NO: 718554 - DNA, 1804 bp, Homo sapiens
gagttgtttacctgctatgaacaataataaaaaatgttatcttggctgtttagaagtacccagtcattaaaaggaaagccagtggaggtgggagtattgactgggaagggccacagggagactttctggcttgatagaaatgtcatgtgtcttgatagggctgtgggttatgcgtataaattaatttgtcaaaaatcatgggactatgtttttaagttctgtgcctttcactctatgaaaattataactcaataaaagtactagtaaaattttaaaaatgtaaactgtggtaaaggaaagacttcttgcttatttctcaaaatcctggcttgtaccttgtttagaccctctgtctcacattacacaaaggcatctcaggaaatggaacaccagcctgtggcttgctctggagagtggcccagtgtcttatgccatggccatattttactgttgagatggcagaataatggacttactgtgtgcaagtgtgctcatgtgcacacacgtatgggggttcacatggtgtatatgcatctgaatgtgttccattccttttttgagcctcattttctccttctacctaaagggaatcataacattggctctatcttactaagaacacctgtgatttggttcagtgagatcacagatttgaaacatcttccaaaactcttaacattgatgattgtgttcaaattattattttctgattcaaaaacagatgtgttgtgggaagggtgtgaataagtagatacatgtccctaaactgcctattaactttcttcccctgaaaatccccagggtttatctttctcagaaaatgcttcagcaggtagcagcatttatagctgctgcttctttcttcataaacagtcaaaaaaggtgtcctggagttcgagaccagcctggccaatgtggtgaaaccccgtttctattaaaaatacaaaaattagctgggtgtggtggcaggcacctgtaatcccagctactcgggaggctgacgcaggagaattgcttgaacctgggaggcggagtttgcagtgagccgagactgcaccattgcactccagcctgggckacaagagagaaaactccgtcaaaaaaaaaaaaaaaaaaaaaaaaagtgtcctatcatctcctgagcagcacatacttactgactgcctacaatatgctatttttacagagactctagagacatgtttttttttgtttttgtttttgttttttcctgggtcagtagtacagctttgttcctaagcaaactaggctaaagatcaacctactgagattagttgtgtggccactttcccctgaccccaagtgtcttttctgtaccaagcatgtgtcttcaacctggatgagtttctcacctatggaaactgaaataatttccaaggcttttgtcttctaagcttgatctcaatctgctgaaaggggtggagtggatgcttttcaagtaaataatgcactggggctcttattccagtgcctcagaaatatttgagttgctagcatatggggagttatgattggaatatccattccaatggcaactttccttccacagagattttctgtaaagaatttgcatttgtatacctttacaacaactataaaagtttgagttgagtacttggaaatttagtgaatctactctcaagggtaattagaggagaatcaaataagaattgggaatatcaaaagagtcaacatagaggtggaactgaagtgtttttgcttgtttgtttgttttttgtaataaagctttgggcaagattaaaaaaaaaaaaaagtagaagcc

SEQ ID NO: 718555 - DNA, 636 bp, Homo sapiens
taaatgtatatactgtatatgtggcagaatttggtctgggatttgctttcattataatgtagtaatagatttattggagagcagacctatagttctcacccatttcaaaatcctatggagatcaatcctaagtaaaaccagggctttttggagaaatgactaatttcatgcttcaggggtgagaggtacaagatgaacttggaatatcttgttatgccaaaaatttctgatagscatatcagaaatgataggcatgtcaaaaggacacaagagggatcccacttccaagaagactaagtaggcatgcttttccttattccttccactaaagaacagaaaccaataaaattcaaaacagaaaaacgatagagaaaaatcaatcaaacaaaatgctcattctttaaaaagatcagtaatattgacaaatctctataatgactgagaagtaattaaataagaaaaaaagacacaaatgcccaataccaggtaataaaagaagggaaatcatttcagaccctgaaaatatcaaaacaatgataaggtaatactatgaacaattctacacacatagatttgacaacttagataaaatggaccaattcctggaaaagtacaaacaaccacaactcatccaat

SEQ ID NO: 718556 - DNA, 613 bp, Homo sapiens
tggatgatctttttctggtgagctggatgctgttcccaggtgagaggcaaggagtcagtgaattgtcacagacctgccatgtttctttctgcgagacttgctagactggttttccaggtattgtgtggatgaagtgcatttggattgcagcatgcatttgacagataaagtctctatctttgaaaatgggatacacccatggacaagggctgatggcaaccaagtcaggtagatgagtaactgattggactcagagtactaatgaatgagttgatgtggatctasagaaaggatcttgcacaccacagttttctggcttctgtcttgccttgttaggcatttttattaatgtcttggatgaagacattgacggcccagtgataaaatttgtgggtgacacaaagctggaagggatagctaatacattggacagtagaattgcaatgcaaaaaagatttgacaggctgaaacaatggaccagatctaacaagattatgtttaatggggataaatgtaaagtcttaacatttggttaaaataaacaggcaaataagatggaataagcagcagatgggaaagatgtggtttgataggagcctgtgtgaaaataata

SEQ ID NO: 718557 - DNA, 198 bp, Homo sapiens
tttctttctctcctttttttctttttttattttttattttttattttattttattattattatactttaagttttagggtacatgtgcacaatgtgtaggttagttgcatatgtatacatgtgccatgcwggtgtgcttttcttttcttattgcattattctgattttttctccaatcctttaacattcacgctactg

SEQ ID NO: 718558 - DNA, 866 bp, Homo sapiens
ttttggagacagagcctggctctgttgcccaggctggagtgcagtggcacgatctcggctcactgtaacctctgcctcccgggttcaagtgattcttctgccttagcctcccaaggtggctggaattacaggtgctcaccaccatgcccagctaatttttgtatttttagtagagatggggtttcaccatgttggccaggctggtctcgaactcctgacctcaagtgatccacccaccttggcctcccaaagtgctgggattacaggcgtgagacactgcaccttactgtttaatcttaatctaattcgggaaactgggttgggccagaatggcttccttaatgaccacatgactttttaaaatattcaagatatttaagtcactggcattaacatttgacacatgacttactttatggaccaaatggggttaacaatgtcagttttcaccaatagtaagctatagagagtaaaatgaccttttctctccagcatgcttcatatgatgacactaagtggtatgcattcccaaaaaactgatttaggtagatgtgggggacactcagggtggattcatgatgccaaaggataacagacaatggaaagcattttacaactgttcacagtaccagcaagtcaagcacgtcacctaacaaaggggctacatcacaagctcaaaacttccgataactttacattcccctaaggtgagagggtgtatttaaataacatcaatccaaccaaagccttgctccaacttccacatcaactattttccttgggcgaaacagagyattgcattgcattaagtgtatttacaaccaactgtctgtgtaaatataagagatgctaacatactagtaaca

SEQ ID NO: 718559 - DNA, 640 bp, Homo sapiens
cttcattgcctcccctcatcacccccataccacgttcacacccttccagatggctgaacctgctcattttgacttcctggatcattttctcccattggtctggccaagcacaggtggtgctcaggcactcgatgtgtctcagcacacacttttattctgaaaacatgcattcgatgttccatcttctgcagtaattactggtccctgtctacttctctgtatttktccactttcacactgctttaaagaactgcccaatactgggtaatttataaaggaaagaagtttaattgactcacagttccacatgtctggggaggcctcaggaaacttacgatcatggcggaagaagaaacaggcaccttcttcacaagccagcaggagagagaagagaaagtgaagaggaaagaggcctttatgaaaccatcagatctcctgagaactcactcactgtcatgagaacagcacagaggaaatggccccatgatccaatcacctccctccttcaacacgtggagatcacaggtccctcccttgacacatggagattatgattcaagatgagactatagtggggacactgagccaaaccgtatcactgtctcactgcatttccctccccactctctggctttctctt

SEQ ID NO: 718560 - DNA, 601 bp, Homo sapiens
tgctctttatctaatgcactcagttacttaactagtctgccaatataaatctttaagaaaactgtgtgtaaagtcagcagggggtccacgtcctgatgttatgttttttcctactgctgaataaatgatttcctcctccaccaccacactcatacgtgtgtcctcattagtatgtatgaactgagtggaataagcattgggagatttacagtgtactgcattcaacttaattaataagaaagggagcccatttctaggggagggagtcaatgttcacaggttcctacattctgctgtttaattaayaagcccgtcatacagaaaagactttaacagtgccctcctcattttctctacctgtcacaactattaactaaacctttcagtgaccttcagatgttaaggtgccctgatctttagctagcacctccaatgtaattatgaccttaatgttcttacccaacactcaagtcggtcattcaatgaatatcaaaagagggtcaaccattggcccggcagtatggtagatgcagaggacacaaaagtgaactaggtacaacctgattttcaagtaaatttcagttaagtagaggagacagga

SEQ ID NO: 718561 - DNA, 601 bp, Homo sapiens
tgctctttatctaatgcactcagttacttaactagtctgccaatataaatctttaagaaaactgtgtgtaaagtcagcagggggtccacgtcctgatgttatgttttttcctactgctgaataaatgatttcctcctccaccaccacactcatacgtgtgtcctcattagtatgtatgaactgagtggaataagcattgggagatttacagtgtactgcattcaacttaattaataagaaagggagcccatttctaggggagggagtcaatgttcacaggttcctacattctgctgtttaattaacaagcccgtcatacagaaaagactttaacagtgccctcctcattttctctacctgtcacaactattaactaaacctttcagtgaccttcagatgttaaggtgccctgatctttagctagcacctccaatgtaattatgaccttaatgttcttacccaacactcaagtcggtcattcaatgaatatcaaaagagggtcaaccattggcccggcagtatggtagrtgcagaggacacaaaagtgaactaggtacaacctgattttcaagtaaatttcagttaagtagaggagacagga

SEQ ID NO: 718562 - DNA, 1611 bp, Homo sapiens
gttttggtaagctaaatccggaaaaagaggtgaaaagagaaataaagaagagagaaaaatggaaagacttagttgcttatttctgccataaaatataaaaaataatgatttatttccttcgagtcaattatttccctgttataactttatttttaatttcacattttaatcttttatactctctccccatgaaatagcctgaatgttatttaagaattatccaaatagaatttgagtaaaataacattacagttagtggaaataattcagccttttgagtaagctgaatacagttttggttctgtctgtatcactttttaaaatatattgttgaacaagttagacctcagagtccccattttgaaaattgcttttgtggttgaatctgcagattagaagtgtaatatgcttaaaacacacaaacagggtgctagcttataacaggtttattaacatgtagagttttatatacacctgaatgatagccagtaaatcagtagttctgtagggatttattcctctcccttttctccttttccttccccttatccttttgatttgataagatcttaccagatactaggaaagatactaattttgaataaagcaaaagatcacttacccataaaaatactcatacctttacctttargttcctcatcctttcttgcccttaccccttcagtaaaatccaggaatgtttttgttttttcttttacctgaatggtatagatacttttttcatttgtaggaaaatgcaatgcttattagagttaactgggagagaggggtccattcatccactcaacagttatttattaatcacctaaacattcaaggcagtgttctagtagttgggactaatcagtgaatgaaaccctgtacttagggaacttatattctagaaggaaaaacacaccataagcaagtaagagtataatataaaaatacatagtggtaagtgctatgggggaaaacacatcagtgcataagatggagagtgacagatttggagagggctagaactgctgataaagaagtcttaggtggtattatttgtgcctatacttgatgaagtgagcgagggacaactgcggtgtgagcggagatttttaatgaaaaaattatcctggccgggtgtggtggctcacgcctgtaatcccagcactttgggaggccgaggcgggtggatcacctgaggtcaggagttcaagaccagcctgaccaacatggggaaatggtgtttctactaaatacaaaaaattagcctggcgtggtggcgcatgcctataaccccagctactggggagtctgaggcaggagaatcacttgaacccaggaggcagaggttgcagtgagctgagattgcacccttgtactccagcctgagcaagaagagcaaaactccgtctcaacaacaacaacaacaaagaaaaggaagagaaaaggaaagaaaaaattatccatgacatttgttaaaactgtaaggctgactttattcagcagggactactacaatggtgtttggtagtagggaagagagatttggctcaactttgaatccagtgaggaagagtggagacttatagccaaggagcagagtagggggat

SEQ ID NO: 718563 - DNA, 587 bp, Homo sapiens
aggtaatgtgaatgaagtagagaacaggatcactggctcagaaagctgagtctaggcagggccagtatggaacatatcaaaatgaacatcaaacatgtgaaataatgacagattttgatttgtactttcatggaaattacaaacgctgacatgacaggaaataacaagtgagcctactacagatcgggtggttggaaaasgcctccaaatgaagtgtttgctaaaagaacgatcttgagtcagtcatgccagaaaagtgaacagcaaaaccaaggtggtgaaatatgaaaaatataccatccctcatgcattatctctcagtttaaactggtaaatgtgcttgttgcaattctgtggaaaaaagtaatgtagaattagatatgattagaaaagagtctggagacagataagtaggacttctttagctacaagaagggtttttaatttgattctgcatactatagaaaacaatggagtaactttaagccagtgagttacgtactctaatttacattataaaaataggatatagtttgccatgtgaagagtggatttttttctcgaaaaggacaaattgggaaatcaat

SEQ ID NO: 718564 - DNA, 587 bp, Homo sapiens
aggtaatgtgaatgaagtagagaacaggatcactggctcagaaagctgagtctaggcagggccagtatggaacatatcaaaatgaacatcaaacatgtgaaataatgacagattttgatttgtactttcatggaaattacaaacgctgacatgacaggaaataacaagtgagcctactacagatcgggtggttggaaaaggcctccaaatgaagtgtttgctaaaagaacgatcttgagtcagtcatgccagaaaagtgaacagcaaaaccaaggtggtgaaatatgaaaaatataccatccctcatgcattatctctcagtttaaactggtaaatgtgcttgttgcaattctgtggaaaaaagtaatgtagaattagatatgattagaaaagagtctggagacagataagtaggacttctttagctacaagaagggtttttaatttgattctgcatactatagaaaacaatggagtaactttaagccagtgagttacgtactctaatttacattataaaaataggatatagtttgccatgtgaagagtggatttttttctcraaaaggacaaattgggaaatcaat

SEQ ID NO: 718565 - DNA, 595 bp, Homo sapiens
taattcacttaaggtgtgcaatgaccaacaagtaagatacgatgtactttctatctatagaagttctgattctgcacttctcaatttccatattacaatctatcttcccaggtactcctgctaactgggtaagtttaatcatttaagataatttaacagtttatgtatttcattctcaattgataaaatggaaaaatggctttgatgaacttgattaatgtgaatctgttctcaaaacatggtctattgttagaatgttaatacatgcagagagagggaaaaaatgagacagaaaagctgagaaccatatactggggacatctagcttactaaggtttttcttctgcatgaggtcctagaagaagtyttgtcaaactgtctttgatcacaaacttttcacatagtattagaaagatattccttcagtatgaagtacgtttgaaacattacaggtacaagatgtgaaatccagactagaagtgccactggaggtcacaatgggggacattgcctttggaaagtaggctgtgaattagtgtggcttattccaagtcagatgaccaatgagtgggacctgaagtactgatcaatcatt

SEQ ID NO: 718566 - DNA, 591 bp, Homo sapiens
taaacaagtcgatccatttgacaattgaattagagatttgttttgttttgttttgtttttctccaagatggcagattagaggctttttrgcatggctcagccacttggaaatagcaagatactgcctgaaaatcaactctgtgagctttaattcaagcaagaaagtgggagtctaccagaatcatgaaggcaccccagatctcagggagaagaatacgggctaccagctctcttgatggtacctggtgaagtcccagtacatgagagaggcagggagcccctctctgtgactcacctttccactggggatctgagcaacctaggctgagggagaacattgtttcttgtcagccctggagataacatggggagagacttggtgatgctatgaaagaaaaagctacagacaatttcccaaacccaggatggagagcaagatgccattttttaatcaagatgcacataaagtcagccattttggggcaacccaacagcctagccacacaggcatttcagtattgagccagagattggagcgcctgctctggattggggtaggggcctccacagccaaaactgtggaaagcacct

SEQ ID NO: 718567 - DNA, 2299 bp, Homo sapiens
gcatggaagaagaatttcaacttaggcaaataaatgctaacggtgaagtatttttaaaggagtttctctaataagtattacaccaaagtatggctcaaaatgtattattaaaatctgaggacaatggtttaaagaaaagaaaaattaccatttttctgtcaggtcttctctgagctcttaagatattaatatattttgtgatttttttcaaagtaaaagaagtaaccttatgcagcatttcccaaaatttggtaacaatgacctgtttttcaaaacatctcataagacttttgttttctataacacaaattgaaaaatacctagaaagaaatcacaaagtacttttggaatacaaaaaaaagcaactaattgtgtctgccagtagttgcatttagagaggaaatttgcgagcagaatctagaatgatgtgtagaacttttccaaaaaaaacttttgagaaaaggtcatttcaagcacagggaataaaatccactgtgaaagacagatatataatgaaatagctgaaagtttcaataagtatatgcacaacaaagacgagtgagaagagtggtagtgcggacggttgtagtgatgattataagcaaaggtactagaggcagtatagcctggtagttaagagtaggactggccttcagcacataagagtaactggttctgtgaacttgggcaaagtatatgatttgtctctgcccaagtttcttcatatatgaggtgcttcatatatgagtgcacttggtggtgcactgaaagaatgtttactatgtcttttctaagttcaaataagctgtagtgaagcatgtgatatacagaagtgtaacaggtaaagctacagagcaagtaggagtctcttctcatgctgctaataaagacatacctgagactggtaattgataaagcaaagaggtttaatggactcacaagtccacatggctggggaggcctcacaatcatggcggaaggtgaatgaagagcaaagtcaagcaggcaagatgacatgtgcaggggaaatcccttataaaaccatcagatctcataagatttattcactatcatgagaagagcacaggacatccccactgccatgattcaattacctcccactgggtccctcccaggacaagtggggattattacaattcaaggtgagatttgggtggggacccagagccaaaccacatcagggttgattaaaaaagtaacaaaaggaaaaaacctcccaaagtatagttaacatttattgaatacacacttcaagtcatgcattcttatgcatgcttatatattcaaaataacaatatacatattattcttagtctcattaaaaattaggaaastgaatcagagagatgttaaataatttaccaaaagttacaaaactagcgaattgcagaattaaattttgagccccagtcatcttgctcttaaccactctgcaagcatctctcaaaacaattttttaaaatatctcaatccacagtaagaaatgtattttatgtcatgaattagtatatgcattatatatgtatgggtgagtgtgcatgtgtgtgtttgtatctcaaattccacaaaattagagttacccttatcatgggtaatgtatttggataactctattccagtatattctatttttttaaatgttagtcccaaaagagtaaatctagtttgcagccactaattgataatttaccagtagtagatactgatagtctactgcttgaataatactgtactatgccatcatttaaatgtctttttgaggaatttagaatggatactacagagaatggagagaaagtaaaggacttaaagcaagggaataacctagccagatcatgttttagaaatattactaccagcagtgtggagattaaattgcagagagttggcactggaaataataagcctacttaagagactactgtgatactacagaagaaaataaagcacggagggcacgagacaggaaatataatcaaagtacatggtgccccataaaatataaaggtgaaatgggaatgaatggagaacaactcccatgtttccagctgtaggatagagagatagtgagatcattaaccaggctagtgattacagaggaaaggttttaacagaaaaatagtacattcagctagttggaaaaattaaatggaataacattttgacatgacagggcttgtaatgttttactagagctaataaacgatttatcttgaactcaatattattttaccactgtatagtgtgagaacagattactttcttttctttttctttt

SEQ ID NO: 718568 - DNA, 644 bp, Homo sapiens
gttaggggccttactatggacctttgaggaccccatcagccccctaacagaggacgcatcaccaagcagcctttcccaatcctggttcttacacaagattaagcccagataccccgaggcacttgttgtatgcaatgcattgacttgtctcttctgcatccagaatgattttggttctatgccatcctcaggagagttgagaagtcactcccatcagcttctgtgttctgcagagtagcactgcactgggaaaggctgcaaggttatttgtgcctgtctttccccctgatggactgtgagcctccctagggcagagaccactttctttttttgtttgtttgtttgctttgagacggagtctggctcggtcacccagggtggagwgtcgtggcgtgatcttggctcactgcaacctccgcctcccaggttcaagtgattctcctgcctcggcctcctgagtagctgggattacaggcgcgagccaccacgcctggctaatttttgtatttttagtagagacggggttttactatgttggtcaggctggtctcgaactcctgacctcatgatctgcccgcctaggcctcccaaaatgctgggattacaggcgtaagccatggtgcccagagccattgtctttttta

SEQ ID NO: 718569 - DNA, 669 bp, Homo sapiens
taaattccctttcgtgacatttttttttttcttcagcatgtacctctcccaaactcctttcctcaaagaggaactcaatagaacatgtgtcactccagccccaactatcgtttattttatttacatgcagttttcttattttgatgctattaacataaaaaggaagatctagtgctaaaacaacggagaatgaaatatgggctgtgcagctttgaccaagacctacaacctcatgtattcagattcttattctcctcttgaccatcagcattcttgtcattagaagaatgcaagccrttcctcagctctgtttactctgtatgtttgtctttttcccccggaggtctctgtgttgcctcaagttccagttgacctaaataattagtcctcaatttactaatttcactcctatttctattaactaatccaaatgcttttctttcctcctagtccatacttttcctttctgatctattctttccacctaatattaagtccatgtactgactgaatggaaagagctctgaattattaagtcttgtacatgtaattttagtttttaataaatgcaattataaaataacaaaagcaaacaaatatgatgataatctaagactaaaaagtattttgaaaggcaaaaacaagattgctaatttttaagtggcagta

SEQ ID NO: 718570 - DNA, 1124 bp, Homo sapiens
ctactcagaaggctgaggtgggaggattgcttgaacctgggagacagaggttgtggtgagctgagatggtgccactgcactccagcctgggcgacagagcaagaccctgtctcaaaaaacaaaacaaagtcactgacatgacaccaaagagagggaagaatgaacaacactccattaacaatactcctgtactggccaagtgcagtgggctcacgcctgtaatcctagcactttgggaagctgaggcaggtggatcacctgaggtaataagttcgagaccagcctggccaacatggtgaaaccctgtctctactaaaaatacaaaaattagttgggcgtggtgtcatgtgtgtgtaatcccagctacttgggacgctgagacaggagaattgcttgaaaccagcaggcggaggttgcagtgagccgagatcatgccactgcactccagcctgggtgacagagcaagacactgtctcgaaaaacaaaaacaaaactcctgtattrtagtagaaacaagagataattggggcaatagcagtggaaaggtaggcatagaatcaaaggtattaagcagcaccagctcctaggacttagggttcattagaagtgaggtttctatcttgggaatatggattataaactaatacttacagggtgcgcagtaggccctaggcaccattctaagtgcttacctgcactgattaatgcaacctgtcataacaaccctatgagacaggagctaccattatctctattttacagataaggaatccagaccgggcacagtggctcacacctgtaatcccagtactttgggaggcagaggtgggaggttcgcttgagcccaggagttcaagactggcctgggcaaacagggtgaaaccccatctctgcaaaaaatagaaaaattagctgggcatggtggtgcatgtctgtagccccagctactcaggaggctgagttgggaagatcacctgagcccagggaggtcgaggctgcggtgagccatgattgtgccactgcactccagagttccagcttgggtgacagggcaagacactgtctcaaaaagaaaaagaaaagaaaagaaggaaagaagaaacccaaagctcaatagttatata

SEQ ID NO: 718571 - DNA, 1124 bp, Homo sapiens
ctactcagaaggctgaggtgggaggattgcttgaacctgggagacagaggttgtggtgagctgagatggtgccactgcactccagcctgggcgacagagcaagaccctgtctcaaaaaacaaaacaaagtcactgacatgacaccaaagagagggaagaatgaacaacactccattaacaatactcctgtactggccaagtgcagtgggctcacgcctgtaatcctagcactttgggaagctgaggcaggtggatcacctgaggtaataagttcgagaccagcctggccaacatggtgaaaccctgtctctactaaaaatacaaaaattagttgggcgtggtgtcatgtgtgtgtaatcccagctacttgggacgctgagacaggagaattgcttgaaaccagcaggcggaggttgcagtgagccgagatcatgccactgcactccagcctgggtgacagagcaagacactgtctcgaaaaacaaaaacaaaactcctgtattatagtagaaacaagagataattggggcaatagcagtggaaaggtaggcatagaatcaaaggtattaagcagcaccagctcctaggacttagggttcattagaagtgaggtttctatcttgggaatatggattataaactaatacttacagggtgcgcagtaggccctaggcaccattctaagtgcttacctgcactgattaatgcaacctgtcataacaaccctatgagacaggagctaccattatctctattttacagataaggaatccagaccgggcacagtggctcacacctgtaatcccagtactttgggaggcagaggtgggaggttcgcttgagcccaggagttcaagactggcctgggcaaacagggtgaaaccccatctctgcraaaaatagaaaaattagctgggcatggtggtgcatgtctgtagccccagctactcaggaggctgagttgggaagatcacctgagcccagggaggtcgaggctgcggtgagccatgattgtgccactgcactccagagttccagcttgggtgacagggcaagacactgtctcaaaaagaaaaagaaaagaaaagaaggaaagaagaaacccaaagctcaatagttatata

SEQ ID NO: 718572 - DNA, 308 bp, Homo sapiens
ccaaactatgcccttaatttgttatagtaatagtaatttgtartaatgtgtcaccagaaagctaagcagcattgcctttctgagttacttctcatagaatcccagatccttagaaagtagaaagaaccctaaagactaaccattctaccctccatgtagcccaaaaacctcttctccaaaatcctcataagtggtcatacaaacaggaggtaatttcatctgcttcctttgtttgcactgaagtgatccacttaagcgcaagctcggtagcacgtgacactcttggaagtagtgatctgcagggtgca

SEQ ID NO: 718573 - DNA, 799 bp, Homo sapiens
taaaacagtacttttactttcaacttaagaataaaataacttcaccacattattaaaactcttgataacttcccaacttcattattaatattgcatagatttataagactaggttatgaaagatgataaatagataaaattaattagatagataatagattaatttaaataaataaatatagagatacatgttttaagatagtgacaaatgtttgtaagatatctgctcagattttcttcagatagctccttaatccatgtctgctggtatttatgtactttatacatagctctgttcaaggtggttytcatgtaacaaagcttctgaagacttacgtaactaagaatatatttcatgccctctgtttaaatgacaatttgctagatataaaattctaagtttttttttcaaactctagaaatataattgtatcatcttctttcatacagtttttgtaagttattgtcaatcttctttctttttttccctttcaaattttattttaggttctggggtacatacacaggtttgttacatgggtaaattgcaagtcactgtgctttcatgtacaaattattttatcacccagttggtgagcacagtatctgataggcagtcttttaatcctcaccttcccccaaccctgcaccctcaagtaggccccagtgtctgttgttcccttcttggtgtttgtgtgtactcaatgtttagctccaacttataagtaagaacatatggtatttgattttctgttcttgtattgatttgtttaagaaaatggcctccagctgcatccat

SEQ ID NO: 718574 - DNA, 1772 bp, Homo sapiens
  misc_feature 1216, 1217, 1218, 1219, 1220, 1221, 1222, 1223, 1224, 1225,1226, 1227, 1228, 1229, 1230, 1231, 1232, 1233, 1234, 1235,1236, 1237, 1238, 1239, 1240, 1241, 1242, 1243, 1244, 1245,1246, 1247, 1248, 1249, 1250, 1251, 1252, 1253, 1254: n = A,T,C or G
  misc_feature 1255, 1256, 1257, 1258, 1259, 1260, 1261, 1262, 1263, 1264,1265, 1266, 1267, 1268, 1269, 1270, 1271, 1272, 1273, 1274,1275, 1276, 1277, 1278, 1279, 1280, 1281, 1282, 1283, 1284,1285, 1286, 1287, 1288, 1289, 1290, 1291, 1292, 1293: n = A,T,C or G
  misc_feature 1294, 1295, 1296, 1297, 1298, 1299, 1300, 1301, 1302, 1303,1304, 1305, 1306, 1307, 1308, 1309, 1310, 1311, 1312, 1313,1314, 1315: n = A,T,C or G
tgatatagaataatttccaaaatatgctattaagataatttttaaagatggaaaacaaaagagaagtgctgcagagtagtgtgaacagtgtatttctaccaatggaaaaagattaatatgcttttatgtgaaaataatattactggaaggttaaataagaaactggtaatagcctctaggaagaagatctattgaactgtttgagtttttaccatgtacacgtattattctttccaataaaaatgctgtttatacgtgcattttaaaggtaaaatttagaggaataaagaattgtaaccgtaaccattgtgctcctttgcaacctccattaatagatgcagtaagctctcataaacctgagccatttggcaaagattcctgtggttcattrctattttttagtccttttctctaaaacttgaaaaaacaagttgactcccagaaacaattttcagttattggcaagtctaattctgtatattcaaaatcctgtttatgactcttcaaagtgattaaaagaacactcttaagcagttctcatgaactttcagagaagcaataatatgggaaacaaaagtcacagacatttcttccagaacacatcgttctgtggttaacttggttaagatcttccgcccatagaaatcagatgccagcaatttctgagaatttcatcccactcaatagtgcataatgactgcgggataaatcaatgtcttagaaatctgaaaaactctgaaaaagaacatctaatgtgacctgcggggtcataagaggaaagatatatagtaatattctggtagtgtttatctctggtgagatcatatcttaacctatatttgtgtgtattttatatatatataatatatatatatactatagagcatgtataatatatatactatatttactttatgttatatatactatatttacttatatatttagtatatatggtacatataatatacatatgaattatatgtactatatatactatatatacttatatatgtagcatatatagcatatatagtatatatactatatatactaaatatataaatatataagtatatataaaagtatatataagtatatatagtatatatattatataggatttatactatatatactaatataaatatataaatattatatatattatatataaattaatatatataaatatattatattaatttatatattnnnnnnnnnnnnnnnnnnnnnnnnnnnnnnnnnnnnnnnnnnnnnnnnnnnnnnnnnnnnnnnnnnnnnnnnnnnnnnnnnnnnnnnnnnnnnnnnnnnncgcttacagagaagggaaaaggtgaagcttggttcatagacggatttactctttatgcggtgcaagctagaaatgtattactattgcattacaaacatatctgggagtggccctgaaatacagtaggggcatgggaaattctcccagtggacaaagctgtaggattgagtaaaatatacatatgaactcatagacagtggtgaatattttggctgtctgttcaggggcatagaaaatgaaatattgggctggacgcatgtggctagacctaagaagccttagagagcttgagtgtaaattgtgaagatctttgtatcaaatggttgtaataatccatcatggaataagcactaaacaatcaaggagaagaaccagccatcttcttcatccaccaaccacgtgctggcacaatgaacagcatgaacaatgaacagcatgaccatggcagcagggatga

SEQ ID NO: 718575 - DNA, 1772 bp, Homo sapiens
  misc_feature 1216, 1217, 1218, 1219, 1220, 1221, 1222, 1223, 1224, 1225,1226, 1227, 1228, 1229, 1230, 1231, 1232, 1233, 1234, 1235,1236, 1237, 1238, 1239, 1240, 1241, 1242, 1243, 1244, 1245,1246, 1247, 1248, 1249, 1250, 1251, 1252, 1253, 1254: n = A,T,C or G
  misc_feature 1255, 1256, 1257, 1258, 1259, 1260, 1261, 1262, 1263, 1264,1265, 1266, 1267, 1268, 1269, 1270, 1271, 1272, 1273, 1274,1275, 1276, 1277, 1278, 1279, 1280, 1281, 1282, 1283, 1284,1285, 1286, 1287, 1288, 1289, 1290, 1291, 1292, 1293: n = A,T,C or G
  misc_feature 1294, 1295, 1296, 1297, 1298, 1299, 1300, 1301, 1302, 1303,1304, 1305, 1306, 1307, 1308, 1309, 1310, 1311, 1312, 1313,1314, 1315: n = A,T,C or G
tgatatagaataatttccaaaatatgctattaagataatttttaaagatggaaaacaaaagagaagtgctgcagagtagtgtgaacagtgtatttctaccaatggaaaaagattaatatgcttttatgtgaaaataatattactggaaggttaaataagaaactggtaatagcctctaggaagaagatctattgaactgtttgagtttttaccatgtacacgtattattctttccaataaaaatgctgtttatacgtgcattttaaaggtaaaatttagaggaataaagaattgtaaccgtaaccattgtgctcctttgcaacctccattaatagatgcagtaagctctcataaacctgagccatttggcaaagattcctgtggttcattactattttttagtccttttctctaaaacttgaaaaaacargttgactcccagaaacaattttcagttattggcaagtctaattctgtatattcaaaatcctgtttatgactcttcaaagtgattaaaagaacactcttaagcagttctcatgaactttcagagaagcaataatatgggaaacaaaagtcacagacatttcttccagaacacatcgttctgtggttaacttggttaagatcttccgcccatagaaatcagatgccagcaatttctgagaatttcatcccactcaatagtgcataatgactgcgggataaatcaatgtcttagaaatctgaaaaactctgaaaaagaacatctaatgtgacctgcggggtcataagaggaaagatatatagtaatattctggtagtgtttatctctggtgagatcatatcttaacctatatttgtgtgtattttatatatatataatatatatatatactatagagcatgtataatatatatactatatttactttatgttatatatactatatttacttatatatttagtatatatggtacatataatatacatatgaattatatgtactatatatactatatatacttatatatgtagcatatatagcatatatagtatatatactatatatactaaatatataaatatataagtatatataaaagtatatataagtatatatagtatatatattatataggatttatactatatatactaatataaatatataaatattatatatattatatataaattaatatatataaatatattatattaatttatatattnnnnnnnnnnnnnnnnnnnnnnnnnnnnnnnnnnnnnnnnnnnnnnnnnnnnnnnnnnnnnnnnnnnnnnnnnnnnnnnnnnnnnnnnnnnnnnnnnnnncgcttacagagaagggaaaaggtgaagcttggttcatagacggatttactctttatgcggtgcaagctagaaatgtattactattgcattacaaacatatctgggagtggccctgaaatacagtaggggcatgggaaattctcccagtggacaaagctgtaggattgagtaaaatatacatatgaactcatagacagtggtgaatattttggctgtctgttcaggggcatagaaaatgaaatattgggctggacgcatgtggctagacctaagaagccttagagagcttgagtgtaaattgtgaagatctttgtatcaaatggttgtaataatccatcatggaataagcactaaacaatcaaggagaagaaccagccatcttcttcatccaccaaccacgtgctggcacaatgaacagcatgaacaatgaacagcatgaccatggcagcagggatga

SEQ ID NO: 718576 - DNA, 595 bp, Homo sapiens
aacattttaactgaacactagttatgtgcatgtcattgaaagtcctgaatatgcaaaataaactttagatcaattcccactgatacgtgcattacctaacaatatgcccacatgtatctaaaataatattatagtgaaacattcacaataatttaaaaacatgaattataattatataagtaaatatgtaaatatatgaatataaatatgtgtggaatgaaaacataaatgaatttaatagcaagaaattaaatttttcaaaatttaatttttggtaaaattattttgattcataaaagttgaacaagattaataataatgacagtaacaaaaacagtagacactacttccaggagtttaccacctaatcaaggagagaaaaaattctcaagaaatggttgcataatactttccaaccaatataatctatgtgcaaattcccactctgccttttctttcttttttttttttttttttactggtaatagagtttattcaaatayaggcgctggggcttgcccatggtgctcttgatatataaggccggacattctgccagtatttcttgagcaatgacaacaagaagctgacagcc

SEQ ID NO: 718577 - DNA, 1037 bp, Homo sapiens
catggcacatgtatacatatataacaaacctgcacgttgtgcacatgtaccctaaaacttaaagtataataataaaaaaaagaatgttgaaggaagatagaagaaatatagaacaaaagtgaaggtggcttatcagagaatttgtgacctggatgtaggaagtttgagactttagagggatgctaaggagaataacatgtgatcactacactaaaaagcttataactctgcagtcatatcgtgtacttctaatgtcaggcacaatgcgaattcctcctatgtataccatctagagtaaatactgcaaatcagtttattgaaccccatgatgaacccagtttgaaactgccttcctgtataataaatactggtaagctaaaaactgcatttttagattccttacagttagaaatttgcaggtgttataactgggagtttcttctggctttattgtttttggctaagtagaaaccaaaatcagttcccttgacttcctgggacttctttattttgcctaatactctataataaatctctcccctttctgcttaaactagcttattagggttctcccgagaaacagaattaaaagggtgtgtgtgtgtgtatgtgtgtgtgtgtgtgtgtgtgtgtatgtgtatgttcacgcatgctcgtgtttgtggcgagaaaaagagatggaattggctcacatgattgtgaagactggcaagttcaagatcttccgggtaggttagcagactggagacccagggaagggttgcaatttgagttcaaagacagtatgctggcagaatttctccttccagagaggtcagtctttctactgaagccttcaactgtttggatgatacccactcccattatagaaggtaatcttctttattaaaagtctactaattaaattttaatctgatctaaaaaaatcttcacagaaacatttagattaacatttgaccaaatatctgggtaccatagcctagtcaatttgacacattttttwaaaaaatcataactagagtggttttgttgtccat

SEQ ID NO: 718578 - DNA, 643 bp, Homo sapiens
tctgttatagtggcacaaaacagactaagacaagatctaactatgacttatcatataagtatttcattcagtataaatacaaattgtaaaacatattagttccaattctcaaattcctagtatgatcagataaaagtcatggaaacattaaataaattgagcagtttttctcaaggcaaaaggtatctgtgatgacttaacattgagtgtttagcagcataaatatattgagattgaatcaggcaaagatcactccaamtgttgaactattgggtaagtggaggggggcatttaaggaaggcattgctactggtgatgtttatctcaaccacatacccaactgcactatatgtgttagcattaactttttaaaccattcagcatggttgcaaaatttcagcagaagtaggacacttgtttgctagaatttcatttatttttcaaattattgaaggctgtcatctgtataaatttacagagaatctaggacacttgaaaacttgagtgaagtttaaaacattttttaaatttttaaacagtcaattgtattgggacagggcaaacaagattaggcttgaggcatgagattgcaggtaaagttggagatgagcaaaataagaaggaaagcatagaggggaggaaa

SEQ ID NO: 718579 - DNA, 557 bp, Homo sapiens
  misc_feature 455, 456, 457, 458, 459, 460, 461, 462, 463, 464, 465, 466,467, 468, 469, 470, 471, 472, 473, 474, 475, 476, 477, 478,479, 480, 481, 482, 483, 484, 485, 486, 487, 488, 489, 490,491, 492, 493, 494, 495, 496, 497, 498, 499, 500, 501: n = A,T,C or G
  misc_feature 502, 503, 504, 505, 506, 507, 508, 509, 510, 511, 512, 513,514, 515, 516, 517, 518, 519, 520, 521, 522, 523, 524, 525,526, 527, 528, 529, 530, 531, 532, 533, 534, 535, 536, 537,538, 539, 540, 541, 542, 543, 544, 545, 546, 547, 548: n = A,T,C or G
  misc_feature 549, 550, 551, 552, 553, 554: n = A,T,C or G
ttttattttcagttttgttctctttcccataatgtggcatacacgtctgtgcacaaacataataaacatatcttcttcatttaatataaaatctcaaaacattttaaaatggattgataatgttagcctccaaattattagttttattcctacatctctgccaagctacttagaaaattaamctaaaattttatgttcacatagttaaaatagaattttctagttaatttttaaagtactaatattcattgtctgttatatattccaggcatttacactgtttgctacacatttcctggaactatgccatattgatgccctgtatcctaatgtagaaaacatgcattttgaagttcaacatgtaaagaatacctcaagaaataaagaagcaattttgtatacctacaaactttctaagggactcacagaagagaaaaattatggtactgcatatnnnnnnnnnnnnnnnnnnnnnnnnnnnnnnnnnnnnnnnnnnnnnnnnnnnnnnnnnnnnnnnnnnnnnnnnnnnnnnnnnnnnnnnnnnnnnnnnnnnnttg

SEQ ID NO: 718580 - DNA, 932 bp, Homo sapiens
tttattagaataatctctataacaaagttattccatatttttcattatttctttttcaaaagcagttccctttatcacttcaataaaaacaagttttacacagtgtagtatttaaaagttaatgagaaaataatcatcttgtaaccatcagagtaataattacttcaggtaagagccatcaattaattctacaatcaatgggtggaagtttgatgaggattgggttatttacacattctcaaaataactctccatagattaataacttattaattacaaaagaaaatctgaatttatggtgaagaaattgatcagttaatatcaccaagaatgaggaaatggcattatgtgcctcttgatgtgatgcactaaaaaggatacatcatagagtattaaggccaaatatgcayagatgaatttaatcaggagaaagcaatcacataaattgaggaaattctacttaaaaagttgacccttatgcttcaaaatgtcagtatcatgaacaaaggctgagaaacttctccacttcaaaggagttttaaaaaacatgacattaaatataagatatgatcctggattggaccctatatcaggaaaaaaatgctataaagaacattattagaacaattttaaaaatttgagtatgggatacatattataaaatagtattgcatcagtattaattattctgaatttgataataatattatgattatataagagaacatctttttgttgggagactttagtctcctaagtacttagtaccttagtacttaggtgctgcaatttattcttaaatggttcagtaagcataataaggctaacaatgtgtatgtgtatgtaaagtatgtacaaagaaaaaaaatatgggaaattcgccatgttattcttgcaattttccgagtttgaaatttttttccaacaaaaag

SEQ ID NO: 718581 - DNA, 1055 bp, Homo sapiens
tctcactctgtcacccaggctggagtgcagtggtgcaatctcagctcactgcaacgtttgcctcccaggctcaagccatcctcccacctcagcctcctgagtagctgggaccacaggcacgcaccaccatgcccagctaattgtttgtctttttgatagagacggggtttcgccatgttggccacactggtatcgaactcctgagctcaagcaatttgtccgccttagcccctcgaagtggtgggattacaggtgtgagccatggcgccaggccaattgacatttttaacatcaataatgaggccccagctgttcattaatcaatggatgatgaaatagacaaaatggttctgattcaaggtgatcatgacagtaatgacgatgaagatgatgttgtaacactgcagaaaaaacgcctacagatatggtaaaaatgtgtgatgggcttattgaagatctacagtttttgttaagcaaaataaaattcctatttttactgtataagaatggagcagcacacattcataacagaacaagaaatcatgtcaattataaaatcaaagagaaatttctatgacaaaaaccattattaatgaagcagatgactctagaggaaacatttctaaaagcgggccagcaaaatgcctccgtatccttagaatacccacttcctggtcccttaactgtttctgatgtttcatctcacttagaaaaataaaatacagcttacagtaacctcttaatcaaaatatagcattataggtggatactggaaattattagttgttgctgtcatttaagagctgatgcaggtactctgggggtgctaccgtgctgttagcctgaacacattttttcactatattaatggtatgtcaggttttttttttactgttaagtacttatgggtaaataagtgttaaaaaatgattgcttattggtagcatataaattcagagttgggaatgatagtgatgccaaacaatcacaaattgtccacctaagtgcctgaaayagtgacacctttgctttctggtgtttccatgtacatagac

SEQ ID NO: 718582 - DNA, 1055 bp, Homo sapiens
tctcactctgtcacccaggctggagtgcagtggtgcaatctcagctcactgcaacgtttgcctcccaggctcaagccatcctcccacctcagcctcctgagtagctgggaccacaggcacgcaccaccatgcccagctaattgtttgtctttttgatagagacggggtttcgccatgttggccacactggtatcgaactcctgagctcaagcaatttgtccgccttagcccctcgaagtggtgggattacaggtgtgagccatggcgccaggccaattgacatttttaacatcaataatgaggccccagctgttcattaatcaatggatgatgaaatagacaaaatggttctgattcaaggtgatcatgacagtaatgacgatgaagatgatgttgtaacactgcagaaaaaacgcctacagatatggtaaaaatgtgtgatgggcttattgaagatctacagtttttgttaagcaaaataaaattcctatttttactgtataagaatggagcagcacacattcataacagaacaagaaatcatgtcaattataaaatcaaagagaaatttctatgacaaaaaccattattaatgaagcagatgactctagaggaaacatttctaaaagcgggccagcaaaatgcctccgtatccttagaatacccacttcctggtcccttaactgtttctgatgtttcatctcacttagaaaaataaaatacagcttacagtaacctcttaatcaaaatatagcattataggtggatactggaaattattagttgttgctgtcatttaagagctgatgcaggtactctgggggtgctaccgtgctgttagcctgaacacattttttcactatattaatggtatgtcaggttttttttttactgttaagtacttatgggtaaataagtgttaaaaaatgattgcttattggtagcatataaattcagagttgggaatgatagtgatgccaaacaatcacaaattgtccacctaagtgcctgaaatagtgacacctttgctttctggtgkttccatgtacatagac

SEQ ID NO: 718583 - DNA, 615 bp, Homo sapiens
caatgtagtactagttctcaacattggctgcatcttagaatcacctgaagagctatcaaaaatcctgaggcctgaggcccacctctggaaagtctgatttaattgatcctcggaaatggcccaggcatcagggttttgagagttctccaggtgattctaaaatgcagccagggctgagaatggcaaaataaataattttaaaaattcaaaaggagagaatagttagtgtggaaatagacaaatagtcataaaggaaaaatttgtcattattggtggagcactaagcaaagatgaggcccagagctgagaacaagagagtctggccctgtagtgagtgtagttttatgatcaagccatttagcctgttgctcttattcacgaaaattgcacaacttgttctccttgcttcccaggcaaccttctgatcctaatttagctttccatatatgtctcctctaataggaaaaaatatgctggctaacctgagatgagttccctattgccttggcagttytagctctcattgtgtatgaatacgttggcaatctggattatttattgatgccttatgaacttgaagttcacaatggcaattgtaatcaagggactttccaa

SEQ ID NO: 718584 - DNA, 1932 bp, Homo sapiens
ttaaagtcaagcctaagctctacctgaactaatttgtcacaatattaaaattcttattctgaagaagatacttcaacattaaaatcatgcattgtctcttcacacaagagaaaatacttcacattcataatacataaaatgattatcttttttttttttttttgagacagggtcttgccctgcttcccaggctggagygcagtggcacaaccttgacttacctgcagcctcgaccttcttggctcaagcaatcctccagctcagcctctagagtagctgagaccacaggctcacatcaccactcccagctattttttttgtattgtttggagagatgggttttgacatgttgcctaggctggtttcgaactcctgggctcaagtgatccatccacctcagcctcccaaagtgctggcattacaggcatgaggtaccctgcccagccatgattatcttcttcaccttcctctaagctcatttttcttagtggtacaaaatgcagagtaaaggtttaaactaatgcatgtcaggaatcaaatggcaatgagatatataggaattatagaatttaagctacgtgttgctcctgcacatcaagtagatcacatgttgcagaggaattaaatgaagaacatggtttacaaggattcatataaattatctcattcatttagctgaatccaggaaaatctatgctttttaatcaactccccatttcttctaagatttctatataattataataatggaaagaaaaaactcatatccttgcaaaagcttggcaaatactgtgagtcctaagctcccaaatgtttccctgtaggccaaaacagagtaataaagcagcctggaacatataattggaatttatcactaaactcaggtcatccaacaggtagctaccaaaaaaataaataaataaataaatgggattcacatgatccccacctgaacactgtgaaactgacaccaccatgtattacactggagtcttaaatcaactggaaactgtggctgacacaaatagagctatttaaatttaataaattataacattaaatgagggcaagatgaataaattactgatataaaaaacaggtatggatgtaaacttcataattttcaatatttattataaagccaaaaaaagagccatacatatgcatatttctaactacctgaatttaactaaaataaaggccattactataccatcatattagtgcccagaaaaaggtgaaatgtggctggcacttggcaaatacttcttaaatgagggtcctgccatttactatgcctgttccagccacacaaatcatcttcttcataccataaaataggataattaccctagaaaagtggtttagtttacctaatgtttaaatactaattcttttccagttgaattctctaggggtgggggacaggaaaggataggggaagattctctgataggcattcactgaaacaaagcttacattatggtttgaaaatcatcatccactaggatcatgtctgctgcctctttgcaaacatctgtaccagtctggcccatcgcaactccaatgtctgcagccttcagagcaactgcatcatttactccatctcctgtcatggctacaactgaaccgttcttctgtagcgactagagtggagcagaggacaggggagaggaaggaattttgataaaaatgttgcttccatacaaagcgataaacaaatcctccctatttttttcacataattaagattagaaataatatagaccacccattgttcaatgaacttcaacaaatggagatctcagtaagataaagcttagaaaaagttgctactaatattcccatctgtgagaactgtatctctaaattctgttcttcaaacaactatacaatgattctcaaccaggggcaattgtgtctcccaaggga

SEQ ID NO: 718585 - DNA, 653 bp, Homo sapiens
tgctgttcttgtcagaccttttcagatacctccagactatagcccttccacagggtgatattcaaacattttccacctaaacatataagtttgcacaccctgaccacagacactgaattcacttgatgtcagaatgctagactaaaagttgatcttcttgactgacatttctaatctccctttttaaaaatccatcataaggactgacttctgaacagttgaataaagcagtaatcaatccaagaaactgcatccattctgattcagaggaaaaaaaaatccaacctagtgaccatttttcagcatactgtatttcatcacatttattctgtgattagtggaggacagagaagagggactggggagaaaaactgcctttattttaagaaagctcattttcctgtaactattcaaaaagaattgattatcaagtgttagataacaatattactaacatttatcatcrttcaaatatttagtaaaatttctccatatatttaaaattttacttaagaattttcccagttaaaatatgactgcttagtttgaataaggaagacattcctttcaattcatgacacaatagtacatttttattcttttctcagacagcagagagacactgttactgctttcccttgtaagtcaacagt

SEQ ID NO: 718586 - DNA, 902 bp, Homo sapiens
gtatttttttccaatttttcttaatttttaaaatctttctttttttttaattttaagagatgaggtctcactctgtcaccaggctggagtacagtggtgcaatcacaactcactgcagactcaaactcctgggctcaagcaatcctcccacctcagtctcctgagtagctggggctacaggaacatgccaccaggcctgggtaatttatttgttgatttatttgtggagagcgggtcttgaactccttggcttcaagagatcctccagtctccaccccccaaagtgctgggattacaggcatgattattatttagaataatagtctttattattctaagtaaagattcctgaagatgctgaagtattaaattctctccccctttttttttttgagacggagttttactcttgttgcctaagctggagtgcaatgatgcgatctctgctcactgcaacctccgcctcccggttcaagcaattctcctgcctcagcctcccaagtagctgggattacaggcgtgcgccaccacacccgtctaattttttgaatttttagtagagacggggtttcaccatgttggccaggctgttctcgaactcctgacctcgtgatccgcccacctcagcctaccaaagtgctgggattacaggcatgagccaccgtgcccggcctgaagtattaaattctaactcataattttacttcagtgaggwaagtctactttgaattggcaggaataaaggaactttatataactcttaaaagatctcattatcagaatgaaaaatgcatctactttccccctaaaaagcatctttcccctatgaactcataaacccaatgaaaatgttaagttctagtctcttgactcacttatttagattaagtcttaataatgca

SEQ ID NO: 718587 - DNA, 2194 bp, Homo sapiens
ctcaaactcctgacctcaggtagtcctctcgccttggccactcaaactgctgggattatagatgtgggccaccatgcgcaacccgtctttctttataggatgaaaagatgccgggtaacaagatgtatataagtcatggaaatgtatctgaatataattcaaaagaatcttatatctgttttacaataataagttttatagcgatttttctgtacacttgtgattgtgctttgcgtttaacattcgtaacaacccttgggataagtattattttaccctaatttttaaagtgatacatgaggcccaagaaggctaaacaacttgcctgaggtcatgtagttaatcagaggtagatccatgattcaaattcaggtccatctgactctaaatcccttgtgctaaccagtacaattcctccacttgaaaaagttgactacaaaacataattttggtcacgcagaactctcctttggtggtttaagttttctatctagtgagaaatggctgggcttagtgttcgagaaccagtctttgagggtgggctatgtttctctgcttcgttatctgtaaaatggagataatgctaccctgaactcacaggatcgttgtgaggtttaagtgagttgatacaggacaagcatttggcacagtgcttggcacataggaggccacaataactattagctactgctgttgtaaaagtctcatggcgatattgtcttgatcatcaggctaaaggtttcaaaatcaaatgtaaaaaagataggtttttaatttccgacatgcataaayatttaaattgtgttctgttgtttcttttctcccctttatcttttagaaattaacttctattcaactgtaggaaggaaagtcctgctgtgaatgtttaggcagaattgaagctttgagtcagaaatatcatggattgctttaatctgattgttgttttttgctctgttgtttttgctagaagaagaaattgcttcaataaaacattctatgaattattgttattattactatcagtatcataattattaataatttgtctttgcagagcagcaaagagagtgcctagaggaaagtgcctgggctttgtggtcaggcatgtctacatctgaatccagtttctaattgattcttggaaagtaacttaatcactatgaatctcagttttcttatttgtgcctatctccttgatacaatatgcttcaaagccctaaatattaactgactcattacaagagttcagtgacagttctttctccttcttacccctgcctcctatttgtcctttccaattacctttacattagaagggtgaccataagtgtgtgggtacgaggtgagtgttggggggttgtatgcttattcttgagatctactatatagtaaatgttatgagttaaatttacttgttggagtcctcacactcagtacctcagaatgcagccttacttggaaatagaatttctgcaaatgtaaaaattagttaagattggtttatactggagaagtttgggccagtaactcaatatgtcttgtgcctttatgaaatggaaaaatccagacacagacatacacacagggagaacacaatctgaagatagatgtagaggttagggtgatacttctacaagccaaaaatgcccaagattgccagcaaaccatcagaagctaggtgagacatatggaacagattctctcttacagccctcagaaagaataagtcatgctgacagcttgattttggacttccagtctccagaactgtgagacaataaatttctgttgtttaagtccctcagtttgcagtactttgttatgggagccctagcaaaccaatacattaaatgatgagaaccaaagctttctctgtaatgtttagcttggagattctaaattttatacttaatagtttttagtcattttaaaaattatattttgcaatcaaaatcaaaggaggtaaacacttcatccagagaaaaaattaccaaaacggaagaatgtaaatgacattcaaatccctcagggattttatgcaacaatgccataaaaaaatctaataaaattttcaaatgacttctgatgcaacttttaccaattccccattaaaataattagataaaatccagaaaaaatgagacaatcataataatactaaaaactaagactggtaatcaaatttttgcca

SEQ ID NO: 718588 - DNA, 964 bp, Homo sapiens
cctccacgtgtccatgtgatctcattgttcaattcccacccatgagtgagaatatgcggtgtttggttttttgttcttgcgatagtttactgagaatgatgatttccaatttcatccatgtccctacaaaggacatgaactcatcattttttatggctgcatagtattccatggtgtatatgtgccacattttcttaatccagtctatcatttttagataatccagtctatctaaaaaaagaaattggtgttattatcattcccactytacagatgaagaaataggcttagggtatgttaagtaaattgtgcaatgtcacaacactgctaataaaagtggaagagcagagtccacatttcaaatctttgtggtaagctcaaaagctgaccatctgcaaactcttccctctaattaaattgttcattgaactatgacccctctcaggcttatctacatttcagtaaggactttgtaagggtataaactccatgagggtagagacttggtctttgttgttcagaatggcatccccgtgcctagcaggtagtaggtgtcccataatcagggccgaattcgtgggtctgtgagcagcacagtgacacagggccaccagtcagaagggctccccacttggattcaatgcttcgcattgctgtcttcagattcttaaaattttatctttgaattgtgtgtagatgaagtctgatgggacaatggagcacaggtgggcacctggagcctctgcttatgtggggccccacctcccgccgcttcagtgcccatcaccacctgggttattggctgcttaccctccacccgtggtgccctggatggcaaccaggtcttgtgggggaggggcaggactctgactctggcccgaatctgggcaaggaaaagggaaggctgaagttggtgggtgttccctgtggatcttaaggagggtgggcccagtcccacctggat

SEQ ID NO: 718589 - DNA, 964 bp, Homo sapiens
cctccacgtgtccatgtgatctcattgttcaattcccacccatgagtgagaatatgcggtgtttggttttttgttcttgcgatagtttactgagaatgatgatttccaatttcatccatgtccctacaaaggacatgaactcatcattttttatggctgcatagtattccatggtgtatatgtgccacattttcttaatccagtctatcatttttagataatccagtctatctaaaaaaagaaattggtgttattatcattcccactctacagatgaagaaataggcttagggtatgttaagtaaattgtgcaatgtcacaacactgctaataaaagtggaagagcagagtccacatttcaaatctttgtggtaagctcaaaagctgaccatctgcaaactcttccctctaattaaattgttcattgaactatgacccctctcaggcttatctacatttcagtaaggactttgtaagggtataaactccatgagggtagagacttggtctwtgttgttcagaatggcatccccgtgcctagcaggtagtaggtgtcccataatcagggccgaattcgtgggtctgtgagcagcacagtgacacagggccaccagtcagaagggctccccacttggattcaatgcttcgcattgctgtcttcagattcttaaaattttatctttgaattgtgtgtagatgaagtctgatgggacaatggagcacaggtgggcacctggagcctctgcttatgtggggccccacctcccgccgcttcagtgcccatcaccacctgggttattggctgcttaccctccacccgtggtgccctggatggcaaccaggtcttgtgggggaggggcaggactctgactctggcccgaatctgggcaaggaaaagggaaggctgaagttggtgggtgttccctgtggatcttaaggagggtgggcccagtcccacctggat

SEQ ID NO: 718590 - DNA, 1373 bp, Homo sapiens
ttgtctgaatattcttaaaaatatatttttattaatatcaaaaccctcaagaacttcaattcctaaatactatttaaaatgactatgacacaggattctttcagtgccatgttgccagctggaaatctccacagctggtgtgcctctcccgggctttgcttggctcttgagcttgctactgggctcgctctacccactcggcctggtgggctgtgcttggctcctgttaccagcctcaatttcacacccactgtggctcagtgctcagcccgtggctgggccaggtgtgctgagatctgcttccaccttggtgctggagtctggaggaggggaaagtggtggcaccccaaaactcagagatgccagcaactcgcctggtaagtcccaaagtctgagccccctccaagaactgttaygactctctccccttcccaccacccacagcaacaaactggggggcatgttaccgctcatttgtgttactgctcgttcatgttacagttcattgccaccacccacagcagtgggcaaacaagggagggcagcatgtggtgcccagcagctttttctcccctcttgctcagtgagcaggagggagggttactgttacatctccttttgcacccaccattcagtgggttcctagttcttatcccacgtcaaagaggaatgacgtatgcagacactggagagtgagcaaggtggagaagaattttatggagcagcaggaggaaagctctcagcagaaaggggccctgagagcaggtagccctctgtgtgaggggtggcgtaaaagcagatagcccaatgtgtggctgagttaggggtttttatgggctcagaatgtgtgagtgtgtgctgattggtccatgggtggcccggaaaaggcaccattcactaggctaaaaggcacagagaaagttttcactccggtcgtcgactctacctggaactggaagctcagttttcagttttaaactgtctttggcttgaaggttggatttcactggggatccgcccctgtctgtctaggaatttgtctgtctcctgccactatcaactatatactctaatttttgaaaagatggtttttatgataaatacctaaaatattacaaatcataacacaaccaactgcttaatgggagtgttctgtatattcagaagcagatgagatggatatagattgtgaaggtttgagggaagaagaaaattaaagaatttacactgtactctagaaaggaaactacttggctaactgtattccattatgctcgcaacactggggattttattgcagtatacacacatacacaatggacatttctgtattccataggactaggaaagtctgatgatccatttatctctct

SEQ ID NO: 718591 - DNA, 1093 bp, Homo sapiens
gattgggagatgatgcgttcgcgtgggaacgctcctggtagggtctgtaagcctcttagggggattacatctggatgtataattttttttgggaaatgtgaaagcttatgggaaaaatacgttttacttccaagcagtggcagttccttatttcctatgaggaaggagtttatagccccactcttgactgaaaagtgtgagagacaattcaagcgcttgaaaattcacctgttttgcatttccggaaagacagagaaagcgtcagtgatccatttcacagatcaagggtataggaaagtggatggcactttgagatgttcattaggtttggagagggagcagacatctgccagcaatcccacctcttgtgctggagtcttgcagttcatttttctctcctgccctcttccaaatcctatgtccaatatcaaggatatctgacagttaaccatcagaatcaacgagcgttcccacagagttccgtcctgcaggagaggtaccgggacaggggcgggagacctgaagctgcgatcagaaaacgctgtgccttttacgctcctaaggaaccttagaccgagagtttcaagtttcaaaggcaagcagttgttggcccctcctgtaggatcctgtgggctctggaccgggaagagagcctggcagcgaggggtgacctggaaaagcccagtcacagagggtggatggctgtttcctgcgtaggaagctgttggcgaccagaatggtttatactttgttcctgggaccaacaggatctgcttggttctcggcgcataagcccactactctccccctgcgtaatgcactgggtggaatgcaagaacaatacagacttcctgcgggcctcggtggcccacgcctgtgatcccagcactttgggaggcccaggcgggcgaatcgcttgagctcaggagttcgagaccagcctgggcaacatagcgagaccgccgtcactaatatatatatatttatatatatatatttyatatataatatatattttatatataatatatattttatatataatatatttttatatatgatatatattttatacttttatatactatataaa

SEQ ID NO: 718592 - DNA, 627 bp, Homo sapiens
caatatcaaaactacattccacgtattgtaaaagctaatttgaggcacggaagatataacaacactctggatcactgttctagaggtgaaagctagaacgtataaaatgagaactgcactgcatgggattaatggcagattagatattaaagaagaaaagattattcattgtgaaaccatggcaatataaactatccaaaatgaaaccaaaagcaaagaggatttaaaaaaatttaagccaaattatctgtgatctgtgggacaacttcaagtggcttaatatatgtttaattgaagtccccaaaggagagaagaaaacatgaggaatgagggtagtgcattaaaaaagatgtttggaaaaataatgacaacctttttttccccaattcgatgtaaactattaacctacagatgcaagaagttcaatgtacctcaagcacaagtaccattgaagaaaattacatcatgtctcattataatcaaatcgctcaatcccagtgataagtagaaattttaaaagcagacaggaaaaawtgtcagacaaagtatgtaaaggggaacactggtccatcctgtagaagttatttaagacttgttgaggctagtaagcagtgttttgggcaatat

SEQ ID NO: 718593 - DNA, 1379 bp, Homo sapiens
aaagagtcttattcacgaagttgcaattgaattttgactcaagtagaactaaatagttctgcctaaccacttttggctttctgcccagacatggaaataaaaactcagaagtaagtaaagtggaaatgtgagaaaagagaaactattcaagactattttgaagattaaatgtagaatcattcaatgctaattatttagaattaagaagtgacatgggaccataaaactattaatcaaaccattaaaaagagatgaggctattctcagtaaattacttttcaaataatttttataataaaatctgtttcataagccctaagtaaaaaaatcaatactttatgartgtatatatcaatatttagatttttttacaaataattaatttgacattatcagaaatatttagaaaatacaaaatcaagtaacgatttgcctaggtgacataggtcctaaaagaggactaatcataaaacccgtggaattgggattttaaattaaaaaaaaaaaaattctaggttacagctaccaaaaatgaaccagaataaattgaggctagaagatttatagccagataagacattttaaacaatttcttcaaattctaagttggccattaatataaacctttgagtattgccatatgtgtgaggcagagaggaaatacttaaatgcgtatatgagttatttaacaaagctatctagtaagaggtaagaaaatctaacatttatggagcacttgcagtatactagatggggttctaagtgctttataaatattagttcattaaacactcataacagctgcatgaggtaagtactattactagctcccttttgcaaatgaagaaacgaagggacagagtaatagagaatttgtccaacattaaggagacagtgcaacagattaaaatacaatctaggtctactgagtaatatttatcagcttttttttttttttttttatgaagtgtcgctcttgttgcccaggctggagtgcaatggcacaatctcagctgactgcaacctctgcctcccgggttcaaacaattctcttgcctcagcctcccgagtagctggattacaggcgtttgccatcatgcctggctaatttttgtagttttggtagagacggggtttcaccatgttggccaggctggtctctaactcctgccctcaggtgatccgcctgcctcggcctcccaaagtgctgggataggcctgaactactgtgcctggccagcttctttgtttttaaaaggagaaaattttaaaggggggataatactgtttgaatgtttttcctttctgaatctcatattaaaagctaattcccaatattggaggtgaggccaggtgggaggtgactggattatgggggt

SEQ ID NO: 718594 - DNA, 1471 bp, Homo sapiens
ataaatcgttttatacctatatgtttttgggttgtatgtgatcttggggaacatatcccttgagtaagtcaaagtatttatgatcatatttttgatctcagaaaataggaccccttgctttgactgggttgaagctcaatattcattagtaactcattagtaattcatcttcataccagcctcaccaaggccgaggctcaggaagttccaaataaagttagaattcaaatagcttaaagtctacctcaaattcagcacagaattccttcgctcaaactagtagaccagcttgccaaagaagatggtaatctggatgaataaaaatatatatctaattatctccatttttataacatataagaattctcttattcattcccaatttctttttggattaaaatacaacttacatacagttcacaaattttaaatatacagcttaatgaatggttacataaaatacatctcataactgctacaaagatcaagatacagaactttcccagcatccaagaaggctctctgatgcatcactagatctatagtaaccacagctcttctgacctctatcatatatccatagataagttttatgtaattttgatctcatataaatggaatcatacagtgtatagtgttgtgtatgtggcttctttaattctgcattgtttgtgagcttcatcctgatgttgtgtatattagtattatagtttgttctttttcatttctgtgtagtattccatcacatgaatttactatgctttactcactcattttactattgatggacctttgggttatttctagagccttgagttattatgcctaaagctgttataaaaagaagtgatacttatttctattgggtgtgtacactcaatgaatgaaattcctgggtctttttactttttctttcggcatcttctcttttagtcccagaccataatttaacctttctaagttgtcakatgaaccataataatgtttatcattttaggccagagaagtgttccaggtggcaaatttcatgtcttaaaagggtccgccagtagggttatgcttttcgtagctcattcctatgggaaccctgatggattttgctctcctttttccttctccccaacttcttgttatttgtgtatgtatatctccccaactcctcatgatataagaagaagaagaagaaaaaaaaagatagactattgaaggggacatctaagaatgtttttctcatctattccgcattgagatagtgttgtagtacaacagagaagtgctgggtcagaatgaagggactggatttttatatccagaccaggcttctgctttctaggctggaggctatggattaaatcacatcagttatctgcacttcagccaggggttaatttgcatcagtggtttccaaacatggctgcaaatcagaatcacttggggaggctttaaagtttgttttgttacaaaagtggca

SEQ ID NO: 718595 - DNA, 820 bp, Homo sapiens
catttatttattgaacactgttgcctgttaaaataacatgtgctgaagactcaacgtgtagtatgtgctttactaaacactttatatacatttcatttaattctctcacatcgttaggtagtcggcattttcattttacagatgaggaaactgatggttagtatgattaagtaacttgtccaggataatacaggtagtaaatggcagaggcaagattcagrctcatgtctgtcagagtcgcacttaaattagattatttatttatgagtgtatactacaagtccaatgttgaaatttatttttgtcactccctctataggatgaatcatttatataatttggtggaaactttattttgctttattttgttttatgaaattattagtcatgaaatgcaagtgaattttagtgccgtattctcatgcctgcttttgcaaaattccagtttggaagtcttctgacatttttacaattaaatttaagttgaaataacacttaaaggaaaagggagggttatagaggattaaaaatgatatagcaaagatgccaaaaaactaataaaaaatgttctatttgtgaaatcagttattataggttatttctttaaaaaatgcgacttaggttttttaaatctgcttagaaattttttggtaggagatattcaaagtatggccaaacataaaactaaattaaaaaaaaatcagtatcacctacttttgaaaacacttatactgttgtggttctgttttttatttattttattttattttattttattttattttattttattttattttattttattttattttatttt

SEQ ID NO: 718596 - DNA, 882 bp, Homo sapiens
ccctgtcactccaactacagtaacatctgccttgtttctgcagccctgtggcctttgccattgccttctcctttcatcacatacataagttaggaacacttgccattctgttgttgaaccatattctcccacctcctgtcactcatactcactcactgcaatgctgtcttccctttgacttcactgaaatttctcctttgatttctcctttcttctctgtaactagaacttccagttttactttcatcccttcctactttttttttttttttttttttgagacggagtcacactctgtcacccagactggagtgcagtggcacaatttcagttcactgcaacctctacctcccaggtttcagcagttcttctgcctcagcctctctagtagctgggaccacacacacccagctaattttgtatttttagtagagatggggtttcaccatgttggccaggctggtctgaaactcctgacctcaggtgatccactcgcctcggcctccctacgtgctgggattacaggcgtgagccaccacrcccagccccttcctagctttctgatggtcatgtttttagtctgtctccttagatctgcccactaagttgttttataaaatctgaaccttaacagataaatccactgcataagtttactgtatccctcctggcctccacaggtctgagtttctgagaccccctaaaccactgactgaagcatgtcctccattgcacagcattggaggccttccagcctgtgctgcttctgcagcttcctacaaacccatacctaggtagatgtgtcagcctttacaggtgttcactcgggactccctttgacttgcccaaccattgacgagttttaagtaggagttagattta

SEQ ID NO: 718597 - DNA, 994 bp, Homo sapiens
aaggagggccttcactattatgatacaagatcaaactcacctgaacttacaaaaagaatgtaaggctgggtgccattgctcatgcctataatcccagcactttgggaggccaaggtaggaggattgcttgagcccaggagtttgggaccagcccaatcaacatagtgagacccccatctctacaaaaaatagaaaaaattaatcccagctacttggcaggctgaggtgggaggatcacttgaacccaggaagttgaggctgcagtgagtcgtggttgtaccactgcactccagcctggccaacagagtgagactctgtctcaaaaaaaaaaaaaaaaaaaggaatttataagattgttaaaacaactttgaatggtggctcacacttgtaatcccagcactttgggaggccgaggcaggcagatcacaaggtcaggagatcaagaccatcctggctaacatggtgaaaacccatctctattaaaaatacaaaaaattagctgggcatggtggcaagcacctgtagtcccagctacttgggaggctgagagaggagaatcgcttgaatccmggaggcggaggttgcagtgagccaagatcgtgccactgcactccagcctgggtgacagagtgagactccatctcaaaaaaaataaaaaataaaaacaactttgaaaacacaagtatgctaatttacatgtattttctctcatttccctctctctgcacagttaacaatgaagtcagcattcacatttctatggctttgaatatatgtctagtgttttgaaagagcagctatttctaagattgtgttttaggatctgataatattgtcagaggcagttaaaccagagcaactccatcttgaataggggctgggtaaaatgaggctgaaaactgggctgcattcccagatggttaaggcattctaagtcacaggatgagatatgaggtcggcacaagatacaggtcataaagaccttgctgataaa

SEQ ID NO: 718598 - DNA, 1022 bp, Homo sapiens
  misc_feature 324, 325, 326, 327, 328, 329, 330, 331, 332, 333, 334, 335,336, 337, 338, 339, 340, 341, 342, 343, 344, 345, 346, 347,348, 349, 350, 351, 352, 353, 354, 355, 356, 357, 358, 359,360, 361, 362, 363, 364, 365, 366, 367, 368, 369, 370: n = A,T,C or G
  misc_feature 371, 372, 373, 374, 375, 376, 377, 378, 379, 380, 381, 382,383, 384, 385, 386, 387, 388, 389, 390, 391, 392, 393, 394,395, 396, 397, 398, 399, 400, 401, 402, 403, 404, 405, 406,407, 408, 409, 410, 411, 412, 413, 414, 415, 416, 417: n = A,T,C or G
  misc_feature 418, 419, 420, 421, 422, 423: n = A,T,C or G
tatatatatatgtgtatatatatgtatgtgtatatatatatatacacacacacatacacatctatatccatataatggatatatatatatagatgtgtgtatacacacacacacacacgcgcgtactgagtaaacagtaaagaacacacgtactgagtaaacagtaaagaaatgcattgattccagaagagggtgatattggagagaggagtgaaacaaacttgaggacttgcaatcattacagatctgaacagacatggaaaatgagcttacattattagacctgagaaaattacaattggtggccaaagttgattctgacannnnnnnnnnnnnnnnnnnnnnnnnnnnnnnnnnnnnnnnnnnnnnnnnnnnnnnnnnnnnnnnnnnnnnnnnnnnnnnnnnnnnnnnnnnnnnnnnnnnttgacattcatatttaccacaatgaagagcaatggtwttgtgtctgtagtgatatatcatttgtttcatatttttaaaataataaataaaatataattttttaaagaaaacatttaaaggccctaagaaatatagaagtccaacagccaaagatcgccaagaacactactgtatttaaagttaggcctagttatgtatcagcagcaaaagcagtaaaaataagtcagaactcagaacaagataccacccaaatatagcaccttaatattttaagtattttaagctgaaggaagctgagaaaaccacagaagcagaaatgtctctctgagcttctcctgttccctctctcctgaagagagcaagcaaacaaacaaacaaaaaaacctggaatttcctttgccccttctccctgaaacagactataaaacgtaggaaggtcactctctgacaatctccctttcttctttcctgaagaacctcatattacaggtgttctgccctatacaggatgggaagaaatgtcacacagagacacagaaaagaatctgaacaaataggcgttgatgagtttttcccagtttattgccattacatcatat

SEQ ID NO: 718599 - DNA, 593 bp, Homo sapiens
gtttaatctgtaagtatatcaaatttatgttttcaaagttaatagaaaaaaattatagaattgattttttagaaattcctgctgcaaatagctatcattattagtgcttaatatagatcatattttttagtaaaataacaaaggtaattggtatgtgttctaaactaaaatcatctaaccttttcgtatagagtttgcctatcagaacataaaaacaaatattcaaacagcagcaacaaccaacaacaacacaaagccagtaaaatacagcaaatatatttaagaaagggcagttatacctgctttagaaagttatttttcggaggggaggagccaagatggccgaataggaacagctccggtctacagctcccagcgtgagcgacgcagaagacgggtgatttctgyatttccatctgaggtaccgggttcatctcactagggagtgccagacagtgggcgcaggtcagtgggtgcacgcaccgtgcgcgagccgaagcagggtgaggcattacctcactcgggaagcgcaaggggtcagggagttccctttcctagtcaaagaaaggggtgagggacggcacctggaaaat

SEQ ID NO: 718600 - DNA, 631 bp, Homo sapiens
aggatcagaatgaaaaagttcagtgttatctaatgttgtcccaagcagtgttattgctttcaccctcactgccaaagccaatcagtgtaaaagcaataattcctaatggaagggaggcagaggcttggcaacattgatcaycagagttaaggagggcatagcagcagagcagcatggcacaatgtaacacttggtttttaagagactttccttaagagtgtctctttattttaaataccttagaggcaccatggccttttataaaaagctacccatcacagaataaacaccagctctcttgacgtgatttactgaaagtcaactcttgattcaaacttgtttgaaaatagaaatggagaaaacacactgaatgaatccgtggctgatggctccacagtaggatactaaaggacaagagtgtccagggtgcatttcaaacccttgagcgtaaagtcatggagaactatggaggcttctatcttctcttgcgtctctaaatgcagctttatagatatatccctagaatttcatgcttataagggataatctagaccactctttcattataaatggaactaaggcccagaaagataaatttatagaagggcacacatctaaattgagtctagat

SEQ ID NO: 718601 - DNA, 580 bp, Homo sapiens
ctttgctgaagaaagaaaatttaatttcctttggctgagactaatcgtcctatgctaaacaattcctagcaactaattatgcacaattgaggcacctgctaagccagcagacccccttaacatcttgattaggaaaaaataaggcatttggtgcagttaaacattatgaccatttcccagcagagaggagacaggcagggcatgccacagtgttcatgcatgtccttacaaacttgaaagaaaagtctggtttccattaatgaacaaaataaaatccgctgtggatgaaacaatctgtcccttgaattcaattaaatgccacacaatttagtacctactatgtgcaaactaagactaaaaatacacaaaagataatgacaccttcagtggagtggtgatggcagaatcattactmcctacatttgagactagaacatggtactggattacccgacggggtgagtgagcatgggcttagggttaggtggaggtgaagcacaggatgagaaagggagatccaccattaggaatttatctatggttttttaatcagaaaagtcaagaaacaagccattttagg

SEQ ID NO: 718602 - DNA, 602 bp, Homo sapiens
tgtagggtagcaaagaagtagtaagaggctactcatagagtacagtagtcttattcctttttaatttgttgtggccaactatttctgccacacctgtgaggaactgaaaggtttatctactgttcgttttgggggtttcattcacttctcccctagtccctaatttctccacagagaatgctagcttctagcattatttgcaggaaaaacaattaaccacattactaaaataaagatgaataatgtaatttccaacgtcatctaacaattatagattaatactatactatccatttagacagtcccttaattttatggatctattttgtgaaataaatgtttgctttcaaatttttttttcaacacagagaatttgaatttggtaaaatgarttagaatgtcacaatttgagtaaagaaatggaaaaggatgaaagagacttttactttcctttttatttatttcccttttctaagaggagtccctcctgacatttcagaagctgtatattgtctggtgtttgtaaacaaatgggaattaaatgccagctccatgccacattatattaactgaaagtaaaatcagtttaatttttttccaat

SEQ ID NO: 718603 - DNA, 1100 bp, Homo sapiens
aagaattaccccatggtctgctttacatatataataactcagtatgttgtaatgtcataaaaggaaattatttgtaatttaagttaaatcatttatcaattttttccttgatttttatatgatttcatataattttgtgtaattcaaatttgtaaaataagaagtgagattacaaacactgaaataatatcagaacataatattcctacttttatgtataggtttaccatttgtctctcattatctttctgtttctatttatgcttacttccctactgtatctgtgtagttatcattctctacatgaagagccaacatttgtattacaattaatagaaacttaagtaatatacttggagaaaaatgtgatttattcttattcgtctaaaagtagaaaagaaaaaggaaaagatgagaaattacattgtcagtgggatagaaaagggtcatgggagggaaactggtcatacaaaatcctgaggacagctgattaaataaaatctcttcagtttaatccattgtcctcctatgctcacttttaaggatgagagaaatcggtctcttgttagaaaccatttgccatgtgacatggctgggtttaagtactattctttcactcacgcgtttttaagctcacatattgtcattttcttaatagtatttttataatttctttttattttatattatattatatttttattattatactctaagttttagggtacatgtgtacaatgtgaaagttagttacatatgtatacatgtgacatgctggtgcactgcacccactaactcgtcatctagcattaggtatatctcccaatgctatcactgccccctccccccaccccacaacagtccccagagtgtgatattccccttcctgtgtccatgtgttctcattgttcaattcccacctatgagtgagaatatgyggtgtttggttttttgttcttgcgatagtttacatagaatgatgatttccaatttcatccatgtccctacaaaggacatgaactcatcattttttatggctgcatagtattccatggtgtatatgtgccacattttcttaatccagtctatcattgctggac

SEQ ID NO: 718604 - DNA, 1017 bp, Homo sapiens
tgacgcacactctgtgtgatccaggaactacttgcagctccctgcaatgtctgtgcagcttctgacctgtgtgtttttgctccagctgttccttcatcctcaccctcattccgcaggactcagctcaggcctcagctcctccaggaagcatttcctgtcatctgggatagtctagctattcattctcagcactcctatgataccctgcagcagctgctgctctttaacattgctccccaactctttcttcatgatgtgtctcatccttgggggcagaggcagtttcttactcatctgcgtatacccagttcctattacataatgtatgccaaataaatgtctactgaatgaataaaacgagaaaccagtaatgacaagcacagacccactaaggccaccttctttctgagttcctcctcagtcccaagaacccctgccaaattctaggtaatgaccccgggtaattacatcaatttgccatacactaaaaattactctaatttaaacttcactaatttggctggcctttccaagtcagttttaattaatgatgttctctctgttgagatatttcacatagagtrttttctggactgaattattctgtgtgcctcagttctctgccactttccatgggaagagctttgtatagtaaatgacaaagtttataatatttttaaaagttcctgttgaagatatttctcagcagaatagtatagccacctgttttcactcaatcataactcctttcctcagccaagcttttttaagcttggtcccagtcctgtttttgtttttttttttctttaggaagaatttgagaaaaaaattaaattgccattctggagtaagagaagattgaaaattattaaaacatacttcacattgaaggtgtaactgcttttggctcagaataaccaacatatttcaaaaatgtattcaaactacatttaatttagtatctagcttagtctccctcacgaaatcactgtctaactggcttaaagcaaaataaaa

SEQ ID NO: 718605 - DNA, 1907 bp, Homo sapiens
ccgggcgtggtggcgggcgcctgtattcccagctactggggaggctgaggcaggagaatggcatgaacctgggaggcagagcttgcagtgagccgagatcgcgccactgcactccagcctgggaggcagacggagactccatctcaaaaaaaaaaaagagagagcggacagtaatagctcggggattatttaggtttgatatcagtttgaacttccttacattaccgtgaggaagggaggttttggagttcagaatgtattaatacattcttcagagacttttaaggaaaaggcaaattgtgatttttttctgacacggtttaagttctgtctacattagttctaggcttgtaagtattgtatgacctttgactcaattcagttctggatataatttagtttaggccctgtgactaagctgttttatatggcttatctaagagctaccgagataaaggatttacataagtatagtctttcattctaatgttggactctggtaatacttctcagtatgccaataaaccttatttcccgttcccctgccttcttttctttagtattaatgatagccactaggttgggtgcagatctcaaggccgttctctactggatgagattctctccaagtctcagatgagaaacttccataaatcctttccctaggcttccataaccctatggttacacctaacccatgtcctcaaatcccatattagcattacatgcaaatgacagcactggggagaagcagggagtgaatcagagcctgttgatggctctgttttgattacagccatgggtttgcttaagaaagatattgtgccttcattgtgactggcatcaaaggtawgtgaagatactacctaagctaggtgtgagaagcccaaatacattattactaatgattttcataagggctaaagagtttaggccaaaaataattaaagagaacaatagtgctgtcaataaaactcctcaataatgagatagtaattaatggacgaatggcctcattgttctttttggctctaggcattaagcatctcattttaaaagttgtggtaagtagtgcaatattgctcatttatatttttatttagtactgttaatttatttcactttttatttaatcttaaatcttttattttaatataaaaattggaatgatcctctcctttccccccattataaactttacaagcaagagtggttttggtgctttggaactttctcagttcactccctatgataggtcctgtaatcaggctcttactacatgttttgatggtgttattgatgatcatgatgagtttcaggtgcgtttttgttgcctaataatacagattctctggtgttctctatgacttcattgtatggggtcagcctggccagttctcctcatggccctttctccctttaagccccagaagccatcgggaaaagcctttcaccttattttttcagcaaagcctgcaggatgccatggggggatactcttacaggactattctaggcagcaagttttcttcatacagtggttcagagattttggataagcaataagaatggttctgctgggcccactggtcataacttgtctaattaatgcatgtcccattacttttgatatgtctcccttctccccaggaaacatcagatgcttgcaaaccattttccatatcacagagcaccgggccctggaatctttcttgggccccttcttaagactagattgctcaaagagttgtaggccaaggaatgaatgtatcctgtgttgcacaaaatacatttagatatttatcaagacttaatttaatgaacttttcctcccttgctccaactttactttgtaaccctcctcctgaagaaaaggtgccaacattccactttaagtctaagctgaa

SEQ ID NO: 718606 - DNA, 923 bp, Homo sapiens
gatgaaaggcataccatcctgtgaatgaataaactgtagacaagtccatagagatagaaacttcaaactagaatggcccttatagttttacagattagcagccaactgttgtcctactggttgaatttgggctatagatattttgtctggcttacaccttgttaaaatacagaattagtagtcgttgcttaataactgagctattacatatgaaaacgtatatgtctagggtccctggaaaaaatcagatgcaacattgggtttttggtggatgctaaataacagccactgccttatgatggggcaggaactcttccattttgttccagtcctcacctggccactkcgttgtgtcacctgtttggttcggttcttgaaggcacttccggtttgcaatccttagaacaagctccctacttttctgcctcccttttgtgttaaataacagatatgaatattgaaacctgggatgggaagtgacttgtacacagtggcaaggcgggtactcaagtcaagactcctgactcccagttccccacaaggagttagtcagcctagagaaaataacgtctccactgcctgaaacacagtgtaatttacatcacacttataaattcaagggaaaattatctgatcactgcagaacattgagacactagaaactgaaaattgaatttcgagctcagaaataagggaaatgagaaaaaaaaacaaaaagaatgaaagagaacaaagaatcagatatcttttaaattttagaagctttaattaaaactctcgaaattcttattcttagagaaagataagaaatcattttttaagggagaagattgttacacagattgctaaataaatataccatgtaccttggaaagctgcaataattagatttggctgaattaaactaacctgaaagttgagga

SEQ ID NO: 718607 - DNA, 839 bp, Homo sapiens
gtgagtcctggcgctcagcttcattcactaatcagttgtcagttggcaacttgattacagataacttcagtgtgagtcaggctcgtttgccacagctgtttcccttaaaagttctctgataagtcattgccaccactacttccaaatagcgtatgttaactttgagttaattttagataacctcgggttaatttaaacaattttggcaccaacaacatgtttaggctaggcagcatggatgggtataggaatccgtcaatctgggttgctgtgtaccagctctgggactgggggcaagttgtagcagccctgagcctsctgcttcacctgtatcaggggaggctgagacccaccttgcaggggtcttgtgaagattaaatgcaatgctgtgtgaatggtgcctaccttcgtgcctggtctgtcaagaccaggcagtttacacaaaaacacttgatattgactatgaaacaagatccagaagagaacaaatataaatacagatggatcagctaaatgaaggactgccgagtaaaaacacaaagaggatgtttgtgagtggagggggatggatctccttctccacccagcagtgaatatcatgggaatctctctctacctgaatctacctcttataattcttaaattaagaaccattagaactcttctaagctttctaaatactcattacagtatgaaaccctgcccacctcccagacaacttcctatggacattcgattttttaaacataggatatgttaagtgatggtcttcattcctcgatgtcacattttaaatttgtattactttttcttcattttccaaagctccagctcagcat

SEQ ID NO: 718608 - DNA, 839 bp, Homo sapiens
gtgagtcctggcgctcagcttcattcactaatcagttgtcagttggcaacttgattacagataacttcagtgtgagtcaggctcgtttgccacagctgtttcccttaaaagttctctgataagtcattgccaccactacttccaaatagcgtatgttaactttgagttaattttagataacctcgggttaatttaaacaattttggcaccaacaacatgtttaggctaggcagcatggatgggtataggaatccgtcaatctgggttgctgtgtaccagctctgggactgggggcaagttgtagcagccctgagcctcctgcttcacctgtatcaggggaggctgagacccaccttgcaggggtcttgtgaagattaaatgcaatgctgtgtgaatggtgcctaccttcgtgcctggtctgtcaagaccaggcagtttacacaaaaacacttgatattgactatgaaacaagatccrgaagagaacaaatataaatacagatggatcagctaaatgaaggactgccgagtaaaaacacaaagaggatgtttgtgagtggagggggatggatctccttctccacccagcagtgaatatcatgggaatctctctctacctgaatctacctcttataattcttaaattaagaaccattagaactcttctaagctttctaaatactcattacagtatgaaaccctgcccacctcccagacaacttcctatggacattcgattttttaaacataggatatgttaagtgatggtcttcattcctcgatgtcacattttaaatttgtattactttttcttcattttccaaagctccagctcagcat

SEQ ID NO: 718609 - DNA, 839 bp, Homo sapiens
gtgagtcctggcgctcagcttcattcactaatcagttgtcagttggcaacttgattacagataacttcagtgtgagtcaggctcgtttgccacagctgtttcccttaaaagttctctgataagtcattgccaccactacttccaaatagcgtatgttaactttgagttaattttagataacctcgggttaatttaaacaattttggcaccaacaacatgtttaggctaggcagcatggatgggtataggaatccgtcaatctgggttgctgtgtaccagctctgggactgggggcaagttgtagcagccctgagcctcctgcttcacctgtatcaggggaggctgagacccaccttgcaggggtcttgtgaagattaaatgcaatgctgtgtgaatggtgcctaccttcgtgcctggtctgtcaagaccaggcagtttacacaaaaacacttgatattgactatgaaacaagatccagaagagaacaaatataaatacagatggatcagctaaatgaaggactgccgagtaaaaacacaaagaggatgtttgtgagtggagggggatggatctccttcyccacccagcagtgaatatcatgggaatctctctctacctgaatctacctcttataattcttaaattaagaaccattagaactcttctaagctttctaaatactcattacagtatgaaaccctgcccacctcccagacaacttcctatggacattcgattttttaaacataggatatgttaagtgatggtcttcattcctcgatgtcacattttaaatttgtattactttttcttcattttccaaagctccagctcagcat

SEQ ID NO: 718610 - DNA, 675 bp, Homo sapiens
ttgttagcgcccctgtgaccttcatgaagagagggtcttccttaccctccggtgtgaggaccgcacctccggacgctccaaactgtaggctcatctcccaagagcttctccaaccacggttgtgttggagcttacctaacttttattttcttaaatgcaggaatatgcacatggaatttgtttgtttgttttttgagatggtttcrctcttgtggtccaggctggagtgcagtggtgcgatctcggctcactgcaacctctgcctcctgggttcaagtgattctcctgcctcagcctccctgagttgctgggattacaggtgtgtaccaccatgcctggctattttttttttaaagtagagatggggtttcaccatattggccaggctggtctcaaattcctgacctcagataatccaccaccctcggcctcccaaagtgcttcggcctgggatggagtttttaaactttagtgacctgagcacggagcctccgtgggcccctgctgtgctctgcagcattccctgtgagctggcgggctccttcctcactgcgggtgctacagaagcagaggggtcacagaggcaagccctgcagagagagcggctcccctcgccggcagccctgtagagatgagcagggggtttacacaaacaacgtgctcccataggtggct

SEQ ID NO: 718611 - DNA, 1626 bp, Homo sapiens
  misc_feature 1573: n = A,T,C or G
tgggaataaacaagattgcctcttttttttttttgagacggagtcttgctctgtcacccaggttggagtgcagtggcgcgatctgagctcactgcaacctccacckcccgggttcacacctttctcctgcctcagcctcccaagtagctgggactacaggcgcctgccaccacgcccggctaatttttttgtatttttagtagagacggggtttcaccgtgttagccaggatggtctcgatctcctgacctcgtgatccaccagcctcggcctcccaaagtgctaggattacaggcgtgagccactgcgcccggccacaagattgcctcttatttcttctctcaattccttcacaaaaattgtcccttcttagaaattttaaaatgagaatcctttcagaataggtttttgcttattctgttatgagagaaaatgctgaagaccgtctgaaggaattaatggaaacatactatgctcacaatcatccttaacagcttttctttttaattaagtgattatgttggcacttaaacgaggcctaccatgcaagaaaaagactgaaacaatatcaaaacaaacctgggttttctttagtgagtggtgtatttagtatacattaactgatttaagagagaagtaaaagttaagtgagctttcccccggaacaacacagatgaccaatgaccctgaggcaacttgccttatggaagagtgtcccttctcctgatgtacggattgcctagtaaccattgtgcacgtacagcatcgtggggaggggcttcaaagtacgtccaggctacagagcaaaaaagccttcttaacctagaaacaaataaaaataacaatcataggaaaattccttaaaataataatcatagctgtctgcatagtctaccttttgatgaatgtaaacttcagtgctttacaataaatctatagagcagagaaagaactcagatcaactcttacagaaaataatcttgttacatatgttcatctccaataaatactatttagtttcaggcttttccccccaaaatgcagctatttgagaaagagcaaataaaaaaaataataaatcacatatttggaatttggatgcaagcatagattcttcattttcctctattgagaatacagtttcagacttgctttatctgaattactttttaaccgacaccataagtcacctgcactttctaaacaggacttaaatgagaatacgtgtgcatgaaatataataggtggcctgggttaaaataaaatctatgacaactaaaaggagactgtgtctttaaatgcattttcttcatgtgccctaaaggcatcaagtcaatcactttgaaattgttattcctttatgcatacaccgaactagataaaacattaacaacagccttgccaggttccccatgtgaattctgaataaactctctccacaactaaaagaaaagggatctttcttcgtgtcaattaaattccagctctgttaattccaacaaagttaaggacacaaagtgacttccacataaaactctaggaattacatattgggagaactactacctcatcncctgacggtgggtgagcatcacttaaaccttcagacaagaaaaggtcgggcca

SEQ ID NO: 718612 - DNA, 1626 bp, Homo sapiens
  misc_feature 1573: n = A,T,C or G
tgggaataaacaagattgcctcttttttttttttgagacggagtcttgctctgtcacccaggttggagtgcagtggcgcgatctgagctcactgcaacctccacctcccgggttcacacctttctcctgcctcagcctcccaagtagctgggactacaggcgcctgccaccacgcccggctaatttttttgtatttttagtagagacggggtttcaccgygttagccaggatggtctcgatctcctgacctcgtgatccaccagcctcggcctcccaaagtgctaggattacaggcgtgagccactgcgcccggccacaagattgcctcttatttcttctctcaattccttcacaaaaattgtcccttcttagaaattttaaaatgagaatcctttcagaataggtttttgcttattctgttatgagagaaaatgctgaagaccgtctgaaggaattaatggaaacatactatgctcacaatcatccttaacagcttttctttttaattaagtgattatgttggcacttaaacgaggcctaccatgcaagaaaaagactgaaacaatatcaaaacaaacctgggttttctttagtgagtggtgtatttagtatacattaactgatttaagagagaagtaaaagttaagtgagctttcccccggaacaacacagatgaccaatgaccctgaggcaacttgccttatggaagagtgtcccttctcctgatgtacggattgcctagtaaccattgtgcacgtacagcatcgtggggaggggcttcaaagtacgtccaggctacagagcaaaaaagccttcttaacctagaaacaaataaaaataacaatcataggaaaattccttaaaataataatcatagctgtctgcatagtctaccttttgatgaatgtaaacttcagtgctttacaataaatctatagagcagagaaagaactcagatcaactcttacagaaaataatcttgttacatatgttcatctccaataaatactatttagtttcaggcttttccccccaaaatgcagctatttgagaaagagcaaataaaaaaaataataaatcacatatttggaatttggatgcaagcatagattcttcattttcctctattgagaatacagtttcagacttgctttatctgaattactttttaaccgacaccataagtcacctgcactttctaaacaggacttaaatgagaatacgtgtgcatgaaatataataggtggcctgggttaaaataaaatctatgacaactaaaaggagactgtgtctttaaatgcattttcttcatgtgccctaaaggcatcaagtcaatcactttgaaattgttattcctttatgcatacaccgaactagataaaacattaacaacagccttgccaggttccccatgtgaattctgaataaactctctccacaactaaaagaaaagggatctttcttcgtgtcaattaaattccagctctgttaattccaacaaagttaaggacacaaagtgacttccacataaaactctaggaattacatattgggagaactactacctcatcncctgacggtgggtgagcatcacttaaaccttcagacaagaaaaggtcgggcca

SEQ ID NO: 718613 - DNA, 1626 bp, Homo sapiens
  misc_feature 1573: n = A,T,C or G
tgggaataaacaagattgcctcttttttttttttgagacggagtcttgctctgtcacccaggttggagtgcagtggcgcgatctgagctcactgcaacctccacctcccgggttcacacctttctcctgcctcagcctcccaagtagctgggactacaggcgcctgccaccacgcccggctaatttttttgtatttttagtagagacggggtttcaccgtgttagccaggatggtctcgatctcctgacctcgtgatccaccagcctcggcctcccaaagtgctaggattacaggcgtgagccacygcgcccggccacaagattgcctcttatttcttctctcaattccttcacaaaaattgtcccttcttagaaattttaaaatgagaatcctttcagaataggtttttgcttattctgttatgagagaaaatgctgaagaccgtctgaaggaattaatggaaacatactatgctcacaatcatccttaacagcttttctttttaattaagtgattatgttggcacttaaacgaggcctaccatgcaagaaaaagactgaaacaatatcaaaacaaacctgggttttctttagtgagtggtgtatttagtatacattaactgatttaagagagaagtaaaagttaagtgagctttcccccggaacaacacagatgaccaatgaccctgaggcaacttgccttatggaagagtgtcccttctcctgatgtacggattgcctagtaaccattgtgcacgtacagcatcgtggggaggggcttcaaagtacgtccaggctacagagcaaaaaagccttcttaacctagaaacaaataaaaataacaatcataggaaaattccttaaaataataatcatagctgtctgcatagtctaccttttgatgaatgtaaacttcagtgctttacaataaatctatagagcagagaaagaactcagatcaactcttacagaaaataatcttgttacatatgttcatctccaataaatactatttagtttcaggcttttccccccaaaatgcagctatttgagaaagagcaaataaaaaaaataataaatcacatatttggaatttggatgcaagcatagattcttcattttcctctattgagaatacagtttcagacttgctttatctgaattactttttaaccgacaccataagtcacctgcactttctaaacaggacttaaatgagaatacgtgtgcatgaaatataataggtggcctgggttaaaataaaatctatgacaactaaaaggagactgtgtctttaaatgcattttcttcatgtgccctaaaggcatcaagtcaatcactttgaaattgttattcctttatgcatacaccgaactagataaaacattaacaacagccttgccaggttccccatgtgaattctgaataaactctctccacaactaaaagaaaagggatctttcttcgtgtcaattaaattccagctctgttaattccaacaaagttaaggacacaaagtgacttccacataaaactctaggaattacatattgggagaactactacctcatcncctgacggtgggtgagcatcacttaaaccttcagacaagaaaaggtcgggcca

SEQ ID NO: 718614 - DNA, 1201 bp, Homo sapiens
gtttactttttttttttcattaccaaagtggtatgagctcattgtaagaaattcaaacaataaaaaaaagtatttgtcttgaagcattaagtggtaccttggtattttaagttttgaatctgagtaaacagtactgtggttacatgattcatatctttaagatttgtttacttgctggatgatctacactacagtggttaaaagcatatgctctggaatagttttgggtttgaatccttgcttttccttttctacctctgagagattggagaagttacttaacttcactgcgcctcagttttctcatctgtgaaatgaggataataatagtgtttacctgcctaggttgttatcagcattgagtgagatcatacatataaagtgattagaatagtcttacacatagtaaacactaagtaaatgtcagccattgttgttgttgctattgacccttctagctatttttgtaagctaaagaggttccttacctttttagtctttcctaaaacatcaattgcttctctcttttgactattttaattgctcttctctggaccatttccagatctactaatatctctcttagggtttcattaccacatgtgcacaaagtatcctaggttacttgtgtgaggttaatatgattattcatttcaaatagccttcctagctgggcacggtggctcacgcttgtaatcccagcactttgagaggctgaggcgggcagatcacttgaggtcaggagttcaagaccagcctagccaacatggtgaaaccccatctctactaaaaacacaaaaattagctaggtgtggtggcrcatgcagtaatcccagctactcgggaggctgagcaagagaatcacttgaacctgggaggcagaggttgcagtgagccaagatcgcaccactgtactccagtctgggcaacagagcgagactccatctcaaaaaaaaaaaaaaaatcaaatagccttcctaatgacactgcaaatcttatttgctttttgagcacattgggttggtctgttcagaaaataaagtgaaactgatccaatattcccatagactgttctttttgataaatgtagaaattgacccttctagtcttaaagcttgaaacttacatttgtttgatctgagttccttcctcaggaaaggaccttcaggcctctcaaaaaaaagcatcaaagaactgaaat

SEQ ID NO: 718615 - DNA, 1479 bp, Homo sapiens
tgtgctttgactgaaagccttcccacatttattgcataaatatggcttccccctactgtggattctctggtgcaggacaaggtttgagcttcccttaaaagccttcccacactctttgcactcatagggattcccaccactgtgaatttgcttatgtctcmccagattggagctctgattgaagtcttttccacattcatgacatatataaggtttctttcctgtatgaattctctgatgtataataagatttgaactttgattagagtctttcccacattcattacacacatatggcttatttcctgtatgaattctctgatgtatgatcaggtttgaactcctgttgaaggttttttcacattccttacattcataggtcttatttatattatgaattttctgatgttcagttaatcctgacttctgtttgaagttttggccactaacctcatatctatgggagctttctcctgcagaaagtattttttctccttcattacatccatggccaatctctcccacaatggctttctgggggataatatgcatttccctgataccgctctcttgggaagggagatgtctcattgcatcctttaaagggcttacccagtgcttcaataatctgtcctcagaattactggtttcaactaactcacattcctgggtgatttgtctttggagtttttcggatgcagcccttgctgacttcttttcttcagaaatttccatctttgatttccattccttcatcttattcctgtcttcagaatctgaaatgataagtagatcattctataattcctaaaatacaaatatcatctcttcattatactgggcagtctaagagggaggaacaaagaactcagaagacctttccctgccaaagctgagatgtggctttcactagcgacactgtggctaacacaggaacctgtgctaccacataccctgttggtgaaaaaacccgccagggtgcaggctggagctgggctgtgggagtggcctaaagggtggtgaattaattcactgggggaggagggcaatctggagttggtccacaggaagtggcctgttggatgggggaggaacttgctggatggtgtggctgggcctgaactggttcacaggaagcaacccactagggtaaatgccaccaggcctcccacaagttgatctgctagcagccacataagtaaataattaaaataaataaataaaaatagaacagcacaccggtaccaggaagttagtttctcttcccatggccacgcattgtccctccagcatcctctgttgacaaagtcaaatcttgtacgaactggcaaaggagaaatgtttacagaatccagctttgtaacaaaagcaaacaaagatgggtggatctggagttgagaggcaataaattaataaccagcatactgctctttcctccctatatatcatgatagttaagcaaatctgtactatgcctca

SEQ ID NO: 718616 - DNA, 1479 bp, Homo sapiens
tgtgctttgactgaaagccttcccacatttattgcataaatatggcttccccctactgtggattctctggtgcaggacaaggtttgagcttcccttaaaagccttcccacactctttgcactcatagggattcccaccactgtgaatttgcttatgtctcaccagattggagctctgattgaagtcttttccacattcatgacatatataaggtttctttcctgtatgaattctctgatgtataataagatttgaactttgattagagtctttcccacattcattacacacatatggcttatttcctgtatgaattctctgatgtatgatcaggtttgaactcctgttgaaggttttttcacattccttacattcataggtcttatttatattatgaattttctgatgttcagttaatcctgacttctgtttgaagttttggccactaacctcatatctatgggagctttctcctgcagaaagtattttttctccttcattacatccatggccaatctctcccacaatggctttctgggggataatatgcatttccctgataccgctctcttgggaagggagatgtctcattgcatcctttaaagggcttacccagtgcttcaataatctgtcctcagaattactggtttcaactaactcacattcctgggtgatttgtctttggagtttttcggatgcagcccttgctgacttcttttcttcagaaatttccatctttgatttccattccttcatcttattcctgtcttcagaatctgaaatgataagtagatcattctataattcctaaaatacaaatatcatctcttcattatactgggcagtctaagagggaggaacaaagaactcagaagacctttccctgccaaagctgagatgtggctttcactagcgacactgtggctawcacaggaacctgtgctaccacataccctgttggtgaaaaaacccgccagggtgcaggctggagctgggctgtgggagtggcctaaagggtggtgaattaattcactgggggaggagggcaatctggagttggtccacaggaagtggcctgttggatgggggaggaacttgctggatggtgtggctgggcctgaactggttcacaggaagcaacccactagggtaaatgccaccaggcctcccacaagttgatctgctagcagccacataagtaaataattaaaataaataaataaaaatagaacagcacaccggtaccaggaagttagtttctcttcccatggccacgcattgtccctccagcatcctctgttgacaaagtcaaatcttgtacgaactggcaaaggagaaatgtttacagaatccagctttgtaacaaaagcaaacaaagatgggtggatctggagttgagaggcaataaattaataaccagcatactgctctttcctccctatatatcatgatagttaagcaaatctgtactatgcctca

SEQ ID NO: 718617 - DNA, 527 bp, Homo sapiens
aaaggagagagctcaggtacatacacagagaattaaacagtgcttaccatggtcaggggttggggggaagaaatggggggatatagatcaaaggayacaaaatagatatctaggatcaacaaggccagagatctaatacagaacatgaggactaaagttaacaaaattatatttatcagggagttttgttaagtaattagattttaactgctcttgtcacacacacaaaaaaggtaactcttttactatttgtgtcctataacatcatgttgtgaatctcaaatatgtgaaataaaatttattgaagaaaatttaaaaggctgggcatagtgactcactcttgtaatcccagcactttgggaggctgagaggggtggatcgcttgaagccaggagttcgagaccagcctggccaacatggtgaaaccctgtgtctactaaaaatacaaaaattagccaggcgtagtggtgcacatttgtgatctcagctacttgggaggctgaggcaggagaattgcttgaacccag

SEQ ID NO: 718618 - DNA, 527 bp, Homo sapiens
aaaggagagagctcaggtacatacacagagaattaaacagtgcttaccatggtcaggggttggggggaagaaatggggggatatagatcaaaggatacaaaatagatatctaggatcaacaaggycagagatctaatacagaacatgaggactaaagttaacaaaattatatttatcagggagttttgttaagtaattagattttaactgctcttgtcacacacacaaaaaaggtaactcttttactatttgtgtcctataacatcatgttgtgaatctcaaatatgtgaaataaaatttattgaagaaaatttaaaaggctgggcatagtgactcactcttgtaatcccagcactttgggaggctgagaggggtggatcgcttgaagccaggagttcgagaccagcctggccaacatggtgaaaccctgtgtctactaaaaatacaaaaattagccaggcgtagtggtgcacatttgtgatctcagctacttgggaggctgaggcaggagaattgcttgaacccag

SEQ ID NO: 718619 - DNA, 619 bp, Homo sapiens
tgggtttttgggagacattttctcaaaaaaatgagattctgtcatttcaagaaaaacaacaggcaggccataataaaattcaataataaaattgctaataataaaattcaagcttttgaacaaaaaattagttttagaaaacttatatccaccatagctttccaaaagtattctgatgagattgatggtgatattgatgaatgtattttgatattgtataatcaaacgtatcaacatgtagaagatcttgaaccattattttctaaatgaccaatgcatgatgttgtaatatcatgcaaaggtaaaagatccaaagttcaagaaaaaccaagttttgatggagtatcaaaaaagaagcctaggcaacatggcaaaaccctgtctctacaaaaagatacaaaaaattagccaggtgtggtgatacacacctgtagtcccaactactctggaggctgaggtgggaggatcacctgagtccccggagactaaggctgcagtgagctgtgatcacaccgctgcattccagcctgggcaacacagcaagaccccatctcaaaaaaaattaaaaaaaaawatatatatatatctccacaatgatctaaaatggctatctgtataa

SEQ ID NO: 718620 - DNA, 1031 bp, Homo sapiens
cctccaaacaaaccacctctgccagcctctggctcttaaataacaatcatcatcatccagaaatttaaggactcagccctggtcaaggcggcaaagggtctgtctttccccattagacagaggtcttgtgtggctaccctaattgtaaaggggtgcctgggaaggggtggtagggtcatggtggcagtggaggctccagccctacttctccaggctttgctgacagaggcctgcttttaatttttgtttttatcccatgactttttttaaaatcccgtaacttctttttcataactttttttgtaacttttcataaaatttttttctacttttttgccacaacttttttacattttttatcccataactttttcactctgtaacattttttaatcccgtaacttttttattttgtgttcttttaacaaacacttgcatagctatattacaattttgtaaaaatgaaacagattatctcatgccaagcgtgcccagcatttgcacactatcaacacctttaatactatagtttttcaagacatgcaaaacaaaattttaagtcaaaaacagcgctttgcaacatttaataatttattacattacagtagcatcacactagcagtcaataatgccactttaggcaaaagtttttcagtatttccattataccttctgtttacaagaattcataaattggtaaaaytcattctaagaaaacttggcaaataaagctttggactggaattggcatttctttctctacttttcctttccaccatttctttcttttaaactatagcattcatattttaaaatgttttatttcagaactttaagatagcagttacattttttaatagttacattatttttaaatgactctttaagataaagttttagagaaactgtattatggatagggctgatttacattttcaaattttctaaaaatcagctttggttttagaactgatttctttttttcatttctggaaaacctatcaggtttaatcaaatactttaaaaataat

SEQ ID NO: 718621 - DNA, 1008 bp, Homo sapiens
tacctgttttaatcacatgaccacatgtcccagtacacaaaagagtgctggctggcattcttcttatttagtaaagatcataagaaatcctttaggagtttaaatgtccctggaacaggcatacaggctctagtcaagaatgaattagagtgaaggaaagcttgtgacacctggcattcctctctgttcatggagcttctttgaggcttgaagattgatttttaccatctagacctctgtggctaatacctattcttcaaccaccttgcttactctgacataggaatttacttcttttccttgaatggaaaacactttaaaaaataataacaaacattattataaactaatataagtgagagtacttagttgaaataaaaaggagttttagtagacagtattttatagacagcatattatatttgaaaatcaaggagaagtttatgcaatttaaaatgtttataaactgcagtgcaatctactgtttgtgaatgtcaatgtattatcaggaaatgtgtctatayaatcacagagttatatttcctgacaaacttgtttactaagagtgaaatatgtttttgtacctctcggtttcagttagggacatattttgtgcaatatttatgtgattgtgcctatgcatgatgaacaaatgatttcagtcatacattgcctaaatcataacttgatgatgcttgggaaagactcaacagttcaaacttcatgaagttctaatgtctgtgttccaaaacacatcacattattaggatgtagggagatgtgtatgtgcgctccctggggtggggatttctagttactagaccatctccatttttagcatttggcgtcctcatgatacttttctaaatatgacattaacaggagagcaacaatatgattttaccgatggaataacagatttgcctgcattcactgaaagagcgcaaatattgggtccttgtgacttcaactgactcttccaaattgtatgaatgtatcaatgtatta

SEQ ID NO: 718622 - DNA, 1008 bp, Homo sapiens
tacctgttttaatcacatgaccacatgtcccagtacacaaaagagtgctggctggcattcttcttatttagtaaagatcataagaaatcctttaggagtttaaatgtccctggaacaggcatacaggctctagtcaagaatgaattagagtgaaggaaagcttgtgacacctggcattcctctctgttcatggagcttctttgaggcttgaagattgatttttaccatctagacctctgtggctaatacctattcttcaaccaccttgcttactctgacataggaatttacttcttttccttgaatggaaaacactttaaaaaataataacaaacattattataaactaatataagtgagagtacttagttgaaataaaaaggagttttagtagacagtattttatagacagcatattatatttgaaaatcaaggagaagtttatgcaatttaaaatgtttataaactgcagtgcaatctactgtttgtgaatgtcaatgtattatcaggaaatgtgtctatataatcacagagttatatttcctgacaaacttgtttactaagagtgaaatatgtttttgtacctctcggtttcagttagggacatattttgtgcaatatttatgtgattgtgcctatgcatgatgaacaaatgatttcagtcatacattgcctaaatcataacttgatgatgcttgggaaagactcaacagttcaaacttcatgaagttctaatgtctgtgttccaaaacacatcacattattaggatgtagggagatgtgtatgtgcgctccctggggtggggatttctagttactagaccatctccatttttagcatttggcgtcctcatgatacttttctaaatatgacattaacaggagagcaacaatatgattttaccgatggaataacagatttgcctgcattcactgmaagagcgcaaatattgggtccttgtgacttcaactgactcttccaaattgtatgaatgtatcaatgtatta

SEQ ID NO: 718623 - DNA, 603 bp, Homo sapiens
atttttcattcccctctagactctgaaaacttgaaggaaagaggctatatcggatttattatttaattctcacagactttggcactttagggacatctgaaaaactttgttgaatgaataaattgttttattccatggatggggacaagaaagtctctattttgtttacttcattcatttaacaaatagtgtttgaacctgtagcaggakaaaggcacttggttagatctgggtggcagggaacaaaaaggagccaggtcaaactttcacaaaaactagatttaaatgagaaaagtaaacatttaccgaatactcacatcaataactgtttaacatcaaactttggtaaatactgcaaagaaaaatgaaagagtgaggcacaagatataaagagggagtgataccttacttagattatggagaggcaggcaaggaaggcctctttgaagagctcatttgaaataagctttaaaaaaataatttggaattaactggggtggggtggtggatagggaaaagagagagagagagaagacaggtgggaggagaaaatgtgttgagaggagaaatttcataatttaatgaagaagggatataatttga

SEQ ID NO: 718624 - DNA, 984 bp, Homo sapiens
cgaccatgtgacttgccagctgtaggcatgccagctcctagtcttccatgtttctacttgcctcttagatttctgttattatcatgagaaaatgctgtgtctagcctgttggaggatgagagacatgtggatcacagcagttgccctggtgaacagtcagctgattctaaacatgtgtataaaaacagccaaggaagacagagccagctttctagcccgccaccagttgagcccagacacatgatccaataagcagagtggtgacacagtatgagtaaaaacatgtgtctattattttattcatctctctgggttttaaaatgtgaaaattctccagaataaaatcaccttattgctacttaaacactgatacttatttcacaactaatttgctgagtattctgtagaaacacatctgtctttatacagtatctatctgccagagaactactcaaaccgtctaaaaggacaaagccttatttttagatacacactttaaatttgcctcatcgccgatgaaaatgggaggtaatatgaagaatccaactcctacttagtctaggagtagcacttggagacaaaagttaacaataccttataaacttaatttgttctttcctgcatcaggattttcaaaccatgcccaactgctcttacaaacagctcaaaacatccaggtttattagagtttttatattctcaggaaaagatccacctacacagtcagtaaatttttgcagacattagaaggcaaagtgataatcaggaaaccttgtggaactaataaggagcaaagtataaataaagaatttaaggaggtacacagtaaaaacacaaaattacttaattcacttccagtgttcttgaaggtttgccatcagactttctstgtactcctcctattgcaattcatacgggcttcataccacaaatgcttatcacaccgcctgatcaccgggacataggattgaggatcaaccttca

SEQ ID NO: 718625 - DNA, 645 bp, Homo sapiens
tatcacaagatatctttccctaactgtaccttatggggttctcttatccttacattttgttgttgttgagacagggtctcactctgtctcccaggctggaaagcaatggcacaatattggctcactgcagccttgacctcctaggctcaaacaatcctcccgcctcagccttctgagtagcttgggctacaggcacgtgctaccacgcctggctaatttttaattttttttgcagagacrggggtcttgttacgttgcccaggctggtctcaaactcctggtctcaagggagcctcctgcctcgacctcccaaagcactaggattacagttgtgagccaccacatccagctttatccttaaatttgaaaaatactttgcagttccgccgccccccacccagtcccagggactatactgaaaaatgtcagaatgtagggctgcttaggcagatagccaaatatttttagttactcctcacaggccattacatcaacctcattagagatttgaagccagaccaacaagaggtcttgctctttccctcaattgcctttcttcttgaatctctctaagaggatggaacactaatcggattgggtcaagagtccacagtactgattgaaccctgtgtacaactatgaaga

SEQ ID NO: 718626 - DNA, 614 bp, Homo sapiens
tatgatcaagataatagaacaatcccatcaccccaaaaagttccctcgtaccccactgtagtcagtccttctctgccccgtctagacaatcattgatatgtttaccgtcactatagatgagttttgtgttttccagtattttatagaaatggaatcatgcagtatatatactctcrtgtctggcttctttcattcggtgtcacgtttttagaatttgcccaggttacctttttaattgctgagtattgttctgcaatttgtttatccttttacctgttgatggacatgtggattgtttccagcttggggctattatgaataaagcttctatggacacctaacagcattttaaggaatgcttttcttgcttaagctagccagagttggtttctggtgcttgtgaaaggccatggctgaaatggttcgtatgattggcgttttggaggtggtggtgacagaattgaagatggggctggtgagaaaggccagtgaccgctcttgtgtgctggagacaatgggaagacactacagacactacagcattttgagtctggaaatgagtaaccagaatgacttttaatatagttttttttttctttttctcttttgagaca

SEQ ID NO: 718627 - DNA, 814 bp, Homo sapiens
tgggaggccgaggtgggaggatcacctgaggttgggagttcgagagcagcctgaccaacatgatgaaaccctgtctctactaaaaatacaaaattagccgggtatggtggcgcatgcctgtaatcccagctactcggggggctgaggcaggagaatcgcttgaacctgggagccaaaggttgtggtgagccaagatcgcaccattgcactccagcctgggcaacaagaatgacagtccgtctcaaaaaaaaaaacaacaaaaaaatacgtatgtgtatatatatatgtgtgtgtatatatatatatattccagataatcatcctacatggagaatttgaggtgggaggagaggtctatagaatcttctgttcctgggccttcagcttctcatattaacaggtatatgatttcaatagtcacttccaaatttgctctgcataaagayagtagctatatacagtcatttttaacatgtgtagtggcaaataatcattattgacagaatactaatccaaggaaatactagtaatgttttaagtgtgatcagatatgaagttattctttttcccttaaaaaaaaaaaaaacctcttctttttaaagttgactttctacaaaatcattccatttccaagaattcttatcattgtagtaggcttcaacatgacaggaaaattaagttatcactgcttaaagggttagaatcaaattttcaaccaaagcagttaaagtttgttgttattagtagagtgtcacaggcaatacatctaaggagaagacagcattgtaaacttcatgattcataaaaggggcag

SEQ ID NO: 718628 - DNA, 1130 bp, Homo sapiens
attcctagctttacttcccttctcctaaggaaggaggatatgaagcctctgtctggctgctggccagctgggggacttggcagctgttgggctccaagataggccaaatcacagtccagttcctgagtgcctggtgaatgtctatacttgcccaagaacattgccatgctccagagagtgtgaaattaaagagcaaattaaaaactacaacaggccaagaaagaaaaagttgtagaaggaaaatgtttttagtttagtaccattagtggtacatttttcttgcattttgaacaaagaaccccatatttccattttgcacttggccctacaaattatgtggctgacgctggtgttaggaaacacaatatagaagatctgtaatttacaaatgtgaacagagcatagtcaatttctttttctttcttttctttttgagacagagtctcactctgtcatgcaggttggggtgcagtggcacgatctcggctcactccaacctctgcctcctgggttcacgcaattctcatgcctcatcctccctcgcagctaggatggcacacaccaccacacctggctaatttttttttgtatttttagtagagacgggctttcaccatgttggccaggctggtctcgaactcctggcctcaagtggtctgccttcctcggcctcccaaaatgctgggrttacatgcatgagccactatgcccagccagagcagggtcgaatctcatcttatttgttttagcgtgattagtcagatagtaaggctttattttcaagttcacagacttgtaaaaaatttatatctgtcttttcaggatagagaaagactatggcaaagcttctgaataaacaaaagtatcctcaggttcatgagattgtttcttccttgtgcagggaatccatatcagattgtgatttatagttctctactaatcgaggctgcacaaaagtttcaaaggagactttttaaatcagaaaaccaaagaaactatacctaatatggtaaaaattatttcacaaaatcaataaccgtcgcagtcaaaatgcagtcaaaactttgcaacatgcacaaaattattaaaaatatttcataaaattaccttcaggcaatatgtataaggca

SEQ ID NO: 718629 - DNA, 597 bp, Homo sapiens
acattctacttttttcctttcattataggcactaggaggtctacctctatggactctataagctttgttccctcccattttcttctggcttcctgatgggtttgttgaaccactgaatgtgccagcaggagatcagagggcaatataaaacagatggggtttattacccttgcttcctctttcttgggccatggtttggccgtggctgtcttcttcctaaggtcatagcttgtttcagatgacccatcctttttatggtatagattttgacaggttctgccraatgctttctccccctgccccttcaagatctaggtttgatagcaacttccagctgtgctggtccctgggagcttcctcatccgtcactgtctcccttgaccctggcttatgcttctgtatatagttcttttattaaattctctacaagtacccctttcagtgtccatccgttttacactgggggcactgactgattcagctgtgatttattcttgatgtttatatttcataaacagcttaaaatattaacatatattaatataaatggtctttttctttcattctataaatatagttaactaaagacttaagtcc

SEQ ID NO: 718630 - DNA, 597 bp, Homo sapiens
acattctacttttttcctttcattataggcactaggaggtctacctctatggactctataagctttgttccctcccattttcttctggcttcctgatgggtttgttgaaccactgaatgtgccagcaggagatcagagggcaatataaaacagatggggtttattacccttgcttcctctttcttgggccatggtttggccgtggctgtcttcttcctaaggtcatagcttgtttcagatgacccatcctttttatggtatagattttgacaggttctgccgaatgctttctccccctgccccttcaagatctaggtttgatagcaacttccagctgtgctggtccctgggagcttcctcatcygtcactgtctcccttgaccctggcttatgcttctgtatatagttcttttattaaattctctacaagtacccctttcagtgtccatccgttttacactgggggcactgactgattcagctgtgatttattcttgatgtttatatttcataaacagcttaaaatattaacatatattaatataaatggtctttttctttcattctataaatatagttaactaaagacttaagtcc

SEQ ID NO: 718631 - DNA, 1520 bp, Homo sapiens
aggttagagatcaagccttccttggttgaaatctcagctctccattggctagctatgtgacatttggcaaattattttctctcttggtgaataagcttcctcatctgtaaaaaagtgctacctaactaaaagggttgttatgaaaattaagtgagataagacaggtaaagtgtataataataaggagtccagtaaattattgtttatccatcgtgccatcattatgccataaaagtacccccccmcaccttttttttttttttttttttttgaggcagagtcccactctgttgcccaggctgcagtgcaggggtgtgatcatagctcactgtagcctccaactcctgggctcaagtgatactcccatctcagcctcctgcgtagctgggactacagtcgtgccaccgtgcttgactaattattttctttttgtagaaacagggtctcaccactttgctaatgctggtcttaaactcctgggcttaagcagtcctcctgcctcagcctcccaaagcgctggtattacaggtgggagccaccacacccagcctaaaatcacttttgatgatcacagaaacagctgtttattgtagatctctctgggcccagcagaatttggagtgaaagataagcttagtgagtgactgaataaagcaatgaacaaatatttgttgaacccccatgatgtgctaggagctatgatgaagttatacctttttatttacttcaagtcctactaagaatggctcattgatcccaatttactagtgaaatcactaaagctcagagaggttaaataatatactacagttacacagctagtggatgtaagaataaagatttgaccaatggctggctggaaaaataacatttttttcatgatatgtacccatcctgttagggagccttagtagaaatgtccttctctgaatcaacaaagccattaatattttttccttcatggttctcctttggaacaatgagaaatatcaatcctcaatgaaacactgaccacatgcagttaagtctgcctcagcattaatattctcatggggcagctcaaagtggttaactgtaaaaaagccattaataagatgcattagtcaggaaattcccatgcaataatcagcccaatgcaggaacctggtactctgcacgctaaaggcaaacttagagaatgtaactgctttgtatttaaaagagaacatgtattgccaaaatgtttactcatgctttatttaactgtactcttggtatatttgacattattttacttgatttcttttcaaagatgattaaaacagtcatattaggccgggcgtcttcttttcaaaggcaattaaaacacttatattatgtggctcatgcccgtaatcccagcactttggtaggccaaggtgggtggattgcctgaggttgggagtttgagaccagcctggccaacatggtgaaaccccatctctactaaaaatacaaaaattagctgggtgtggtggtgagtgcctgtagtcccagctact

SEQ ID NO: 718632 - DNA, 1520 bp, Homo sapiens
aggttagagatcaagccttccttggttgaaatctcagctctccattggctagctatgtgacatttggcaaattattttctctcttggtgaataagcttcctcatctgtaaaaaagtgctacctaactaaaagggttgttatgaaaattaagtgagataagacaggtaaagtgtataataataaggagtccagtaaattattgtttatccatcgtgccatcattatgccataaaagtacccccccccacyttttttttttttttttttttttgaggcagagtcccactctgttgcccaggctgcagtgcaggggtgtgatcatagctcactgtagcctccaactcctgggctcaagtgatactcccatctcagcctcctgcgtagctgggactacagtcgtgccaccgtgcttgactaattattttctttttgtagaaacagggtctcaccactttgctaatgctggtcttaaactcctgggcttaagcagtcctcctgcctcagcctcccaaagcgctggtattacaggtgggagccaccacacccagcctaaaatcacttttgatgatcacagaaacagctgtttattgtagatctctctgggcccagcagaatttggagtgaaagataagcttagtgagtgactgaataaagcaatgaacaaatatttgttgaacccccatgatgtgctaggagctatgatgaagttatacctttttatttacttcaagtcctactaagaatggctcattgatcccaatttactagtgaaatcactaaagctcagagaggttaaataatatactacagttacacagctagtggatgtaagaataaagatttgaccaatggctggctggaaaaataacatttttttcatgatatgtacccatcctgttagggagccttagtagaaatgtccttctctgaatcaacaaagccattaatattttttccttcatggttctcctttggaacaatgagaaatatcaatcctcaatgaaacactgaccacatgcagttaagtctgcctcagcattaatattctcatggggcagctcaaagtggttaactgtaaaaaagccattaataagatgcattagtcaggaaattcccatgcaataatcagcccaatgcaggaacctggtactctgcacgctaaaggcaaacttagagaatgtaactgctttgtatttaaaagagaacatgtattgccaaaatgtttactcatgctttatttaactgtactcttggtatatttgacattattttacttgatttcttttcaaagatgattaaaacagtcatattaggccgggcgtcttcttttcaaaggcaattaaaacacttatattatgtggctcatgcccgtaatcccagcactttggtaggccaaggtgggtggattgcctgaggttgggagtttgagaccagcctggccaacatggtgaaaccccatctctactaaaaatacaaaaattagctgggtgtggtggtgagtgcctgtagtcccagctact

SEQ ID NO: 718633 - DNA, 1520 bp, Homo sapiens
aggttagagatcaagccttccttggttgaaatctcagctctccattggctagctatgtgacatttggcaaattattttctctcttggtgaataagcttcctcatctgtaaaaaagtgctacctaactaaaagggttgttatgaaaattaagtgagataagacaggtaaagtgtataataataaggagtccagtaaattattgtttatccatcgtgccatcattatgccataaaagtacccccccccaccttttttttttttttttttttttgaggcagagtcccactctgttgcccaggctgcagtgcaggggtgtgatcatasctcactgtagcctccaactcctgggctcaagtgatactcccatctcagcctcctgcgtagctgggactacagtcgtgccaccgtgcttgactaattattttctttttgtagaaacagggtctcaccactttgctaatgctggtcttaaactcctgggcttaagcagtcctcctgcctcagcctcccaaagcgctggtattacaggtgggagccaccacacccagcctaaaatcacttttgatgatcacagaaacagctgtttattgtagatctctctgggcccagcagaatttggagtgaaagataagcttagtgagtgactgaataaagcaatgaacaaatatttgttgaacccccatgatgtgctaggagctatgatgaagttatacctttttatttacttcaagtcctactaagaatggctcattgatcccaatttactagtgaaatcactaaagctcagagaggttaaataatatactacagttacacagctagtggatgtaagaataaagatttgaccaatggctggctggaaaaataacatttttttcatgatatgtacccatcctgttagggagccttagtagaaatgtccttctctgaatcaacaaagccattaatattttttccttcatggttctcctttggaacaatgagaaatatcaatcctcaatgaaacactgaccacatgcagttaagtctgcctcagcattaatattctcatggggcagctcaaagtggttaactgtaaaaaagccattaataagatgcattagtcaggaaattcccatgcaataatcagcccaatgcaggaacctggtactctgcacgctaaaggcaaacttagagaatgtaactgctttgtatttaaaagagaacatgtattgccaaaatgtttactcatgctttatttaactgtactcttggtatatttgacattattttacttgatttcttttcaaagatgattaaaacagtcatattaggccgggcgtcttcttttcaaaggcaattaaaacacttatattatgtggctcatgcccgtaatcccagcactttggtaggccaaggtgggtggattgcctgaggttgggagtttgagaccagcctggccaacatggtgaaaccccatctctactaaaaatacaaaaattagctgggtgtggtggtgagtgcctgtagtcccagctact

SEQ ID NO: 718634 - DNA, 589 bp, Homo sapiens
gaattcaataaagatggaaaatagataggatctcatttaaggaaaacatacaccaacayatgcactagcccaatcacatggaaggaggaaggcataggtcctggggaactccaagtccaaaggcggtagttgccaaaagtaggaagggtctgtgggccacccagaaggtgactggcaagtgtgcctcagtaagaacagtcagtaagaacttgtccccacgggttttgacatgtcatgctttcactgttgtttctctctagtttacaaatttagttcattaacacaaaacttatttagaaaagaggatgtagatttttaggtactttttattgtgtagattagttttggttcttcatttctaattttatttcagcattgtccacaaatgtgtcctgcctgatttctgctttgaggcaaaaagttgtgatgtcatttgtggctaaattgtgtggataagttttgtcaatgtatcaagtgcctgaaaataatatttgtgttcctgttgggcatatggtttgtgtgtgtgtgtgtgtgtttgtacatatatagagacagacatatattatatatatataaaacgtatattttt

SEQ ID NO: 718635 - DNA, 589 bp, Homo sapiens
gaattcaataaagatggaaaatagataggatctcatttaaggaaaacatacaccaacacatgcactagcccaatcacatggaaggaggaaggcataggtcctggggaactccaagtccaaaggcggtagttgccaaaagtaggaagggtctgtgggccacccagaaggtgactggcaagtgtgcctcagtaagaacagtcagtaagaacttgtccccacrggttttgacatgtcatgctttcactgttgtttctctctagtttacaaatttagttcattaacacaaaacttatttagaaaagaggatgtagatttttaggtactttttattgtgtagattagttttggttcttcatttctaattttatttcagcattgtccacaaatgtgtcctgcctgatttctgctttgaggcaaaaagttgtgatgtcatttgtggctaaattgtgtggataagttttgtcaatgtatcaagtgcctgaaaataatatttgtgttcctgttgggcatatggtttgtgtgtgtgtgtgtgtgtttgtacatatatagagacagacatatattatatatatataaaacgtatattttt

SEQ ID NO: 718636 - DNA, 910 bp, Homo sapiens
tggttgcattgacttgagaaatgattcttgctaatgactatacagagaagaacaatttacatacgaagaaaatgctatgcacttatactttctgccttccacaaaactaaaaagagttctgcccacccatatgaaataaggagtgagactgatcttgggaattgttgtaagttaaaattgaaaataactgttttactctcccactaggcaggtccaccttgaaatgacatagtgtccaggaaatcagaaagtttaccaaattaggcaaacaaattaggaagaaaaaaaaactgtccagaataactgaaattttgaaagaaaaagcattttctctgtagaaggggttgcatttgttgctctaaggtgatgcaaagatagactcattttaatatatattgagataaaataaagtaaaatttgaaagtacctgaagggcatcctgatattcagcctctctgcatacttgcacagcgtgtcccatggaatgtgaattttaataaacatgatatcggggcttgcaatagctggctgcaaatgatagtaagataggcaacattatttagaatcagagctgatgatatcatgccacagtttgatttgggaataaagaacattgtccccttgactatgcatgatcactgacactgatttaaaagaaatttatatggataaaaaaaatcttaatgaagaaagaccttgataaaaatgtaataatgacatcgtgtagaagaaataaccacctatgtgcattagtgcattttyttacattgatgattttcaacctgcagaatccccaatcagaacaatcaatcatgagccaattaaaaatctgaagttatttttgatgggctttttatcatgaccccattcctgttcagagggggaagaaaacactgccagttaccactag

SEQ ID NO: 718637 - DNA, 1162 bp, Homo sapiens
agcaagaccgcttctcttaaaaaatgaacaaacatttaattatatgtaatatgtaagaaataagggattctgtcattcaacaaacatggatttaacacctattatgtgtgtgaccctgtgccaaaaaatattggactataaaaatgaataagaagatattaacaagaaattacgatgtttaataaatacaatagtagaagaaaattcaagacatgaacatgacagaaaagagtcaagaaggaccacacagatgaggtgactcctgggctggatcatgatagatgactaattgcacaaggaagacaagactgataaggccattccaactagagaggcaaaagtcagaaaggacttagatgtggaacaaaaattgtattcaggagtcaatgatgcaggaaataatgtggaagagaacaaagaaaagaagagaggccaggtgggaagaaccttgcttgtgtttgattgaaagaccttaatcagagacatggtatagtctgagagttctggtggaagcacagaagatgtgttgaaggggaaactagttgggaggtgtctgagtttcctagarctgccataaaaaatcatcataaaattggttatttaaaacaagaaaagtttaatcaaagtgtcaacacagccatactccccctgaaggctttaggggagcatcttccttgcgttttccagcttctagtggcccctggcattgctaggcttgtggctgcatcactccaatctctgtctccatcttcacatggcctgcttccctgtgtgtgtgtctgtgtgtccttttgtctttcttataggactctctcaccagatttaaggcccaccctaatccagtatgacctcatctcaagccttaccttaagaacatccacaaaggacctatttccaaatatggtcaaattctaaggttctgggtggatttgcatttgtatgagacattattcaatccactacaggaggccatagcaataacacaaacaggagataagatctgaggtaaaacagggcagaggtaggcaggaggtcacagtaaaacaaaatcggccgaagtggaggaagaaatgaaattaggaattgaggacaatccgtgtttctagctggagaaaccagttgtatttcagtagcactgatgaacatagaaacgacacgagta

SEQ ID NO: 718638 - DNA, 1261 bp, Homo sapiens
attattattattattattttattattattattttgactgagggccttgttgtgtaatgctcacagaacgactcagcgacacttagcagaaatgtgctggtgctgggctgagaatgaatgaagataacagagatcacaccaggataaaaatattgcaattctggcccataaagaaatgagacacattgctgaagattgcagatatttaattgagagtcagaaaagacatggctttggaataaaggtgcaccctctaactaatgacaaaatcaaaatcgacctaccttaacagagactaaaaccaagactagcagaagcaacaaaaatccggggtaatttaatcgtctgacaaaatataattaataccctataaagaaagaaaatataattcaaccatgtaaattagcaaggaagcatggtctattttttttaattggtcaatagaaacacaacctaatattgctttaatattgtctttatcacatgaggagagaaaaacagctttttaaaatacgttaaaagacttaaaataaacggtaattatgacacagaattatttcagtgccacttcaccagctgggaatctctgtggcccgtggcacctctgcctgggctttgctccagccagttgggctcactccgcccactcagtctgacaggctgtcctctggtcatgctaccagccaggatcccacactcaacatggggttgctgcgttcagctcacggctggtccagggatgctgccaccgacttgctactgccttgggcgccagtgtctggaccaaggggatggagtgacacccaaaaactcagagacgccagtaaccacagagccccatgggagtgtcacaacttctgctcacgaagttctgtggtctgagccactagggaatgccacaggtatctctctcattccagcctctagctgctcaacaaatgggaacatgttatagcttgttccttcccgccactcatggcttggtgaagagggacttgttatagccctggctcagggagtccagtggtctgggcccccagaagggtcacagcttttcacttctgtagtacggcaaacaggagtrtgacgcagctcttttcattcatgctgtccacagctcggccaggagctggccgggaacatttttcaaccctttttgtccctgctgttctgtgggttccaagttcttgtcatgtgaccaagaagaatgaggtacatggacaccagagaatgagcaaggcagagaataattttattgagca

SEQ ID NO: 718639 - DNA, 1098 bp, Homo sapiens
ggggcaggggccatctctatctgtccttgtggtatcccagctacctggggccctggggtggagtccaggtttcctgcttggctatgccaaggctgggctccctgattggaggcctctttcctctgatgttctccaggctaggagtgcagcaacagtcagcaccctgcccgcctggcttgcagctgggcactgctccctgctaacgcagcatgtaccaggacaggcccccccgcactcccctccctgtcccagctgccacccccagcccctgcggccacgccaggcctgatttatggtcctgagttggggctggacagtgccagcgcctgggtcagaccttgaggagacctcaagtggcacccttggtctggcagggtcagggcccaggaggagacgacggggagccagggtgctggggaggatgaacacagcaggggcccaggagtggccggcaggaggtggaagccaaggccagggcctccaggggcccataggcttcccgccggctccaagtccagctggggacctggaaatgtgcctcctgccttcagaaggtctctggcttgtgtgggaaaggagatattggagagtgaaaagggcttttcctctgctttgcactgactccttcctgtacccaccatcagaggctggaggtttcaaagtcccactggccagcctaggccaaaccagacagtctcccatcctggggcccaggaagaggcctgagagcctgaagctggagcagggatggaggcagaggtttggggcagagactgcagcccrgagctgagcactggctgccccggggaagacagagcagctgctccctgagctatgaggctgcaaggccaggcccctgaagggctgggtgccagatagacacccagggctcaccccttcaacctcatcctctgaggaggcccaatggccctggggctctgctgcactcagggacttgtgagagaggggctggggctcgtccagatgtccaagctaaaactctcttaggatcccaggcccagctcacacaaggccacccagcactgcctcaccagggcacaactctgacgtgcctggcacaactgcctcatggctgca

SEQ ID NO: 718640 - DNA, 925 bp, Homo sapiens
cttaaaattgtgatatatccaaatcccctattatttttcagttttacaatttaaatattttttatagtgacagaatgtcgctatgttgcccaggctggtcttccaactccagagctcgagtgatcctcctgctggggtctcaaaatgccgagattaaaggcgtgaaccattgcccctggcccaaatcacctgtttttctgatagtaatctggcaattttatgagtgtctagcattgttttctatgtggtcttcagaattgctaagatatgaggcaacctataagctctggggttggcaaattatgacctacttgtttttgaaaataaaattgtattggaacacagccacacacttatccattttctatggctacttttgtgttataacagcagaggtaaatagctgtgacagtgaacacatggcctggcagcctaaaatactggccgtctatccctataagaagtttgttgaccccgtaagaagtcattcctcatctagagcaatggatcacatggcaaagcacctttgaaggcgagcctagtctgtttgaaagccagccaagataagactttttctccaaagctgtaaatacatacagatttatcaggaaatattttctacatggtgcttcattcaggggttatcagtaggggccatgtatgtaagagctatacaggtagagactataggatctgactagaaagcccatttcyagtactaggtgagtgattaaaacaaactgcatcagaagaaagcatcttgtcaaaattactacttgtgaactaaaacaaaggacacattcccactagaacagaaataaattttaattcattgaaaagtgcagcagtgaacagggtccttttgaagggcactttctaagtcaaatgactgagatgacacagagcaagggcagaataggaacag

SEQ ID NO: 718641 - DNA, 623 bp, Homo sapiens
cagatgaaataggttatttttttgtgcaagaaagtcttcctggaagtcttgaaacctgaatacagaaggattagttattctaaccagcttgaaaaattggcctaggccaaggctgtaaccaagtattctggttgtctaggaactgctctgaccacacttccggcataattgtttcttgcagaaaaactacttcagtttttttaaagcttcttttgccttctgtaggcttacttaaaaaaaaaaagtattaagatccttttgtggttcataagcctgatgattgggttttcatgctattgtgtgagttaccacccctacctcaaaccttgttaggactcsgcgcattacccctctgtgtgaaaaaaacaaagtaataaaggtaatttttttttttttgcataagccctatccttgtacacatcaggtttcaacgtgtttccatcattatttttaccttatagtatagtgttttcacgagtttttttttttaatactttaagttctggaatagttttcacgagttttaagagactcttcttggcaaacagttcaactcagagaaaatacttttaccagcaaggaggtataccttgttatatcggtctggggatgtgacttgacag

SEQ ID NO: 718642 - DNA, 668 bp, Homo sapiens
ttttcttaatcttatttgtatatttaaattgtacataagtagctctctgctcctcccatttgacagacagccgcctcttctctctcattgacagctgcatccctgagacactacggtgaaggtgaagatcaaagtcaatggatttggttgtattgggtgcctagtcaccagggcggtttttaactctggtaaagtggatattgttgccatcaatgaccccttcattgacctcaactacatggtctgtgtgttccagtatgattttgtctgtggcaaattccatggcactgccaaggctgagaatgggaagcttgtcatcaaygaaaatcctatcaccatcttccaggagcgagatccctccaaaatcagatggggcaatgctggtgctgagtatatcatggaatccaccggtgtcttcaccaccatggagaaggctgggactcacttgcagcggggagccaaaagggtcatcatctctgccccttctgctgacacccccatgtctgtgatgggcatgaagcatgagaagtaatgacaacagcctcaagatcatcagcatgcctcctgtatcaccaactgcttagtgcctctggccaaggttatccatgacaactccggtatcgtggaaggactcatgaatgaccacagtccatgccatcactgccacc

SEQ ID NO: 718643 - DNA, 668 bp, Homo sapiens
ttttcttaatcttatttgtatatttaaattgtacataagtagctctctgctcctcccatttgacagacagccgcctcttctctctcattgacagctgcatccctgagacactacggtgaaggtgaagatcaaagtcaatggatttggttgtattgggtgcctagtcaccagggcggtttttaactctggtaaagtggatattgttgccatcaatgaccccttcattgacctcaactacatggtctgtgtgttccagtatgattttgtctgtggcaaattccatggcactgccaaggctgagaatgggaagcttgtcatcaacgaaaatcctatcaccatcttccaggagcgagatccctccaaaatcagatggggcaatgctggtgctgagtatatcatggaatccaccggtgtcttcaccaccatggagaaggctgggactcacttgcagcrgggagccaaaagggtcatcatctctgccccttctgctgacacccccatgtctgtgatgggcatgaagcatgagaagtaatgacaacagcctcaagatcatcagcatgcctcctgtatcaccaactgcttagtgcctctggccaaggttatccatgacaactccggtatcgtggaaggactcatgaatgaccacagtccatgccatcactgccacc

SEQ ID NO: 718644 - DNA, 1209 bp, Homo sapiens
aaaaaaaagaaagaaaaacattctaaagtaaagtgcatcccagtttgcaaaacaattttgaaaccctgacctagagggtgagcagatcaagcatgagcacacccattaaagaaactgagtcatagagagggtaggtgctgctgaagtggcccagacaggaaggagggctaggatgaagcccaggcactgtgagcaagtcctgctcctctcccacaccaygctgctatttcacctgtgcacaaaggtggcttacctgtgcatgtgattccgtcaccttcataatccaggttacactcacacgtgttgttctccttacaggtggcatgagcagaacaaggaggcgtacacactgcaggcaaaactgcaaagaaaggggccactttcattctgtacccatggtgtgaagagttaaaacccatctaaggagactttccaagactctctctggacgaccactgtgttcataagtgcccctgtacagcaggaagatggggtgatttgctaaggtcttttctagccttggagattctgggattctagaattactcttttatagtaagacatgatctctgcaatgtcattgagatttatatgagaaaaaatgttctttaggggctatcaattaaaactttataccacaaaacttattagcaggaatgaacttggcagattagctctctggctctaaggacaggggttcccgatggatatggttaaattggaggagaaattccatggccttctgagggcaccactgagctagggagaagcctggagctttggtattggctggggttacagtgcatgcaggcagcaggaggccatgtagtgcttaggggaggagggaggaggcagaaggaacagggaggaggaactcaagttagccatactgctgcaacccatgaaacttcaggttgctaaagcccacaggtagggcctcgccatgccctgtgaccccagggaggattaaatgacagtcattcacatggataattcaaccagcacatttcagatctaccagaacacagggcttcgagtataaaggagacatcagaaaactgaccacctagtaaggatcgagctatggcaatgattataaatgatgagtgtgataatggcagctgcttgttttgagcatctgcgtacactgggaacttcaaaaccatgctcgctgaccctgccagcaatccttgcgttgcagaatgtgta

SEQ ID NO: 718645 - DNA, 603 bp, Homo sapiens
aagtaagttgctatgtcttactatcaaatgtaatgttagagatggaaaacaaaaattccaggaattaggtgatgttcggaattagggagatgattgagactgtacagggatgccatgagagaaatctccgtggtgctggaatagctccccatcttggttttaaataattgtggtggcrgtttcatgaatctgaacatgtgatcaaatgacctaaaattatatacatgcacattgtagcaatgtcagtttcctggttctgacattgtttcaaagttgtggaaggtgcaaccattgagagaaactgggtgattggtatacaagacctctttgtactatctttgcaacttcctgggaacctacaattatttcaaaattaaaataaaacaatagcagcaataatgagatcatttgaagcccctgcacttgttaaggtagggaagttgtgatcaggaagtgagcaaatataaataaatgggtctaaaagccaactgtggcaaagcagagaaataggataaatctgagatcttgagatcattattgagtcaggaaattaaacaactcttctcgacctcttatgggaagtaatacatttttctctgtgtg

SEQ ID NO: 718646 - DNA, 1108 bp, Homo sapiens
tcaggtgatctgcccttctcagcctcccaaagtgctgggattacaggtgcgagccgccgcaccgggcctacagtgccctttctttaagagctcagcaggaccttgccgtctaccccaaccagagtggttctgcccccctcctctgttcatcttcgccatccgtgtgtccgggatgtcctgctcacaccttcggtatttacctgtccgctgcccgtttgtttactctctgtctcctcccagtcccgagggcagattcggtctttttcacttgcagatcccaaggactcctgggattttcacctgcagagtgctatggaggttccgcagccagctctcgactcatcttcgcggatgccacctgtcagtgaatcacgcttctcaggcagggagactggcccgggctgccagccctggagcccagcacagagatgacctggggccctgaatttactcaggaggagaagggaaagaaacatcattaaacaccattaagttcctgggattctgtcactgggccctttataaacatgatcctgggtagtcatagcacccttcctcccctagccatggaagaaactcagggcctcatgcatgagtgaggaattagaggcttgaggaagttgaggcatgcccagctccatgcagtggcggcagaattcgaacccagagctgcccattcttctctatgcctttcctcattgccttctgggagtccgtaattcctttcccttcggagagggagggctcctgctgtttatcttttaaagctttgctgggaacattgtttccagggaaacaaccacacgtcttcaagaagggagaaaggtgccccaggagttatgtcctggggttttaaagaatgtattaatttattacctggtcccttaaaagtgacttttsttatatatcaccttggcttgcatcgaatgcacctgcttttcagttctttttttttcacatagtgcattaaataagagtttgttgaatgactattttctttttgtccagaattttgtatatgcttagcatagtatgtaaacaatgaaaagcattgtatagattttttgctcaattaagcatccagacatattgactcagaaatcccata

SEQ ID NO: 718647 - DNA, 1108 bp, Homo sapiens
catgtctgtctcccatcctccacttctctgacgaccaaaggtcctgggttctctgaggcctgcgcctgggccttgttacaacccagcaggcttatcttgattccagtaattgagaggcacatttgccaagtttatataccctcttgaaactcaagtactggtttgtggattaatgcgagattcagttgcatgcatttgaaatgcaagcgtctaattccgcgtgtaaaatacggggccacagacctcttgggcattgcacaccattccattcagatgagcgcagcaaaagcaaactgtaacccctaggattaaattctcctttaaatactcacgggtttttagcttcgggggaaaatatgtctgggaaaaatatcttggggtttcatcaaacacttggaaaataatctgaaaacatttttccaaaccctccatgcctccagcctgaatcctaattgatagttaataactacatcgacagaagccttctcactctatcacgattactggaaggctaaagagacatctgtctggagtactgggagtgaagcaaggatctcaggatcaccaaggatcttgtctggccaaggtctttaccacacaaacaagctttttttcacccccggaaatacttgccccgagtccactgtcaaccattaccagaatcagatctcggaccaatcgcaagtgtatttatgtattcattcatcaaacacttattgagccccaactctgtgccaggcattgcctgtacttgcagggagatcaaaaatgaaaggaggtgagcattttgacagctcttgtcttagagagtttgcagccagtgggagaaagcaagacatcggtaactgggaaaaggcaggggtgctccgagtcacagaacagagcccgtggctggcagagcccrgaggagggtctggctgggcagtagatgttgaattctatttttttcaaaatcatttttttctattccagatcctttgcttttccacatcaatttttactatctacaaaaagtcatgctggaattttgacttgaattgtgttaaacctccacatcaatttggggataatttacagcatagttacatttgagccctccaatccataa

SEQ ID NO: 718648 - DNA, 610 bp, Homo sapiens
cttcygcagcccgtcctcagcgggaggtggccagatcacagctgtggggagctgtctgtgtcctcaggcgcactgctgggaacccctgggctagggggtggctcctgcccgctgccaggctatccgccgcccagccggtatcccagtgctgactctggcctgcctgcctggcgtggcttccggcctgtcgtcagctgcttggtctggagcctaggggctgaccttggcctgtcagcctggcctgcacttgttctgtttcctttgcccggctctgccgatgctgagctcaacttgctttcttggccttcagcccctggcctccctctctccattgccagggggaggccagatgagatgatgaacttagcagggcagcctgcggccctcttctgtgctgtgacctggcaggggctttggtccagccagtcacacatgggcgagggtggccttccccagccagccaggtggcccctgctgttctgtgccaagcctggggggtgccgtgtgatcacaacccccagaaacagtggacactggagcacaactccccacacaccaagcagacgggtcctcgaggtgtctgtgagtcacgactcacagctgcagctac

SEQ ID NO: 718649 - DNA, 915 bp, Homo sapiens
aaaaaaaaaaaaaaaaaaaagaagacacacagacacacacggggagagaaatgcagtgaccatgggggcagagactggagtggtgcagccagaagccagggaactccagggacctccaggggtctccagggacctccagggacctccaggggtctccagggacctccagggacctccaggggtctccagggatctccagggacctccaggggtctgcagtcaccaacaaagctggcagaggcagggaggaccctcctctagagccttcagagggagcacagccctgccagcatcttgacatcacttctggccttcagaactaggagtgaatacatttctgctggtttaattcacccagttggggataattcgtatggcagtcctgagaaaggaatgctgtcatttacctgcttatcaagctttgaccagaaactctacttatttgaattttttttctggggtgggggtgagtggggcaacccatggcagggtgatagcagtcatagcgtttatagagaccacagtgttgacgacttggagagcaaagatggaggggagattactaatgacgagaacttccgatagtgagcccacctggcacacagtgttaggaaggggtgttattatcattcccactttacagatgcaacgctgaggtgcagagacaccaaggcacgtctccagggtctcaagccaggaggtgttggagctggggttcacgcccaacaggggacctggggacccagcgtgggtactgctgagtcctcgccaggggcttggcgggataagtttccattctgttccggcctggtgtggagggatctgggctcacacaggatccagsacacaccctgaagccggggacaccatctgcaggacctgcaacatccagaggcctgccttcttcctggcctg

SEQ ID NO: 718650 - DNA, 711 bp, Homo sapiens
taaaacagaactaccattcaacccagcaatcccattactgggtatatacacaaaggaaaatagatcattataacaacaacaacaacaacaaaaaacaaaaacaaaaacacgtgcactcatatgttcaccacagtgctatgcacaatagcaaagacatggaatcaacctaggggcccatctatggtagactgcgtaaataaaatgtggtcaaacttttctcctgcctttgcaaagcttattctttgccatagcttccccctttcaacatacagaaatgaatagtagataaaaattgtgacttcccatcccagaggaaaaggaaaggtgaagagttaaggagaaagtgacagggcctggattttctgggacaattttcatttagtataattttattcttttaaataaacataagtttatgcagctaagtgtggttttaattttataccttttaaaaaacttcttttagaagtttatttaaaaacaaagtaagaccacaagacaatattttttattcaaaaaacacagttwtttatcttgacatcttatttggcctactgaaaggcaagttaagtggaatctagcaaatgaaaccagccatattctaagaatactaagattcccaaaatatttaatttaacttgtcccctgattctccagaagcacagtctagactttacttgcaattatatttaattcaaagaatattctttt

SEQ ID NO: 718651 - DNA, 625 bp, Homo sapiens
gactttctcctttattcatacatttcgggaaagacacacacatctcagattaaacaaaaagaagaagtgaattgtattaagtggctcattaggccattaattgatttgatatgtctgacttttttttatttgggcataatagtcagtacttgcttttataaataattattgcacactgtacctcaagtcttcttgtatgtttacaaatgtgtacatatatataatattaatatagatagttgattaattcttgggtcacaaatttttcttcttaaagtaaatagcatggtcacttatttatgtatttaattaagtcaagtatgtaaagcaaaattttgcataataaatttactttaaatgtactgcaccattcagtatttaaagtcatcttatggtgaacatacttgtatgacactaagtcctattgtgtcttgaataagtcatattgtgaattatgtcttttgtatctttgacatttcaygtctattacattcttattcttaaagtgaagcatttctatctgaaaacaatggtagaaataacttcacttagtaaaaatgcttcttgatcttgaaaatattcagaatatctctaaaaaattttccaaaagaagtttaatatactg

SEQ ID NO: 718652 - DNA, 3374 bp, Homo sapiens
tcctcccagcaacctccaaagttggacggcagaaaaagatgcccaaccacaaagttccgagttgttctgcacctagacccacaagtaacctgggaatactatcacctggtgaacttgggacttgatttatgagacatgaagctaaagtacaaactcagagtccttaccaaatacataagaattttcctataaacccatatttttctctctctgaataatctatgtgctgccttttaaacaaaatgaattctttaacttttctgataaatgacagaacataccttgctccatgtgtctgcttctcagctgagactctatagtccaactgtatttctggcattcattcaaaaaagccaaactgttaagtctctaaatgtaaatttatatgagattaaaaagtgcctgggaatgagacagttatcttagtcacgtttttctttttaaaaaacgtttttaaaattttttttttttttatttagaagtgaagcatagctgtttccttgcctactacaaagaaaaaagtaatctaccttgttaaataacatgtgacttccttggctaaatcttaacaagcaatacattcctgactaaggctttttattttattatttttccagtgtaggtgttgagaattttcattaaaaagggctccaacactggaacaaatccattaacacgtgttgccaaaggaacactctgtaacttctgcattatcataccctctagcaattgtcaacaatctctctggcaaaggcttcctctggtttatacataactgtatcgagtatttctgtttgccttggtaacaatgccttttcttgcagagaagacatatgacaccaccaygtcacacaaaacaccccacagtggagctggttttcgatggagtgctggaaccatcaaggggctaggtccccaaggagatgggcactctctcataccacaacagaggtgcaaactggtcccatttttacaagaaatcaatttgacaaaatgtatcaaggatctttagagtagttttttaaaaatatatatgtttgtaactcctgacccaaacatttcacctctaataatatacagtaagaaaatgatgttcaaaaaaattccacacagatttcagcacaaatatattcactgcccattataatagcaaaaagtcaaaaacttacattattattaaaatagtatgcagagattaagcatgtttagaaagtctcatgaaaaactaagccaacgggtcttaaatgactttactaaattcacatgaaaagcaacataatttaggcattatctaattagcatgcatatttcctaaaaacttacaaaaactacaaattttcaaaggcttggtatagatgacaattagtgtaagttactggaggcaagtggtgttaaaaaggagaataagtctccaatgctcagtttccataatcgaatgaagcagcatgcactcacattttatcaacagcatttagaaaattatttctgccttttatgctgatgaaagatcctctaacagattaactttctggtaagagtacctcagagacagggtctaggtcacagattaggcttctagggacctgtgtctagatttctgtttatacggcgagctgtacacccagctgggcccactggacaacagtgcagccatcagtgcaactgccagcaaacctctcttatctcaacactgttaactatgctcaaaaagcaagtcaaggctttctattcggggcttactaaggacatcaaattttcattgtgacgaaaatacagctacggatttaaaattttaagtctacattatctccacaaaaacattttgtccccaaatgtacacacacaatcatactaggccaaagaataatacattctccaaagtagcaatgagagagcactctccaagcacagattaaaacaaagccatcacagaaacaacagacatctaaacaaacaaaaaacccaatacaaggagaaaaaaactattctattctcctaaataattgttttaaaaaacataaatcctaatacgagactgtgttgaaagtaatgaaaaggcctggggtggggaaggtgtataatgaatgaaaacagaaaccttacaacgtatcaaatgttacggaatctgatgaaggttgagaacagagaaaaatgtaagccctaaataattaacataagtgaactacatattgaaatgagaaaaaaaaaacacccaatctgtttgaaaaatgattacaaaatacttcactaataatgaatgcattaatagaaaaaatagaagtgaaattcaaaagcttccttgaaaagccaaccagagaagtaaacttctggtaagtctagatgaaagaaaagtgaacacaattagaatatacgtattgtctcagtcaattttctgttgcttataacagaatacctgaaactgggtaatttatacaaaaaaggtatttatttcttacaggtacaaaggctgagaagtccaaagtctagggctgcatctggtgagggccttcttgctggtggggacttgacagagtctggaggcagcacagggaatcacatggtgaggcggccgagtgtgctggctcaggtcccttcctcttcttaaaagccaccagccctactcccctgataacccattaatccattaatccatgaatggattaatccattcatgagggcagagccacctcttaaaggccccacctctcaatattgccacattgggggttaagtttcaacatgagattcacatgggacattcaaaccttagcaagcactataacatactgagggaccataaataggagacgaacatatagagataggaagctatgtttttttgagacaaagttgataaaacagaggggaggcaggaagaaaggaaggcaggtgggcaggactgggtcaggcagctggatacagtagtgtgtcaggcagatactgagaagatacctctgcactaacagcctcccaatgccccacagtggagctggtccccagctgaacctctacaggtgggtagaagagcaccagagccattcctccctccccaggagctctgtctacagtgagctacatactcaaatataccccgatgagtgtggaaatcgatcccatttttaaaagatataaatttggcaaaacatattaagggttttttaagtggtcatgatcttttaaaatgtgacttctgacctgtaattttgcttctaatcatacacatactaaggaaataatgtttttaaaaaatcaaccttggccaggcatggtggctcacacctgtaatcccagtgctttgggaggttaaggtgggaggccaggagttcgagatcagcctgggcaacatattgagattttgtctctacaaaaaaatt

SEQ ID NO: 718653 - DNA, 1173 bp, Homo sapiens
tccaaaaggaaattcagccctgagacagcttgagtttagcctagtgagatcaatgttgcatttcatcctgcagaatcagaagataatgcacatgtgttgttttgagctgcaaatttgtgtaatttgttatggtatcaatggaaaattaatgcattgcacaagcaagagtgaggaaattcacattgtgccatgggggctgttgctgtgtaacagactagcagaaatgttgacagagactgggcctgtgtcaagcatatgtttgtttagtcctcagagaatggaggaaattggacaccaaatattttatcaaaaagtttttgaaaaacaaagagcaacagcactcttgccagaaaaggaaataaatgagtttttcagttgacaagcctgaaggataaggggtgaagctgaggtagacccagccttacctggactgacacccaggctcaaaacagtgcagtccctatgtgcactgagataaactgctggcacttcatctctcttctcctctcaaatcaattacatgaatgttagagatttcaactttattatttcctgtatttttaaattaccttttttccctgcagttatgtttatatattgtctcttaacctgccttccaattttctaatcatgctttcttctctttcagttctgctaaaatgtctatctaatgatgttactttcaggcattatattttactttctaaatgtaaacacgtgggattcttctatacatttcaattttcagtgagatactccatgttcttatctattttattcaccttatcttgtgttttatgtattatattgttaagaattatttaaagttctatgtcagttayctctgttatctgaataacagtgtttctgctttcatgggctatgttctctcctctagattctttaacatgtggttttgccttctggcatgtctattgaaaaatgagactccagataatgttttcttccttcagaaaggggacgatttacccttccttctgctagaatgggagagataaattacaggtaggaaggcataagagcatcaaaaagctaaatattagataaatataataaatgttgggcaaacattaactgtataaaacaataatagtaatgagtaatagggtttaaaatataagtctaactgaaattcatgaatagaataatgta

SEQ ID NO: 718654 - DNA, 1173 bp, Homo sapiens
tccaaaaggaaattcagccctgagacagcttgagtttagcctagtgagatcaatgttgcatttcatcctgcagaatcagaagataatgcacatgtgttgttttgagctgcaaatttgtgtaatttgttatggtatcaatggaaaattaatgcattgcacaagcaagagtgaggaaattcacattgtgccatgggggctgttgctgtgtaacagactagcagaaatgttgacagagactgggcctgtgtcaagcatatgtttgtttagtcctcagagaatggaggaaattggacaccaaatattttatcaaaaagtttttgaaaaacaaagagcaacagcactcttgccagaaaaggaaataaatgagtttttcagttgacaagcctgaaggataaggggtgaagctgaggtagacccagccttacctggactgacacccaggctcaaaacagtgcagtccctatgtgcactgagataaactgctggcacttcatctctcttctcctctcaaatcaattacatgaatgttagagatttcaactttattatttcctgtatttttaaattaccttttttccctgcagttatgtttatatattgtctcttaacctgccttccaattttctaatcatgctttcttctctttcagttctgctaaaatgtctatctaatgatgttactttcaggcattatattttactttctaaatgtaaacacgtgggattcttctatacatttcaattttcagtgagatactccatgttcttatctattttattcaccttatcttgtgttttatgtattatattgttaagaattatttaaagttctatgtcagttatctctgttatctgaataacagtgtttctgctttcatgggctatgttctctcctctagattctttaacatgtggttttgccttctggcatgtctattgaaaaatgagactccagataatgttttcttccttcagaaaggggacgatttacccttccttctgctagaatgggagagataaattacaggtaggaaggcataagagcatcaaaaagctaaatattagataaatataataaatgttgggcaaacattaactgtataaaacaataatagtaatgagtaatmgggtttaaaatataagtctaactgaaattcatgaatagaataatgta

SEQ ID NO: 718655 - DNA, 989 bp, Homo sapiens
tcaaagtaatgcagatacaaagcagaaagaccttgatgcttttcaattacattgattctcaaatagctttccgagaacactgttgaactcaccaaggatgatctgaagtctatgcttagagtttacttttctttcaggtctttggggggggtctcttcacgactgcttgctcacaaagatttacaaaaataccagtgaaatgaaatttagaacaagaaatagccttggcttactcacagtggcaatgaaataaacaattcattgtgaggcattcgaaggaaaagataataaatagaagacagactagctgtagccctttcgccctgtcagggtctttttattttgagctgcaaatttttcacatgacagaatttaaataagagtgtgcaagaggttgtgtgtgtgtgtgtgtgtgtgttactgaaacaaacagctgaaagcagttgggtcgtataattttaagaaaaagaattttataatgtgtgaagttaagaatgctgacctattctatttagtttttaatatttttcagtcactttcaactcactatctccctaaattcagtgtcttcacttgtgaaagggaggaaacagaagaccctaactgaaacggttattataattaattaaaagaacactatttaagtacttagtgtgttatacagcaaatagtcaataatgttaattgttgctattttttataactgaatatagttgaaaagtatttcagccatacaggaaaagttcaggaatgagaacagtacaaagaacaccatctttatatagattaaattactgtaaakattttacattattttaataagtaaactacagccccttattaccagatagttctgtgtatttcctaggaatactatattaccatatataatcatagaacagtcaaaaactgtaacagtaatttaatagtgttatgtaatctacagattgtatttcaatgttttcacttgagtaatctcctttattgca

SEQ ID NO: 718656 - DNA, 583 bp, Homo sapiens
cttagacctgtgacacaagcccctcgtggaaggggcagccagacgtcagcagtcctgtgaggagggggcagcccgggctccaccactcactagaggaacccctggtgggagcacaggagcctcttacatttacctgggagcaaggttaagcggctcacatttgcctggcagggttagcattagggctggaaamaacatgccaggttcacagcacagtgtttggctcagaacaggtttgcagcaaaggtgagctattgtttaaacttgctagccagtgtcaccctgaataaccagccccacatgtcacctcagcgttaactgtcattaagccttgagaggaaaacatggacaactttcactttctttataaaacaaatgcaaattaaatattttagtaaagcaaatcatggaggacaaatagttttcccatatcaaaaaagacaaatatatgtctatgacaaatataaagacaaatatatataaatgcatatataatttatatatatacacacacacacacgcatttagccagttgaaagaatcagagaaaaccattcatggatgatatttttaaccatataaa

SEQ ID NO: 718657 - DNA, 583 bp, Homo sapiens
cttagacctgtgacacaagcccctcgtggaaggggcagccagacgtcagcagtcctgtgaggagggggcagcccgggctccaccactcactagaggaacccctggtgggagcacaggagcctcttacatttacctgggagcaaggttaagcggctcacatttgcctggcagggttagcattagggctggaaaaaacatgccaggttcacagcacagtgtttggctcagaacaggtttgcagcaaaggtgagctattgtttaaacttgctagccagtgtcaccctgaataaccagccccacatgtcacctcagcgttaactgtcattaagccttgagaggaaaacatggacaactttcactttctttataaaacaaatgcaaattaaatattttagtaaagcaaatcatggaggacaaatagttttcccatatcaaaaaagacaaatatatgtctatgacaaatataaagacaaatatatataaatgcatatataatttatatatatacacacacacacacgcatttagccagttgaaagaatcagagaaaacyattcatggatgatatttttaaccatataaa

SEQ ID NO: 718658 - DNA, 608 bp, Homo sapiens
aaaaaaamaaaaaaagatactgctacaaaaaggctaggggttaaaccaactggtagggttacaaggcagaataataaatgtcaatgggagactaagtaatctccccctacaaatctctcacaaggggagaaatctcacctggcagatatgcttttggtttaagaaaattttgaaacagatatttggataaattaactcattcagtctccttcttgtaaccagtgtgaagctaaaggtttatattacttttaaagcaaactgaaccaacagagtcaacctattatccagacatgatggcagccatctgcccactcagtggtaatgctaaagtctatctatgtgtacgttgccaagttaattctctttaagagctcctcgaacccaacataacctcaggaaatgaatcaccccatttcttgagagttcccagaggactctgacaataactcattaatgaaataacaagcaggtacatgaccaagcatagcttgtatctgaaaatacactgctcatttagaaaatggtgctcttcagaattttggggaaaaggctcttgtcttatcaacagcaacagttaagagaacacgcattttggactgaattctgac

SEQ ID NO: 718659 - DNA, 648 bp, Homo sapiens
cactccctaggggatggtataatcccttttgaaaatgtataattaggagataaaataggttatactgtatattagattgatttgtttatatgtaagtggcgaggtatagaaaagtgtcagagttgatttccagatttttagcttgaacaattactgctgccacgtactgagaggaaaaggagaacaaggagtaggtctgatgtgcaatatgatgattttatatataggcaaatgtgcattttatagtgacctttccagtgtattcattcataagcctctctagcttcttrtacctagaattgaatagaatttattagaacatttttgaaaagataaaatgtttttataatataagctcagtgatagcatggtttcttcacttttaacattcaggctggacagatcctctgaaaatatttggtattatttcttggttatgatgtattcctgcttcttggatatatgcaaacaaacatattaattatatgacagacattcagttttgtcctcgtatttgttttttaacaaacatacccatggatttaataactgcttgccttgtatttgtgttattttttattttcccttttttctcaactaaattatgggatcctgaaggaaaggaatagtggcaactgagtcaacaag

SEQ ID NO: 718660 - DNA, 893 bp, Homo sapiens
taaataaaacatacatgatatcatatatatgtacatatgcatgtgtgctcacctaaaaacatgaatatgcacatattgatcaatattataacaacagataaatttgtgcaccttctgtttcttaatattttacatgcactttcactgttttccccccaacagccttaaatggtaggtagtattagtatccccagtcttactatggggaatctgaaaaggagaaggataaatgatttgccaaaggtcaaatctcccataaataaaatgtggaacaggtcatttgactcccagaacctgtgttcttagctaccatgtaagcataataatttttaaaataaatacatagagaaaagttcacagctcaatatttttttaaaacaaattgaaccagactaaattcatctttgaatccagcacctggaataagaatgaacattatcagcaccttagaaatcctgcttgtactcatccctggttataccccttctcaaaagtataataactagattagatttgccagttttgggattttatatatatatatatatatatatakatatatatatatagagagagagagagagagagagagagagagagaagcatatcaaatataactcatttatttttgcctaattttgtttgtgtgattcatctactttgtatataacaagtttttaaaactctttcagcttggagtagtttattgagtgattctgctatagtgtatattgtgtccattccctgttgaaatatatttggattggttaccgtttggagttattataagttgtattgttttgaactattttgtacatgctttttagtatttacatgtaattatttctaccacttgtagacgtaagtagaattactgggtcatcgggaatcac

SEQ ID NO: 718661 - DNA, 893 bp, Homo sapiens
taaataaaacatacatgatatcatatatatgtacatatgcatgtgtgctcacctaaaaacatgaatatgcacatattgatcaatattataacaacagataaatttgtgcaccttctgtttcttaatattttacatgcactttcactgttttccccccaacagccttaaatggtaggtagtattagtatccccagtcttactatggggaatctgaaaaggagaaggataaatgatttgccaaaggtcaaatctcccataaataaaatgtggaacaggtcatttgactcccagaacctgtgttcttagctaccatgtaagcataataatttttaaaataaatacatagagaaaagttcacagctcaatatttttttaaaacaaattgaaccagactaaattcatctttgaatccagcacctggaataagaatgaacattatcagcaccttagaaatcctgcttgtactcatccctggttataccccttctcaaaagtataataactagattagatttgccagttttgggattttatatatatatatatatatatatatakatatatatatagagagagagagagagagagagagagagagagaagcatatcaaatataactcatttatttttgcctaattttgtttgtgtgattcatctactttgtatataacaagtttttaaaactctttcagcttggagtagtttattgagtgattctgctatagtgtatattgtgtccattccctgttgaaatatatttggattggttaccgtttggagttattataagttgtattgttttgaactattttgtacatgctttttagtatttacatgtaattatttctaccacttgtagacgtaagtagaattactgggtcatcgggaatcac

SEQ ID NO: 718662 - DNA, 893 bp, Homo sapiens
taaataaaacatacatgatatcatatatatgtacatatgcatgtgtgctcacctaaaaacatgaatatgcacatattgatcaatattataacaacagataaatttgtgcaccttctgtttcttaatattttacatgcactttcactgttttccccccaacagccttaaatggtaggtagtattagtatccccagtcttactatggggaatctgaaaaggagaaggataaatgatttgccaaaggtcaaatctcccataaataaaatgtggaacaggtcatttgactcccagaacctgtgttcttagctaccatgtaagcataataatttttaaaataaatacatagagaaaagttcacagctcaatatttttttaaaacaaattgaaccagactaaattcatctttgaatccagcacctggaataagaatgaacattatcagcaccttagaaatcctgcttgtactcatccctggttataccccttctcaaaagtataataactagattagatttgccagttttgggattttatatatatatatatatatatatatatakatatatatagagagagagagagagagagagagagagagagaagcatatcaaatataactcatttatttttgcctaattttgtttgtgtgattcatctactttgtatataacaagtttttaaaactctttcagcttggagtagtttattgagtgattctgctatagtgtatattgtgtccattccctgttgaaatatatttggattggttaccgtttggagttattataagttgtattgttttgaactattttgtacatgctttttagtatttacatgtaattatttctaccacttgtagacgtaagtagaattactgggtcatcgggaatcac

SEQ ID NO: 718663 - DNA, 893 bp, Homo sapiens
taaataaaacatacatgatatcatatatatgtacatatgcatgtgtgctcacctaaaaacatgaatatgcacatattgatcaatattataacaacagataaatttgtgcaccttctgtttcttaatattttacatgcactttcactgttttccccccaacagccttaaatggtaggtagtattagtatccccagtcttactatggggaatctgaaaaggagaaggataaatgatttgccaaaggtcaaatctcccataaataaaatgtggaacaggtcatttgactcccagaacctgtgttcttagctaccatgtaagcataataatttttaaaataaatacatagagaaaagttcacagctcaatatttttttaaaacaaattgaaccagactaaattcatctttgaatccagcacctggaataagaatgaacattatcagcaccttagaaatcctgcttgtactcatccctggttataccccttctcaaaagtataataactagattagatttgccagttttgggattttatatatatatatatatatatatatatatakatatatagagagagagagagagagagagagagagagagaagcatatcaaatataactcatttatttttgcctaattttgtttgtgtgattcatctactttgtatataacaagtttttaaaactctttcagcttggagtagtttattgagtgattctgctatagtgtatattgtgtccattccctgttgaaatatatttggattggttaccgtttggagttattataagttgtattgttttgaactattttgtacatgctttttagtatttacatgtaattatttctaccacttgtagacgtaagtagaattactgggtcatcgggaatcac

SEQ ID NO: 718664 - DNA, 893 bp, Homo sapiens
taaataaaacatacatgatatcatatatatgtacatatgcatgtgtgctcacctaaaaacatgaatatgcacatattgatcaatattataacaacagataaatttgtgcaccttctgtttcttaatattttacatgcactttcactgttttccccccaacagccttaaatggtaggtagtattagtatccccagtcttactatggggaatctgaaaaggagaaggataaatgatttgccaaaggtcaaatctcccataaataaaatgtggaacaggtcatttgactcccagaacctgtgttcttagctaccatgtaagcataataatttttaaaataaatacatagagaaaagttcacagctcaatatttttttaaaacaaattgaaccagactaaattcatctttgaatccagcacctggaataagaatgaacattatcagcaccttagaaatcctgcttgtactcatccctggttataccccttctcaaaagtataataactagattagatttgccagttttgggattttatatatatatatatatatatatatatatatatatakagagagagagagagagagagagagagagagagaagcatatcaaatataactcatttatttttgcctaattttgtttgtgtgattcatctactttgtatataacaagtttttaaaactctttcagcttggagtagtttattgagtgattctgctatagtgtatattgtgtccattccctgttgaaatatatttggattggttaccgtttggagttattataagttgtattgttttgaactattttgtacatgctttttagtatttacatgtaattatttctaccacttgtagacgtaagtagaattactgggtcatcgggaatcac

SEQ ID NO: 718665 - DNA, 924 bp, Homo sapiens
tacatgtgtagatgcacatatgtagattattttaatttgaacctgtgaaagggcactgaataattctgttgcatatatattttgtgtcgaatttctttgtaggaaaatatttaggttctaaatatcaagggctgcaatcattcgctctgtgctctctctgtcccaagtgcctggcacatagtaacatgctctattgatatttatggattgaatttgaaaatgaatgcagtgttctgaagaggcacatttcctttaggtatcttaatatgcttcatatacacttaatacyatggtgtcctactggctttcctccatctttcctatgaccttatcaatgtatgtcccatatattacagccacacccatcatatttttgcagatagggcttttctttctgaagttttgtcatctgtttgttcataaggtcttcattttctgtaaatttttgtcacctaaaagctgccacagtccttctcattatttatattgcattagcttccttttgtataattatttaacttttgggataattatctctaatttcttaatagactttgaaattgagagcaaatactgtggcccatattcctttattacaatttatattattatttattacatttattttctccagtaagagctcaataaatatttactgtcttgggaagtttcccaaaacagaaaattatttctcaataatatacaatggtgtggggaaattgtcactctcatatactgcttgtgggcagtaaatttagtttagttaaataaatatcattagataggcctctgtgaaaacctctgccccttttcatctcagccactgtgagaagtttctccatttgttcttatggcaaagaatgcataatcctagcacttgactgtgtctctcaatactctgaaatttctttgagaatgaggaca

SEQ ID NO: 718666 - DNA, 1876 bp, Homo sapiens
ggtttatcagaacttattcacattagtgttgctaaagttggtatatgactatccactgctaaactcactgacattaaaaaataaaaaaataaacaaacaattagaacattgaataattagcatgtatcggtactcatctgataatagcatataaacaaggccagtagcttatacctctaagtgaaggtaaatgaaaatgtctcagaaattgaaagcggcaagagtatttaactacataatgcaagcattttcacaaaaagttactgggtaagccaataaggggtaaactagcaaaaacagctttgtaatctttctctttatagtcactcaaaaggaaaagaatctaatatcaaaaattatacttaatgcaaagcagaagattacattcagatacgtttttcaatgatggatattttccataggaatgcataaattgcattcctcttcagttactctggggattctcttgggggtaatgttctatgtggtattttattggatatggaatgcttcaatgcaaacacagaaagcatctgctattaagccaacgtatatctactctacaactgcaacttctcttgagtttgaaacaaaaagctactgatgattaattgtagctctcttctaaaacccacaaatttgttggtaaaactttataaaactacttttatcatttctttgttaccatataacagactaagataatgataataaatataaacagtcttataaataaacagtttatcaccttatcacactgtagtccaggaaacacagacataactgatgttataattgtaccaaactaaaaagaaaatgagtgagrgacttcagaaagacactgatatcatttttccagataaggtgaataaaatttttaagtaaacaacataattattgaaggggctaattaaagttttaacctctcatggtttcatcatgatcattggttatatttttaaactataacaaaattattaccttagaatagttttctttaatgtcaaaaaatgctttcttgctataatgacatacactatgtttctactaaaagctagtctgtcaacatttcttttaaattatttaaattcttcagggactaattgcactattaaagccagtggagagcatctaaagatagtctcacacaaattaaaaacattagtaaaaacaacttgtcaatatactaaataatatgtgagattcctcagtatccacaagacagaattttaagtgcctaatgcttgaataagctcagttgatgaaataaagtttgagagtgggaagaaattatcagcaggttaatctagggactgttttaaaaatccaaatttatgttttgttaaatttagaaatatatgtttccagtaaatgtttagcactaacgtcatggaatatatttcaaattctgtcaagaattcctttgcacattccgaaggaaacccaaagcaaaagttcattttcttaagaaataaatctttataatcaacagcataataagtctggccccttcctatatccctacctgttttctccatctctatgtacctctgcattttcacctatcctcctctcaagacttaccagaactcacatgcagaaattactctttgagtttcaagaaatgcaaaaagatggaggagaaatattttccatttttttcatatttttaagaagaaatgcattggaacacccttttagtgaagagctttttatttaaacaagggtaggcatatttacctccctagtccctaatccattacctttaccatttccctcccacttgtagacaaggtggtaaatggctgacgaactctctaaattttctacttcctttaccatagatcatgcattattttttaaataaatgtatgta

SEQ ID NO: 718667 - DNA, 588 bp, Homo sapiens
cagatgcagcatagtatagtgatggaagcactgcctgggttccaaatctgagtctacccccacccagctgtgtgaccatgagcacctcatgcaaacactctatgcctcagtttcctcatctgtgaaatggggatgataatgttcctttcctcatgagtattgtgagaagtaaacgaattaatatatggcacattgccatgcacgtagtaagtacagaagagtgtttctatgatcgtctcgcatccatacctgtcgtaaattagtgtccacttttggctgtgagtgccatgagggcaggggatggcctgtcttcttcattgctgtgtcccaaggaaagttctcaggaaatayttgctgaatacatgaaggatgcatgagcaaacacatacgtgatcgctcccaacgtgcctgggggaggcaggggcagggtctgtgaatgctgctcatccacggagggcttcacaggcccagaatttaccttagattcgaagacgaaggaatcatctggtactatcttagtttcctattgctgctgtaacaaattactgcaaacttaatggtttcaaacaatacacatttatatcttat

SEQ ID NO: 718668 - DNA, 1627 bp, Homo sapiens
ctcaagtcacagttctgcttctcttagaaggaggcaccttgggcagtcactttgcctgtctcagcctgtttcctcgttgacagaaggcaatgccgagaccaccacagctttacaaatgttgggagaatctcctcaaggtagtgaacaaggagtgctccacaaatcgttttccacgttctcattcatgtgttggtgcgtctgacggatcctcagctgtaaaatggagatcctaataatctccgttattactgattgcattaaagaagttagtcagtgtgaagcatgaagagcattacctggctcacaacgagcactcacccagtcagtgttaggtgtcatcatcatcctgatatatactgtgcaggagggaaaattagaaaattctgcagcttgcttttgatatttcttggcatatgcctagtgtcacttatacttggagaactaaaaaatagcatcactggagatttggattgatggggacccatgaccactgggcattgagcctttgtggcaaaatctcagcaagacaaaacaatacccaggcactaaggaagaatattctggaagattctctgtgggacccagaaaagaatacatggccaccagttggctaccctggaagaaactgggctctacccaacattaaaggtggccaagaccccggcagtcagctaatctaactgcctctttctacaggcaaggcaggggcagcctagagagggaggaaaggaagaaataatactgattgcgtatctactgtgttcaggccacggagtacacaccttatagtcctcacaccagcctaacaaggcatcggagtgaggatctcctttgcataggcaaggaaacaaaggccaagaaaggcccaggccccatatttgggtcataataacatgcaaactggatccgtggttcagtagcccaggcctctttgcacatatagattattgctctgccctttatagtggggataaatttgktgagtggtggcatttggtctgtgaataaccagaggtcggtaatttgccagttatttccaagctgggaaactccaggccaagctggttttaccaagtggaacccgaaaatatatatatggtgcccttgcttctctggaatctggctgagggtctcagcatcgtatcccggctaggaccctcagctctcctgtttttcagctctcctgttgcagttatttattgctgggcaacaaatcaccccaaaacttagtggcttaacacagcactgatatgtcacctgccacagctctgtgggtaggtaatcgggcaggtctgctggtctcacctgggatcattcacatcactgtggtccgtggatggctggcagttggtgctggtctgcagtgccccagtcttcatcctccaggaggctggacaggtctttccatagcatgactgtctcagggcagcgttccaacagcgtgaaggctaggaactgcagggcttcctaataggcttcagaacgtgttcatcgttgcttctacctcattctactcatcagagcaagtcacagccagcccccattcaaagaactggagaaatagagtctctgcttcttgatgggaggagtgtcagtgtcagactgcaaaggggaatgcacatcgggg

SEQ ID NO: 718669 - DNA, 1156 bp, Homo sapiens
tgcattgtgtgtagaagttttattatcatctttttcaaagagacctggttagaggttgtgtctttgtctccttcaaagagttataaaatgtctctaaggtggcatgtgagtggagccagaaggctttaatcaggagaaagctttttagactaggaggaagacaaacttcttaggcctaggtcgacaacctaaaggatctggattcacatgaccttacagaattcatatagactaagtgagaaagcagggcagtcctctacctactctgtgtgcatgtaagctcarcttactgttacttattaacagtgcctatatttatagggtactttttagtactaccggtgctttcatgccttctccaatacacatttcagtgatgaagcgaccaacaaagatgtcttgctggcatcagaccacttaccatgcagagtagactacatttggagagagtaaagccttcctgagcactcctcaagtactggtagtgaacgcatgcaaccagtaactagtcaatccaaaagacacgtgctttgggtaacacttggtagaatcaaaaagaccagagatggcaagcccagccaagttagttaggagtactgacagactgacagaggaaggagcatccagaaaaactggaagaaaagtagggaggagtacagcaaaacacaagcaaaagcaagcaagcaaaaagacttgtatatgtgtagacttttctctggagcagtatccaggaaatgtgaaacagtggctgcttctgaggagaggaactccgggactaggggagaaggatgggagacaggtttacttttcacagtacactttctgtacttttaaaatgttgtaccataagtatgtactacctatttagaagttaactggaaaaagaaacaaaagaagagagaaaagcaagaagagacgtggacagcaagagcctgccaagcagacagcaaaaaggcaggaaggcagcgagagactgggaaaatggcaaaaagactgagacaggcagactgtctgaggaaccagaaagacagaaaaagagataactgaaataaaggcaaacgtgagagaaggcagggtaggggatgtggcaagaagttagataagactttgaggcaaaggggttactgagaggtttaggggagagagactatcctca

SEQ ID NO: 718670 - DNA, 745 bp, Homo sapiens
ggaatgctttagaaattttaaaagaattctgattgctrttgcctccacaaagcaaaatttgtaaaaattaaaactaataaaaagcttcaagactaaacaatgagtataaaaacattattagcaattttgataaaccgaaaccaaggaaagtgcattttataagataaatatggaatatttccttacatatgtatctttagtattcgtccaaacattactgaagtattaatagaaccctcaagacatgtgcaatgataaccttcagtaatctttgttattctgccaactttcaatgatagaaaatcatgaagtattttttttttcgaattgtaattatcgagttaattctcgggcaaataatataatgtattttatttaatagtttgggagcctccatttttactttttccctgtgctcctccaaagaaaaaaaaatagttgtagccctttcagtgataaacaagccaattttccataatcagaaaaattttgcttacctgaaacatcatatgccccagtaatggcaaattatggaagtgcttttgagttttctctgcattgatgctgttccttttaagtagctatcatctatctgggtgaagcatggcagatttgacaaagtaattatgaataattttcagtcagcttcagacattagagatggtgctagggcagatgagtgtgtggatgtaatcacatgggcacactgggagaacaatgattatatcagaaatttcagtgttta

SEQ ID NO: 718671 - DNA, 593 bp, Homo sapiens
taaggtaaggattaagatacatttcccctcacgctgtcagttgtttgttccagcatcatttgttgaaggcactatttttttcccaccgaattaccttgtcgtcattatttaaaaatcaattgatcatatatgggtgggtctatttttatgctgtctgatctgtttcattgatctctatgtctgtctttatgccagttttatgctgtcttgatagtgcagtcatttttctctttgcacccatcttttttcattagagtaactaattttataatatgcttttttttccttttccttttctcccaattaaaatatgatttgattacattaaatccaattagtcttttyctgtacatttaaagggtgttttggggttaaaatgaaggtcatgtgattcacattaagtttaaatttaaggtaatgaatattttgaaagactcaaaattaattccatatttgtacttaattgaaaaccaattttcatatacaggtgagcacaagaaaaaaaatagtgtgtttgaaattaagagcaagttctaggcctatttaatattcatgtccatactcccatttatgtatcccatttatatgggagt

SEQ ID NO: 718672 - DNA, 507 bp, Homo sapiens
  misc_feature 394, 395, 396, 397, 398, 399, 400, 401, 402, 403, 404, 405,406, 407, 408, 409, 410, 411, 412, 413, 414, 415, 416, 417,418, 419, 420, 421, 422, 423, 424, 425, 426, 427, 428, 429,430, 431, 432, 433, 434, 435, 436, 437, 438, 439, 440: n = A,T,C or G
  misc_feature 441, 442, 443, 444, 445, 446, 447, 448, 449, 450, 451, 452,453, 454, 455, 456, 457, 458, 459, 460, 461, 462, 463, 464,465, 466, 467, 468, 469, 470, 471, 472, 473, 474, 475, 476,477, 478, 479, 480, 481, 482, 483, 484, 485, 486, 487: n = A,T,C or G
  misc_feature 488, 489, 490, 491, 492, 493: n = A,T,C or G
tttttagttttttgaggaagcttccatactgttccataatggctgtactaatttacattctcactaaaagtatatgagagttccctttctctgcatccaaaaagactattgtctttttaacaatagtcattcaaactgaggtgagatggctttcatttgcatctccctcatgattagtgatgttgagcattttttcatatacctgtggccatttgtatgtagaaccaatgcttttaatcacatgtcaaactgcctatgtcccagtcctttccagagagccctctggaaccctttttatattgtaaacaaatttatttaaacctacaggttttccatggaatagaagtttattcctcagtaccttgcatctactagttgggcagttatggtgagnnnnnnnnnnnnnnnnnnnnnnnnnnnnnnnnnnnnnnnnnnnnnnnnnnnnnnnnnnnnnnnnnnnnnnnnnnnnnnnnnnnnnnnnnnnnnnnnnnnnggctytaaaaacaa

SEQ ID NO: 718673 - DNA, 924 bp, Homo sapiens
gtattccatggtgtatatgtaccacaatttcttcatccagtaccactgatgggcattttaggttgattctatgtctttgctattgtgaatagtgctgcaatgaacatatgtctgcatatgtctttgcagtaaaattatttatattcctttgggtttatacccagtgatgggattgctggatccaattgtagttctatttttaggtctttgaggaatcaccacactgctttccacagtgaccaaactaatttatactcccaccaacagtgtataagccatttccttttctcttcaaccttgtcagcatctaacatgcacacacatatatatacaataatatctaatagaagctaatagtacataaatcctgactaataatagtactcatcatttgctcaattgtaataacagtattcttcattggctcaactgtaatgcttattcttatctcaatctgtcccatttcagaaacaaataaaaacaaaattctcaaaatgttactaaagctttagaggagctaaaacttaatctacagaataaattttaatccacatagtaaattcttaatgcttatattgatayttgcattaatacaatgtatcaatgtttggcaatcaccttccttccctaaatggctgcatgctgctaacgggtttgattaaaaaatactcccctcccctcttccctcctctcttctctcgtctcctgagtctcactctgtcaccctggatggagtggcaccatcttggctcactgcaacctccacctcccgaattcaagtgattctcctgtctcagcctccccagtagctgggattacaggcgtgtgccaccacatgcggctcctgtttgtgtttttagtagagatggggtttcaccatgttggccaggctggtcttgaactcctgacctgaagtgatctgcc

SEQ ID NO: 718674 - DNA, 635 bp, Homo sapiens
tcaatggcatattgaacagaaaacaaaaactgaatctcccaagcccagtaagtctaagtgctcgtaaggagtcctgtcaaccatgtcatggatctagaagaagcggagaaatctctcaagggtcactggctcaagggcaaggggaaaatgtgcctataaggcagcaatggctaacaggtcctttccaagggtcagctagcatcttagcgctgcacgtagcttaactcgagcaatcccaccacgaccttgtgaaatatgtactgttatgattcccaccctcacagatgaggaaactgagacacagaaagggggagcaactgggccaargttcatcaggtagtaagtggcagagctcacatttggacctggacaggctgcttctagagcctgtcgagacagaactttcatgttcttgactctgaaagcttagttttaaaaggaatgctgttttaatttttttgtagccctcttgggtatatcctgttatctctggaagcaggaaaaccagagtctaatattagggaataatttaaggctaatcatgccttaaaatgcctgagaacatgatagaaagagtatgtagggacccagctatacctcagctgcctccccgggggtttggtggaaaggaggct

SEQ ID NO: 718675 - DNA, 626 bp, Homo sapiens
ttttttttttttggagatggagtctcgctttgttgcctaggctggagtgcagtggtgtgatgatcttgggtcactgcaacctctgcctcccaggttcaagcaattctcctgcctcagactcctgagcagctgggaccacaggtgcccaccaccacgcctggctaatttttttctatttttatagacayggggcttcaccatgttggccaggctggtctcaaactcctgacctcagctgattcacctgctttggcctcccaaagtgctgggattacaggtgtgagccactgcgcctggccttgtattttcttttctataaaaccctgtgtatacactcttttttcaaaaattgaggtgaaaatcatgtaacatcaaataatccttccttccttctttccttccttccttccttcttttcttccttccttcttccctccttctttctctctctttgtctctttctttcttttttttctttatattcctttgtcaccctaggtggagtgccacatgaacatagctcactgcagactcctggattctagcctcctgcctcagccttcctgttaatggacattgaatttctttttctttctctctttttttttttttttggaaatggagtc

SEQ ID NO: 718676 - DNA, 626 bp, Homo sapiens
ttttttttttttggagatggagtctcgctttgttgcctaggctggagtgcagtggtgtgatgatcttgggtcactgcaacctctgcctcccaggttcaagcaattctcctgcctcagactcctgagcagctgggaccacaggtgcccaccaccacgcctggctaatttttttctatttttatagacacggggcttcaccaygttggccaggctggtctcaaactcctgacctcagctgattcacctgctttggcctcccaaagtgctgggattacaggtgtgagccactgcgcctggccttgtattttcttttctataaaaccctgtgtatacactcttttttcaaaaattgaggtgaaaatcatgtaacatcaaataatccttccttccttctttccttccttccttccttcttttcttccttccttcttccctccttctttctctctctttgtctctttctttcttttttttctttatattcctttgtcaccctaggtggagtgccacatgaacatagctcactgcagactcctggattctagcctcctgcctcagccttcctgttaatggacattgaatttctttttctttctctctttttttttttttttggaaatggagtc

SEQ ID NO: 718677 - DNA, 626 bp, Homo sapiens
ttttttttttttggagatggagtctcgctttgttgcctaggctggagtgcagtggtgtgatgatcttgggtcactgcaacctctgcctcccaggttcaagcaattctcctgcctcagactcctgagcagctgggaccacaggtgcccaccaccacgcctggctaatttttttctatttttatagacacggggcttcaccatgttggccaggctggtctcaaacycctgacctcagctgattcacctgctttggcctcccaaagtgctgggattacaggtgtgagccactgcgcctggccttgtattttcttttctataaaaccctgtgtatacactcttttttcaaaaattgaggtgaaaatcatgtaacatcaaataatccttccttccttctttccttccttccttccttcttttcttccttccttcttccctccttctttctctctctttgtctctttctttcttttttttctttatattcctttgtcaccctaggtggagtgccacatgaacatagctcactgcagactcctggattctagcctcctgcctcagccttcctgttaatggacattgaatttctttttctttctctctttttttttttttttggaaatggagtc

SEQ ID NO: 718678 - DNA, 620 bp, Homo sapiens
agtatatattaagaataccagaggttagaaagggtagtagggtgtgggggaaaatagggtatggttaatggatacaaaaatacagtttgatagaagtaataagatctagtgttcagtagcacaatagagtgactatagttcataattatttgtattacaaaataactataagggtaggattagaatattcccaacacaaagaaatgatgaatgcttgaagtgatggatatcccaatcaccctgatttgatcattacacaccatgttcttgtatcaaaatataaattttaccacacaaatatatacaactattttatatccataattaaaaattatttttaattttaaaaaagaatatataaattaagaagcacatggtaccacaaaaagttttatatagggctatatggccaatggaaaagtgtagcttagaaacacagacacataatcttagctgtctgtgtaaccaaatgaataacatgaggccactgagcccagcagagattaatataccyagacaaaagtgcaaaaggttaaggacaagagctacaataccataccttttctgaaaaatgaggactaaaataaattaaaatgagagtcacagttctcttgactagc

SEQ ID NO: 718679 - DNA, 598 bp, Homo sapiens
ctagtccttggatgtttgcttatgtgtgtgtgaggctttgaaatcccaggaggcacrtggtgaagacctaaactgaggattgctcagggtagcggtctccaacttttttggcactaaggacggatttcatggaaggcaatcttatcatggatgggcagcaggtgggggatggtttcaggatgatttaagcgcattacatttactgtgcactttatttctattattactacattgtaatatacaatgagataattatacaactcaccataatgtagaatcagtgagagtcttgagcttgttttcctgcaaccagacagtcccgtctgggggatgatgagagacagtgatagatcatcaggcatgggattctcataaggaacctgcagcctagatccctcacatgcgcagtttacaatacagtttgtgctcctatgagaatctcctaatctcctttgctggggtggatctgacaggaggcagagctaaggtagtaatgcaactgatgaggagccggccactgtgaatacagatgaagcttccttctctggctcaccgctcacttcctgccacacagcccggttcctaacaggccgcagac

SEQ ID NO: 718680 - DNA, 1407 bp, Homo sapiens
ttggacagttgttttggggtcttgtggaaaacctcttcagctcagttggcaatgagatgaattacttatgggcatatatcacagtttgacttggcctttaaacaagaatawacagagcatagtgcatggctgtgtgtgctggaggaaggaacaatgatgagaagtgagaggatagttggaaagaggctgggtcagttggataaaaaccgagggagtaaattcataaagtcttaacatcagaaattgttcacattggaaatgatcttagaaaacattttcattctgtcctgtctcattactgacaagagttgaactgaacttcctatatcctaccttaatgacagtgcacatgagccacctgtatctgatgattcctcatctggaattctctccaccctcaaacaatccgctattagcaaataagtaattctttggcagagaaaatgagggcctgccagaatgaccccaaattaaaataagtgccaggtcatttgagttattgacatcactcacctgtcagggcctttgggggcatgtccaatattttatttatgattttaggtcaggctgctttcagtgtttcaaagtaaggagaggctacctccctagtaaagcagcaaacatcaccaacacacatattacatctgctttggcaaaaaaggttgctgaagcagacatttgcatgttttgtttctgcttttctttgggattctgtcctcaccacatccttagctgataaagagtcactgatgttctccctctcccacagggaggcatgcttataagtggaatgttttctctctcacagagcaacccctgctttggttctcaagggaaaaaagacagcatttggtttaccttctatagtgttctcagtcatcatctgctctgcacagctctgtaaaagttgaagacaagacagagcaactataagattacactcatttctttccaactataataaaaaaaagctgtttccagtgtttctcaccaccgtctcttctctttagctctggccccaagtacaattctcagttttaaatggaagttagattaagtgtttaaaaatatatagagagagctctgtaacgattgctttaagagcagccatattcttctctttatggacctctgattcgtagagcaacttgcttataacttgatttctttctgtaaaatggaacttgcttgtcaatgccttacattctctgtctatatacagtggcccacaggcctggctactgctccccagagaatgctgactcacatttccatgaggcaaatccaagttgacttggtgggttgagtttcagctgcctaattgctgcttttggtggaagaggtcccaggtttggaccacagtttctgagctcttgggaaaacttggcagagttgaaaactgtctga

SEQ ID NO: 718681 - DNA, 2471 bp, Homo sapiens
tcctcgataccccgagtcttgtcccatgtaacagtctctgaggagccttggtgacactaattcatttatgtatccaatttattcaagaagtgtttgcttgggcattcattatttcagtacatggtgttaagtactgttggatttacaaagagtaatattcatagggaagattcaccgagtgactactaatccctatagtaagtgctttatatgcatttcttactttattcctcacaatcccacactatgaagtaggtatgatggttattattagattatttcaacttataggtgagaaaagtgagacttggattggccaacttaccaaggacataaatctattaaggggttttctggaatacaagtccagataatctgactccagatctcatgttttaaccactactcaaccctaagccaggacataaccagccctgaggtacttatactttagtggaggagggaaagcacatcaacttgtagagatactacaaggcagtgtgctgtagaacaggagcttaggagcttgaatgtttcctggaactgggctatataagggtgaaatcacccatggctgaggtaaccataggtagcttgagagggagacagaatttgagctataccttgaagggtaggtaggattttataattgtatcattatctcaattcaaacctgaataaaacaaaacaatttgtaattgtcctactctttctcatgccctagtcatggartcatttttttagctcaatactaccttatatgaagtcttttccaaagcatttgaaaagactactgaatttatttcctcttctgttcctacaactgccaaattgattcaaagcctcatgtcttcatcctttctgtgctgctataacacaatacataaagaatacataacagaattaataaagaaaataaattttctcacagtcctggaggctgggaagtccgagactgaggggctggcatctggtgagggccttactgcagtgttcttacaaattagaaacattatagtaagggatataggaattccctgtccctgtcgacttgaaggaattaaagcattttatcaacagaaaagtggaaacattttcattttagatagttaatttctgcttttcaatcacattttatttgacttttggacaactgacatgctgaagccaagaatcatttcagcactctggttccatgagtttggaggtagaagtttgggaatacatttttaaagaatgtactgtgtataaatgctgatctagcacatgataatcattctccattatcaagtaaataccatcactttttattaatattcttttggttgaattaacactaaacatttctacagtgaaattagtattctattaagtcaggagggtgaaaaaataattgcagaagaagtgaaaataaagcaacatgacatttgctgtgaaattgtcaccaaggagtttccataaagaaataatagataaaatgcaaacgtggaaaaggcaaataaatgttctatagcagtgttctccaacctttttggcacccaggaccagtttcatggaaggcattttttccatggacgggggaggggaggatggtttggggttgattcaaatgcattacatttatcattagattctcataaggcatgcacaacctagatccctcacatgcccagctcacaattattgtgtgctagattagctcacaattattgtgtgctagattagctcacaattattgtgtgctagattagctcacaatagggttcccactcctatgagaaacgaatgctgccgctgatctggcaagaggtggagctcaggcaataatgcttgctcacctcctgctgtgtggcccagttcctaacagtgctctgctgtggcccaggggttcgggacccctgttttataggtttttttccccctaaaaatggcttatgtaagattctcctgaaacttaaaaaaggcacatagaaatcatgattattgaaaaagaaattctgaattaggaattagtagtagcataactgaacaaggtctaatcaaccatctttttcatgagcactaagcactgactagagagttcaagaatgaaagatcctctgagtcctcgggtcttcctggctcctcctgtgccctgctgactcctccataagatgtctatccctttactttcatcctttctcttgtttctctcagaccctggccctacccaccatcataccctctcaacacacaatatgttcacaaatgctaagctcacccagtactccattcacagggaattggaatttgggttttctagaactccctgttcttgttgtttcatgcccttttagagctccagaagtcacagacttcagtccagactccgttccccagaaatgccaatgacagcaaaggcttccaagttcccaggtcagcttccctgcctccctatgaaaccatcaaaggctctgactccccaccctgga

SEQ ID NO: 718682 - DNA, 1597 bp, Homo sapiens
taatccttagcattttttagtaacaaagtgttttgttttgttttgttttttggcaagatcttactctgtcacccaggctggagtgcagtggcatgagctcggctcactgcaacacatgcctcccaggttcaagagattctcctgcctccgcctcccaagtagctgggattacaggcacccaccaccacgtctggctaatttttgtattttaatagagacagggtttcactgtgttgcccaggcttgtctcaaactcctgaactcatataatctgcctgccttggcctcccaaagtgctgagayttccggcatgagccaccatgcccagtaaatatttttaattaaggtgtgtacatttatttcttagacacaatgctattttacatgtaatagactacagtatagtataaatataacttttatatacaccaggaagcaaaaaaattcatgtgactctctttactataatatatgcttcattgcagtggtctggaactgtacccacaatatttctgaggtatgagtatattttaatttctcatttttaattttcacttggattttttaaaagttgatgcctaatgtaagaataaacttattaaatgtggatattttataagaaagtaaaatatttccaatttattttccatcattaccaacatgtattaaaattgatcttattagcataatttcccccagtgtaatatatagtaaggaattataccataattggataagagggatgactgctgaaattgtgtattatgctaagtatggagtattaaaacaaaatgtaaaataaactttaagtgtaaaactagtcaagtttaaagatgaaatcttattctggggctgaggatttaattgacgtggttgactagattagagacaaagaggtaatccaccaagttgtggggagatgatagagcattgaagattcagcccatgtggttggaggattggttacccacacagtattgagcgaataattaaatatatggaggataatgggatccacgctcctcactgtgggagaagaagttacaaatatggaaagggagagggcaagaattaaccctgggttggaatttttggtatcagtggagactcatgagttgttttctttgatatagttaaatgtagataccgatatagttaaaatacccattatatttgtctgcttgggctaccataacaaaataacacgggctgggtggcctaaacaacataaatttatttctcacagttctggaggctatgaagtccaagatagaggtgccagcagattcagtgtctggtgagggcctgctctctggttcatctgtaacaccttccagctgtgtccccacgtggcagaaagtacaaggcagctctcttgggcctcttttatacaggcaccaatcctatttatgagggctcagacttcctgatctaaccactcccaaaggcttcacctcctaatatcatctctttgatgaggaggtttcaacatataaatttggagtaaggagagggacaacattcagttcattgcagtaagaaagtgcttaaaaataatgacacagaaaccagcttgaatgagctcccacttgccaaa

SEQ ID NO: 718683 - DNA, 886 bp, Homo sapiens
cagtatgaaagtatcttataccagtaagaaagtactcaaaaaatgatgaggacccatcaaaaggacacagaaaccagcctgaaggggctcctactggtcaaatctgggaaatttgaccagtaaaataaataacggtggttacagattataactttcagaaaaatgcagaaatccatggttcagactaatataataaatgaaaatttaaaagtttgatggtgaatgggatatttacatagtcaaaatatctccccacaaaatgcttattaaaaaaggaaaaagaagccactttaaatakgtaaggtgggcatacatgtttggcggccatacttaatttttcctacctttttgtattctaaaaattttcataataaaagtcaaaataaaataaaatagaaggaaataaaaataatcacaggaagtattaggggaaaaacagtataacagaaattaatccaagaggcagggtgcagtagctcacgcctgtaatctttgggaggctgaggcaggcgaatcacctgaggtccaggattcgagaccagcctggccaacatggtgaaaacccatctctattaaaaatacaaaattagccaggcacagtggtgcacacctgtagtcccggctactcgggaggctgaggcaggagaattgcttgaacccaggaggcagtggttgcaatgagcctagatcaggccattgcactccagactgggcgacaagagcaaactctgtctccaaaaaaaaaaaaaaaaaaaaagaaagaaagaaagaaattaattcaagagcctgttctttgaaatacaatacattatcttatcaagaaaaaatagcaataggaaataactagagaatcaaatattttataagattttcaaggctgcttcac

SEQ ID NO: 718684 - DNA, 1246 bp, Homo sapiens
gctcaaaataaaaagtttaataaaaagatgtatgaggaatgaatttttaagatgaaaagaaaatgctaccatgtggagcagaaatggtttcagtgtcatttctcactggtagtgagaaagtatggagtgatcgagtacattatctctgtagtggacagaccccaacaatgatcagcagtttgactttataacatttctaaaactctctgagcttcagttttcctcatctatagtaagcaatgataatattgtctgccttataaataggtgtgaggattaaatacaatagtggctgtgaagtatctaatgtggtgcttgacctatagtaagaaagatcagtaaacgttagcaatcatcgttggtttttattgacctacttctatttctagggtgtttttttaatggatattagtatatatgttaatttaaataacatgtataactgagttactaggaaaaatgtttacttatatatgggaaaacaaaatagtaacaactaaaagaaatacaattatttttcactttagatcataaaatttcttaagagtggatttgattttggaagggttgctgcagagaaagctgccttgtttggatattactgatggtaggacagtattctgagcttaaaacacttgtatcctgttgctctgcatatttatggtataattaaagtggcttatatttgctttgaaaacccacttgaaggcattttattcttaaggcttttttttttattttcatcttttatttctttttggcttattgatccctcttcagtttctgtaactaattgtagcaactggactcacaaacgttgtttaattagcactacattaaggttgtagactttcttataaccacctgatgacgtgtgtattaaacaaacaaacattttgaagtgcattctttataaggtaaggcttgggaggaaagcygcccacaattaacctaggaattaaaaaggtaagcagaaacaacttattctgtggatgtagtaacagctcctttttactccagatattacccaaagcttacttgtaaacatagttttctgggacaagaatattgagatctgtaaattcatcttcagaccttagctgacttagctatgacatatataatgatgcatgtataagatgtgcttactgatttctgtggaaaaaatacaagctttgtttgcttctaaattatattttcttctattcttaattttgccaaaagtttaaaaactaagataagataa

SEQ ID NO: 718685 - DNA, 1935 bp, Homo sapiens
tttaaatctctaaaaatataaatcaaatcttcctttgaaacattagttaggagctatgctttaactttcatggacctctttttaaatagattttgaatcatcagtgcatcagaggaaatggtctttttcttcctttcattatgacctatggacagctggaaaaatatattacacttctttttgatacttcatctttttagttaggatactaggaggattttgaatatatgatttgattaacagaaacaaaacatggtggcgtccttccctgatttagctttctcatctgttccccatcttcctcctaattttctacatcagagaaatgtaacttcctgtttactttcttatgctgttaatttaaaggttctggataaaactggaagaggaaaattatagcttgacgtcgagaatttgaaaaggcaaaagcttgtggcatccaaaatgatattctttatagaatttagatagctcagaatgttacttttgccatatgagaaacactttacttttagattattcaaaatgaaagctggaattggaaagaaaagaaaagcaacagcaacaacaacaaagcctagtgggttaaaaatgtgctgacctagtccttcacaaatccaaaataaaagatttctttaaaaatagaagaaatactctagtgcttttactaatccatttaaaatctgcttaagcccctttcttactgtattttttctctcttttttcttactgtattttaaaacattttttgttacatgaaattagtgaacacaatccagaataattacagccatttgaaatacaattcagaataacaaccatttctaaattaggaaatttttatttatttataactagaactggaaattgaagaactgcctggatgtgtgctaatagtaaaccattattcccttaccaagccttgtatgtttacattcatattcacataaagggattggtccaagcaggttgtataccgtaatcatttaactttttactttgcttcaaataaattttattgtttaccttccatcagccacttggctagtcaggttaacttttcagagtgagggtaggaatgggaaactggagtggaaacgtggactgtgggggcagggttgaacagggggtggtaatagctacagcctgtacccaaatcttagccagcttctttttttaaaagtatgttatttttttcatcaggaagaggaaaaacagtataaatgattttttkttttttgagacagaggcctactctgttgcccaggctgtagtgcagcggtgcagtcacagctcactgcagcctcaacctcccaagcttaagtgatcctcccacctcagcctcctgagcagctgggaccacaggcacaagctaccatgcccagctaattttttgtgtttgtttgtttttttgtttttcttttttgtttgtttttttagagacgaggatctcacttgttgcccaggctggtctcaaactcctgggctcaagcaatcctcccgcctcggcctcccagagttctaggattacaggcatgagctactgtgcctggccaaaaacagtataaataatttaaagaaccctacatcaagactacaaataaagctagacagccttctaattacaattgagtgtattttttatacttaaaaaaatcacagtttttctaataatgaaagcaatctatattcatttatttaatttaaaaaagaaaagcaaatggaggaaataaacatctataatttcattatctacagataccctttgtatatctttccattcattttgtgcccaaatggtatcatattgtacatcccatttataacttctttcataaaacaatattatttctatcatttgatattggtaaatgttcacctaaaacataattttaatgcataatagaatttcattatagagatacatccttttat

SEQ ID NO: 718686 - DNA, 1525 bp, Homo sapiens
catcgctgaacacgggtgataacgagagtgtacattcaggcaagaggacgccaaggtaaatctataacgtatgaatatttttacagaaaagaatatagtacctgcaattatacaaactctaagtaaaaattcttcagtgtttttacattttataatgaccaaatcataatcacaaattttactaagttttgctgacttaggactgttagagtttctgttaaaataaattatgtaaagaggtgtctattcatctttcagtgcttgtcttttagaatttagaattattgacattgataacatactttttataagctatgaaacattaacagtaattatacatcagtaattgctaacatgattattaaatcacagtcagtagaatgagagtaccaacttctctagtctattaccaactaagacaaaggagttttccccattagaataattccaaagtgggttgcctatgacttaggaaggatctcttttgtattttctttctctaggattctttctctagattagaagctaaaagtcagtattttattactttatactataatatcatatcagaaaagaacatttctagtgacagtcatcatcttagagttcttatctttgtattaccatcctttgtgttatttgccagttttcacattgaaaaacattcactctttcaacagatatttatagaatgcttactatgttctaggaacttggatgtgtagctgcgaataagacaaacaatgttatattattttttattattaattttttttttttgagacggagtctttctccattgcccaggctagagtgcagtgacacgatctcggctcactgcaacccctgcctcctggcttcaagtgattcttctgcctcagcctcctgagtagctgggattacaggcgcgtaccaccatgcccagctaatttttgtatttttggtagagacgggctttcaccatattggccaggctgatctcgaacttctgaccttgtgatctacctgcctcggcctyccaaagtgctgggattacaggcatgagccaccgcgcccggccttatcatattatttttaggcctttaggttgattttgattgttactttcacgtataccctctgggccccattttttctctgtttgagacataaaacatattttattttctaattagatcagagtctgtagaaggcttcttatctccaagtcgttgtggcagtcgaaatggagaaaaagactgggagaatgcatcaacaacttcttcagtggcttctggaacagaatatacaggttagtgtctatacatttttagagaaacatttgaatttaacacactcataaatggagggtgtactaaagaaaattttattggctcacctttgggtcttaaacataggcaactaataaacagtgaatgcaggtggtcactttcaggtagttcagtaagtttctaaacaaaattagtgatgctacttatatctcatccctctaaccaatgctggccatttctgtgtgtagtttggg

SEQ ID NO: 718687 - DNA, 1525 bp, Homo sapiens
catcgctgaacacgggtgataacgagagtgtacattcaggcaagaggacgccaaggtaaatctataacgtatgaatatttttacagaaaagaatatagtacctgcaattatacaaactctaagtaaaaattcttcagtgtttttacattttataatgaccaaatcataatcacaaattttactaagttttgctgacttaggactgttagagtttctgttaaaataaattatgtaaagaggtgtctattcatctttcagtgcttgtcttttagaatttagaattattgacattgataacatactttttataagctatgaaacattaacagtaattatacatcagtaattgctaacatgattattaaatcacagtcagtagaatgagagtaccaacttctctagtctattaccaactaagacaaaggagttttccccattagaataattccaaagtgggttgcctatgacttaggaaggatctcttttgtattttctttctctaggattctttctctagattagaagctaaaagtcagtattttattactttatactataatatcatatcagaaaagaacatttctagtgacagtcatcatcttagagttcttatctttgtattaccatcctttgtgttatttgccagttttcacattgaaaaacattcactctttcaacagatatttatagaatgcttactatgttctaggaacttggatgtgtagctgcgaataagacaaacaatgttatattattttttattattaattttttttttttgagacggagtctttctccattgcccaggctagagtgcagtgacacgatctcggctcactgcaacccctgcctcctggcttcaagtgattcttctgcctcagcctcctgagtagctgggattacaggcgcgtaccaccatgcccagctaatttttgtatttttggtagagacgggctttcaccatattggccaggctgatctcgaacttctgaccttgtgatctacctgcctcggcctcycaaagtgctgggattacaggcatgagccaccgcgcccggccttatcatattatttttaggcctttaggttgattttgattgttactttcacgtataccctctgggccccattttttctctgtttgagacataaaacatattttattttctaattagatcagagtctgtagaaggcttcttatctccaagtcgttgtggcagtcgaaatggagaaaaagactgggagaatgcatcaacaacttcttcagtggcttctggaacagaatatacaggttagtgtctatacatttttagagaaacatttgaatttaacacactcataaatggagggtgtactaaagaaaattttattggctcacctttgggtcttaaacataggcaactaataaacagtgaatgcaggtggtcactttcaggtagttcagtaagtttctaaacaaaattagtgatgctacttatatctcatccctctaaccaatgctggccatttctgtgtgtagtttggg

SEQ ID NO: 718688 - DNA, 1122 bp, Homo sapiens
gattacatgaaatctatagagtaaatttatatatcatcttaccaatattaattcttcttatccatgaacatgggctgtctttcaatttatttataccatctttaatttttaaacattttataattttttacagtacatcttgtacttcttttattaaattatttcgtgagaattttattttaatactattttatatgaaattatttttttaatttcattttcacattgtttattgctagtgtatagaagcacaatagacttttatacattgattttatatcctgcttaaacattgatttggtatccttgcttaattaatctattagttctaatagactttttgtggattatttaggctatccaagatcatgtcatatgtgagtcgtaatagcttcacttcttcctttccagtctggatacttttaattctgttctttgcttttttttttttttttttaatagctacttggtttgataagaatctccagtacaagcataaaaataagtggcaagagcaggcatccatgtctcattcctgattgcagtgggagaaaagattctgttttttactgttaaacatgttagatgtgagtttttaaaaaaatgcccacgctatttatcaagtacccgtatttgtgcacccttgtcaagagtcaattgtccataaatgtaatggtttgttttgggactcttaatttcattccattgatatgcattgtatatttatgccagtatcatgtgggtttaatagaaatagagaggaagttctttttatttctagttgagtatttttaatgatgaaagaacattggatttttcaaaataatttttctgtatttattcggttatttttgtttgtttttctttttttttttctctctctactggtctttttccttttagtgtggtacattgcatttactgatttttgtatgtgaaaccaactttwttttcctaggataaagcccactggatcatggtgggaatctgttaatgtttgcctaaatttgctttgctaatattttgttgaagatttctgtaaagttggtagtgatgtctcctctttcattcctgattaaaacatatgttttaaaaaatgataattatgaccgggtgagaaaa

SEQ ID NO: 718689 - DNA, 720 bp, Homo sapiens
atttcctctttagaagtcctatctccaaatacagtcacattctccactactgggagtcaggacttcaatatatgaatttcgggagacccagttcagcccataacaatgtgaacatctctgtatctatgattttgtgtacatccatagttatttccttaggataaatttctagaggtgagattgataggtcaaagtgagaccacagtttgaaggcttttggtaataacatcaaattgccctggaaaagttggcacgatctatgccctcaccaagcagtacaggaaagtaactttagccctgtttccttcattgtgctttgtagttttgtgatctctttttattggtttcatatttggcagatttgcctatctccacatgagttcagatagcccaacatgttagtgagaccaagactgtaagtttaatagcttcagtaggagtttttatcagtagttatataaacaaagagaatatcctatacatagtaaatcaggactgtcatttctatacacaaaggacagcaaagttagattttttattgatagaaatagtgccttgatttttatatcaagcatttaatactctattttatactctacgacatctcaataaatgtttgttgattatcttttaaayaccaactaattcaattagaaatcttctggtttcaagtgacagaaaacccaactctaaatggcttaagcaaaaaaaaaaaaaaaa

SEQ ID NO: 718690 - DNA, 858 bp, Homo sapiens
aggttcataaatcctgctttgttatggagaaaatataaaaattgcattcttaaatagaaaggttttcaacaagaggctaatgtaaaatttcttttcagctttggatgcctgatggccttgcacagatttgcccaacagagttgaactgtctggacagtgttttatgtgggtgctttcaagttagcacctgccagcttctttaaagtcctgtctttcacaataataaccacaatacagttaaaaataatggatgcaggaattctgtattccattcatattcacttgctttcagcaggatgaagcacttgaagggaaggcggtgcatctctcctctcgctttccacccacctttatcctggaaattcagactgccctgttgctattcacatgaagcctcagtacaagccttgctcatagcaaaagaaggcacaggccttacttgacattatacgcagaaaccctgatatcctacaggacctcctaatggctgaagcctagaataccattatgagtgcaatctctgcagcttccttccttctctgtgaaattgcaagaatttggggaaaggataatactttaagctgtaaattatatcttaatgcaaaggttaaaatcctagtgtttacagggctagataggaggaggggactaaacagcctaactcacctccagccaaaaggattcatgtaacatgrgcccaatgccttctgactttaagagaagccagaaatccagatatttgtgtgaaatcacccaatttttttttaaatgatgacaactgactgattttctatgatgctgtacagatcaaaccaaacccaccttcaggctagcagcaaaacatgtttgcaaccttcc

SEQ ID NO: 718691 - DNA, 1368 bp, Homo sapiens
atccacattttagccagtctcaacctcccgaccttgcctccaccattccacagctttagcaatrcgtgcatacatggtctttgcacaggtcacttaacaagacagaagcactgtttactaagttgcatggcatttccaacatgcaccacattctcaactggcactctgctgggccccagacacccctgtgggggcttctctaagcctcctacacagccctctcttagacaggctgaaggtgcccatggaggacagacggcgtgggggcaggggggagcgggcgggtcttgcacggagtttggatcaagagcataagcttttctgcaagcaagccctgcatccaaactccaactctgccaaccaggaaaagtgtgattttagtcctctgttccctcaaatataaaatggacataacaatagcgctcacatcatagggttactgccagcatacatgagaatgtacataaagctccatgcctggaacttgggtaggggaatctgtgccttcattattgttaagactatctactacatatgtcccaaactccctggctcttctggagctctcctggccactttctgcccctgcggatctgaaaagacaggcaggttatttgtgaaagggacaaagtaggcaatatggttaccgtggtgcaatctaaggaaccatgacccccacactgtggtcttccaatggcatactgggtgacgggccatttggcgagctggtattgagtgcccactacatgccagtcattgcattagatgctagggacacaaggacagtggtctgtcctcttgaggcattaaaatctcatggagaaacagacctatgacaaatccccaattaaaaaaaaataacttcggcttttaaattaaagtcaagggcaatatgattgacaggacacagtattaaacatattcccacttaccattaaaatagattctgggacaaactctccatattatatgatgaggcctctgacagaggtgagccccaagcacagacatgacagaaacatttctaaccccaacccagagggtcatagaaagacctcagaaaatgcagcacccgagaagagtctggaagaaggagttgaaggttaccaggtgggctgggggtaagggaggagagcggggaaggtgtgaaacagttacagctgagcactggaagcagaaagtgaaaatggaaaaatgagtaaaaggcagggcctaagagtctcttagatcacaataaaaactttaggctttattccgaatctcctaaaaatgtgagaagagaagtaaaatggttaaattttgattaaaaagaataattctgatggtagtatgagaaatggataggaagcaggaagcctggtgataggg

SEQ ID NO: 718692 - DNA, 1368 bp, Homo sapiens
atccacattttagccagtctcaacctcccgaccttgcctccaccattccacagctttagcaatgcgtgcatacatggtctttgcacaggtcacttaacaagacagaagcactgtttactaagttgcatggcatttccaacatgcaccacattctcaactggcactctgctgggccccagacacccctgtgggggcytctctaagcctcctacacagccctctcttagacaggctgaaggtgcccatggaggacagacggcgtgggggcaggggggagcgggcgggtcttgcacggagtttggatcaagagcataagcttttctgcaagcaagccctgcatccaaactccaactctgccaaccaggaaaagtgtgattttagtcctctgttccctcaaatataaaatggacataacaatagcgctcacatcatagggttactgccagcatacatgagaatgtacataaagctccatgcctggaacttgggtaggggaatctgtgccttcattattgttaagactatctactacatatgtcccaaactccctggctcttctggagctctcctggccactttctgcccctgcggatctgaaaagacaggcaggttatttgtgaaagggacaaagtaggcaatatggttaccgtggtgcaatctaaggaaccatgacccccacactgtggtcttccaatggcatactgggtgacgggccatttggcgagctggtattgagtgcccactacatgccagtcattgcattagatgctagggacacaaggacagtggtctgtcctcttgaggcattaaaatctcatggagaaacagacctatgacaaatccccaattaaaaaaaaataacttcggcttttaaattaaagtcaagggcaatatgattgacaggacacagtattaaacatattcccacttaccattaaaatagattctgggacaaactctccatattatatgatgaggcctctgacagaggtgagccccaagcacagacatgacagaaacatttctaaccccaacccagagggtcatagaaagacctcagaaaatgcagcacccgagaagagtctggaagaaggagttgaaggttaccaggtgggctgggggtaagggaggagagcggggaaggtgtgaaacagttacagctgagcactggaagcagaaagtgaaaatggaaaaatgagtaaaaggcagggcctaagagtctcttagatcacaataaaaactttaggctttattccgaatctcctaaaaatgtgagaagagaagtaaaatggttaaattttgattaaaaagaataattctgatggtagtatgagaaatggataggaagcaggaagcctggtgataggg

SEQ ID NO: 718693 - DNA, 1368 bp, Homo sapiens
atccacattttagccagtctcaacctcccgaccttgcctccaccattccacagctttagcaatgcgtgcatacatggtctttgcacaggtcacttaacaagacagaagcactgtttactaagttgcatggcatttccaacatgcaccacattctcaactggcactctgctgggccccagacacccctgtgggggcttctctaagcctcctacacagccctctcttagacaggctgaaggtgcccatggaggacagacggcgtgggggcaggggggagcgggcgggtcttgcacggagtttggatcaagagcataagcttttctgcaagcaagccctgcatccaaactccaactctgccaaccaggaaaagtgtgattttagtcctctgttccctcaaatataaaatggacataacaatagcgctcacatcatagggttactgccagcatacatgagaatgtacataaagctccatgcctggaacttgggtaggggaatctgtgccttcattattgttaagactatctactacatatgtcccaaactccctggctcttctggagctctcctggccactttctgcccctgcggatctgaaaagacaggcaggttatttgtgaaagggacaaagtaggcaatatggttaccgtggtgcaatctaaggaaccatgacccccacactgtggtcttccaatggcatactgggtgacgggccatttggcgagctggtattgagtgcccactacatgccagtcattgcattagatgctagggacacaaggacagtggtctgtcctcttgaggcattaaaatctcatggagaaacagacctatgacaaatccccaattaaaaaaaaataacttcggcttttaaattaaagtcaagggcaatatgattgacaggacacagtattaaacatattcccacttaccattaaaatagattctgggacaaactctccatattatatgatgaggcctctgacagaggtgagccccaagcacagacatgacagaaacatttctaaccccaacccagagggtcatagaaagacctcagaaaatgcagcacccgagaagagtctggaagaaggagttgaaggttaccaggtgggctgggggtaagggaggagagcrgggaaggtgtgaaacagttacagctgagcactggaagcagaaagtgaaaatggaaaaatgagtaaaaggcagggcctaagagtctcttagatcacaataaaaactttaggctttattccgaatctcctaaaaatgtgagaagagaagtaaaatggttaaattttgattaaaaagaataattctgatggtagtatgagaaatggataggaagcaggaagcctggtgataggg

SEQ ID NO: 718694 - DNA, 1368 bp, Homo sapiens
atccacattttagccagtctcaacctcccgaccttgcctccaccattccacagctttagcaatgcgtgcatacatggtctttgcacaggtcacttaacaagacagaagcactgtttactaagttgcatggcatttccaacatgcaccacattctcaactggcactctgctgggccccagacacccctgtgggggcttctctaagcctcctacacagccctctcttagacaggctgaaggtgcccatggaggacagacggcgtgggggcaggggggagcgggcgggtcttgcacggagtttggatcaagagcataagcttttctgcaagcaagccctgcatccaaactccaactctgccaaccaggaaaagtgtgattttagtcctctgttccctcaaatataaaatggacataacaatagcgctcacatcatagggttactgccagcatacatgagaatgtacataaagctccatgcctggaacttgggtaggggaatctgtgccttcattattgttaagactatctactacatatgtcccaaactccctggctcttctggagctctcctggccactttctgcccctgcggatctgaaaagacaggcaggttatttgtgaaagggacaaagtaggcaatatggttaccgtggtgcaatctaaggaaccatgacccccacactgtggtcttccaatggcatactgggtgacgggccatttggcgagctggtattgagtgcccactacatgccagtcattgcattagatgctagggacacaaggacagtggtctgtcctcttgaggcattaaaatctcatggagaaacagacctatgacaaatccccaattaaaaaaaaataacttcggcttttaaattaaagtcaagggcaatatgattgacaggacacagtattaaacatattcccacttaccattaaaatagattctgggacaaactctccatattatatgatgaggcctctgacagaggtgagccccaagcacagacatgacagaaacatttctaaccccaacccagagggtcatagaaagacctcagaaaatgcagcacccgagaagagtctggaagaaggagttgaaggttaccaggtgggctgggggtaagggaggagagcggggaaggtgtgaaacagttacagctgagcactggaagcagaaagtgaaaatggaaaaatgagtaaaaggcagggcctaagagtctcttagatcacaataaaaactttaggctttattcygaatctcctaaaaatgtgagaagagaagtaaaatggttaaattttgattaaaaagaataattctgatggtagtatgagaaatggataggaagcaggaagcctggtgataggg

SEQ ID NO: 718695 - DNA, 1368 bp, Homo sapiens
atccacattttagccagtctcaacctcccgaccttgcctccaccattccacagctttagcaatgcgtgcatacatggtctttgcacaggtcacttaacaagacagaagcactgtttactaagttgcatggcatttccaacatgcaccacattctcaactggcactctgctgggccccagacacccctgtgggggcttctctaagcctcctacacagccctctcttagacaggctgaaggtgcccatggaggacagacggcgtgggggcaggggggagcgggcgggtcttgcacggagtttggatcaagagcataagcttttctgcaagcaagccctgcatccaaactccaactctgccaaccaggaaaagtgtgattttagtcctctgttccctcaaatataaaatggacataacaatagcgctcacatcatagggttactgccagcatacatgagaatgtacataaagctccatgcctggaacttgggtaggggaatctgtgccttcattattgttaagactatctactacatatgtcccaaactccctggctcttctggagctctcctggccactttctgcccctgcggatctgaaaagacaggcaggttatttgtgaaagggacaaagtaggcaatatggttaccgtggtgcaatctaaggaaccatgacccccacactgtggtcttccaatggcatactgggtgacgggccatttggcgagctggtattgagtgcccactacatgccagtcattgcattagatgctagggacacaaggacagtggtctgtcctcttgaggcattaaaatctcatggagaaacagacctatgacaaatccccaattaaaaaaaaataacttcggcttttaaattaaagtcaagggcaatatgattgacaggacacagtattaaacatattcccacttaccattaaaatagattctgggacaaactctccatattatatgatgaggcctctgacagaggtgagccccaagcacagacatgacagaaacatttctaaccccaacccagagggtcatagaaagacctcagaaaatgcagcacccgagaagagtctggaagaaggagttgaaggttaccaggtgggctgggggtaagggaggagagcggggaaggtgtgaaacagttacagctgagcactggaagcagaaagtgaaaatggaaaaatgagtaaaaggcagggcctaagagtctcttagatcacaataaaaactttaggctttattccgaatctcctaaaaatgtgagaagagaagtaaaatggttaaattttgattwaaaagaataattctgatggtagtatgagaaatggataggaagcaggaagcctggtgataggg

SEQ ID NO: 718696 - DNA, 1368 bp, Homo sapiens
atccacattttagccagtctcaacctcccgaccttgcctccaccattccacagctttagcaatgcgtgcatacatggtctttgcacaggtcacttaacaagacagaagcactgtttactaagttgcatggcatttccaacatgcaccacattctcaactggcactctgctgggccccagacacccctgtgggggcttctctaagcctcctacacagccctctcttagacaggctgaaggtgcccatggaggacagacggcgtgggggcaggggggagcgggcgggtcttgcacggagtttggatcaagagcataagcttttctgcaagcaagccctgcatccaaactccaactctgccaaccaggaaaagtgtgattttagtcctctgttccctcaaatataaaatggacataacaatagcgctcacatcatagggttactgccagcatacatgagaatgtacataaagctccatgcctggaacttgggtaggggaatctgtgccttcattattgttaagactatctactacatatgtcccaaactccctggctcttctggagctctcctggccactttctgcccctgcggatctgaaaagacaggcaggttatttgtgaaagggacaaagtaggcaatatggttaccgtggtgcaatctaaggaaccatgacccccacactgtggtcttccaatggcatactgggtgacgggccatttggcgagctggtattgagtgcccactacatgccagtcattgcattagatgctagggacacaaggacagtggtctgtcctcttgaggcattaaaatctcatggagaaacagacctatgacaaatccccaattaaaaaaaaataacttcggcttttaaattaaagtcaagggcaatatgattgacaggacacagtattaaacatattcccacttaccattaaaatagattctgggacaaactctccatattatatgatgaggcctctgacagaggtgagccccaagcacagacatgacagaaacatttctaaccccaacccagagggtcatagaaagacctcagaaaatgcagcacccgagaagagtctggaagaaggagttgaaggttaccaggtgggctgggggtaagggaggagagcggggaaggtgtgaaacagttacagctgagcactggaagcagaaagtgaaaatggaaaaatgagtaaaaggcagggcctaagagtctcttagatcacaataaaaactttaggctttattccgaatctcctaaaaatgtgagaagagaagtaaaatggttaaattttgattaaaaaraataattctgatggtagtatgagaaatggataggaagcaggaagcctggtgataggg

SEQ ID NO: 718697 - DNA, 1996 bp, Homo sapiens
taaaagtaaaatacaaaaaaagaaagaaccaacacatttccaagatgctcaaaagtaaaaacaggtttctctcacagcccctttcataaaacttaattttcaatccttcacaacaatgaagaggaaataaacacctttcttatacttaagcagtgagggtaaaaaggtagatgatgcatattgtaagcctagaaaagtccttgagagaaaacaggttagatctattaacaaaacatcatcacttttcacaatttccccttctcatgtttccattgcacttctgaagacagatctccaactcttccagagtcccacacactgcctaaagcaggacagaaaaaccaactgccaaaggccatgcaaaactcaagatcagaaaccagaaccggaaactgtcatgactatgatacaagcaacaaatgattcatcctgagaaggcagtcaagtcccatttgtttctcaggactcccaaaagacgtccaggcagaagagttctgggacccgagtcagcatcaagtgccttggacatttactgagcatcctggctgcccagagccccagtaaggaggtagaaatccactaggaagcaaatgagaacaaaaatttacaacacaagccagaagtgccacaacagagggttcagaaaagcacctccagaacccagagaaaaaatgggctcaccctgcttgagaagccagggaggtaaatggggtcttcacagatgaacaggagcttgtctaacattgcaggctgctggtagagagggagcatgagcaaaggccagaggtctccaaggcctggtaaggagttacatggctgcaagtagggcacctgctgggcaggggagggagcccagggagttggggcgggggggcggcggtgagagaccacgaatggccttgcacatgcactaaggagcttagacttgaccctgtggagcagcacttctcaaactagcagtggtgaagggccagttgttgaaacggccaacccatcatggatgatgctcacgctccctatttatcctttcctcatcattcacaggtaacacaccacacacactgatgcaggcacaacgccaccactatagacaacaccaagagcatttcagcaggcaggggtacagctaggtccaattggtctttttgggggtgtatctgagggcagtgtgatgagtgaacgagagggctaaggtgcggggggcatggatggtggtcaggaggctgctgcattcacctaggaaataagtgccaagagcctggctaaggcaccagcaatggggccagagaggagtcaggtttgcagggtccttcccagtctgcatgacagggcttggtgaccactgggcatcaagggggaagtagcacagcatcattctattttctctagtttctatactgcttggccgtgattctgtcagcacagggaggaactgtggcaagaggcacatgtttagaaagagacactcacgtgagaataaaattgtcttyaaatttcaaataactttgttctgactcttccctcctaagaaatctccagtattatgtcctgttttgttcacctgctgtatactcagaacctggagtagtatctggatagctttatcatttatctaaatgtccactcaagggacatctccggagtctgggcccagctggctaggagagtagtcatattgcatatttagcagattttcatgattagtaaagaatggttctaatttgacccagctcttcatgcctactattattggaaaggagacagaaaagaatagagcagggttgctatagaataacctgtaatttgatggggatttgagtgttaaatatcagcattaactagtattttaaggtgagctcaagaagccctacaccagccctggaaatactaaagaaagtcctctcaactccatcaggccaaagcaagctaatctaaaacaaaacatgatggcaacattctcagtttgcatttcgtctaaaagtacagagatgaaata

SEQ ID NO: 718698 - DNA, 655 bp, Homo sapiens
aacataatcagacagctaaaatataatgtgataaatacataataggaaatcagcagataaataaacatgattacaaatactttattttattgattatagtgaaatgcctcaaaaaattccattttagtctttgtaaagtcctacagtttagatacacaaacccatgcatgtctgcttaggcagaaggagcagggaattactatttgttgaatgcctattaggtgctgtattggttcttgtactgctataaagaatacctgaggctgggcaatttataaagaaaagaggtttaattggctcatagttccacaggctgtacaggaggcatggcaggggaggcctcaggaaactwacaatcatggcagaaggtgaacaggaagcaggcacattgaacattgctggagcaggaggaaaagtggggtggggaggtgccacacacttttagacaaccagatctcacgagaactctatcatgagaacagctctagggagacagtgataaaccattagaaaccacccccatgattcaatcacctcccaccaggtcccacctccaacataacagattacatttcaacatgagatttggatggggatacagatccaaaccatatccggtgccaagcaatatatacacattatttcattgtcagag

SEQ ID NO: 718699 - DNA, 840 bp, Homo sapiens
ttttgttttgtttttagttacaaagagtgctactcaaatatccgtctaccttatttctggacatacatgtacaagagattttctagggcttaaaattaagaatagtgttgctggttcataggttcatcctcagacgatgccacatttttttcaaaagtgtgtaagccaaatttacattcccatcagtagcatttgagttcctattactatatatcctaaccaatacttgatattatctaacattgtaacttttaccaactagtggatgtgaaatgataggtagtcgtggattaaatttgcatttccctgattaccaaagaggttgaatatctctttaccaaagaggttcatgtgtctgttagccatttctcttccctcctctgtaaagttacatattcaagtcttttatcattttcctattggattcttttccttactgatttctaagggtatttgtgtgttctgaatgctttatcatttsttaatatcacaaatatctcctctgaatttgagacttctcatttttcccctacaaacagaagttcttaaatttaatgtagttaaatgattcagtcttttcctttatcaatataggttaaacaaagggtgggggaggcaaaaaaaaaaaaaaaaaaaagctttttctactttaaaaaaatgtgcctgcaagagccggtgagtgcctgtaatcccagctacacaggaggccaaagtagaatgatggcttgaggccagaagttcaagtctacgtagtgagaccctatctcttaaaaaaaaaaatccatttgcaattgatttttgtgtatggttcaaggtagggatcagtttgatttttgtcca

SEQ ID NO: 718700 - DNA, 840 bp, Homo sapiens
ttttgttttgtttttagttacaaagagtgctactcaaatatccgtctaccttatttctggacatacatgtacaagagattttctagggcttaaaattaagaatagtgttgctggttcataggttcatcctcagacgatgccacatttttttcaaaagtgtgtaagccaaatttacattcccatcagtagcatttgagttcctattactatatatcctaaccaatacttgatattatctaacattgtaacttttaccaactagtggatgtgaaatgataggtagtcgtggattaaatttgcatttccctgattaccaaagaggttgaatatctctttaccaaagaggttcatgtgtctgttagccatttctcttccctcctctgtaaagttacatattcaagtcttttatcattttcctattggattcttttccttactgatttctaagggtatttgtgtgttctgaatgctttatcatttcttaatatcacaaatatctcctctgaatttgagacttctcatttttcccctacaaacagaagttcttaaatttaatgtagttaaatgattcagtcttttcctttatcaatataggttaaacaaagggtgggggaggcaaaaaaaaaaaaaaaaaaaagctttttctactttaaaaaaatgtgcctgcaagagcyggtgagtgcctgtaatcccagctacacaggaggccaaagtagaatgatggcttgaggccagaagttcaagtctacgtagtgagaccctatctcttaaaaaaaaaaatccatttgcaattgatttttgtgtatggttcaaggtagggatcagtttgatttttgtcca

SEQ ID NO: 718701 - DNA, 649 bp, Homo sapiens
atcaaacagcccacatttaagcaaactcatcacttatatttaatataataactttatgtttaccaatttccaacaaacatggaacagattaaccaaatgtgtgcccacgtgtatgtaagtgtgaggttttttttgccaaatcccagtaacactattgatttcttcccttacatrtagataagatccttgagcaaggcccatactgtatttgatgtgacatcaacacttgtgttatattacaaagattttacttcatatccacaagtcctcagcatagtgcctagcacacagtaagctctcagtgtttgagaaattaaaaaaagatgatatatgagaaagaaacgtatcagtgcaaaattccactggcatttgataaaaagcaataaagttcagacctgatgtaaccatgtatttacataactgaatgttaaaagacgattactagaattaagaaagcacagctagttttggcaatataagtatgaagaagtctcacaaatattttcacatttacattacagccactggagtaataaaagcctgttcaggttatataaatattcttaaattttaggagttctgtattttatactggggaataaaatataaccaaaactttcataaagtcaaatctctgcagacctttaaa

SEQ ID NO: 718702 - DNA, 649 bp, Homo sapiens
atcaaacagcccacatttaagcaaactcatcacttatatttaatataataactttatgtttaccaatttccaacaaacatggaacagattaaccaaatgtgtgcccacgtgtatgtaagtgtgaggttttttttgccaaatcccagtaacactattgatttcttcccttacatatagataagatccttgagcaaggcccatactgtatttgatgtgacatcaacacttgtgttatattacaaagattttrcttcatatccacaagtcctcagcatagtgcctagcacacagtaagctctcagtgtttgagaaattaaaaaaagatgatatatgagaaagaaacgtatcagtgcaaaattccactggcatttgataaaaagcaataaagttcagacctgatgtaaccatgtatttacataactgaatgttaaaagacgattactagaattaagaaagcacagctagttttggcaatataagtatgaagaagtctcacaaatattttcacatttacattacagccactggagtaataaaagcctgttcaggttatataaatattcttaaattttaggagttctgtattttatactggggaataaaatataaccaaaactttcataaagtcaaatctctgcagacctttaaa

SEQ ID NO: 718703 - DNA, 1025 bp, Homo sapiens
tatcatccaagagcaccagctttgaaatgtcattttaaaatataagcaactcttttttatcattagcttgaatttttgagttgcattttagagttttttaaagaatgcaatgccattttaatgttacagaattaatactgagttgtgtgtgacgtatttgctaccaccagactaaggaccctacgattagtctggcaaaagaaaagtctgtttctcaaagaagctggcattaacgggtcagacgtgcacacgactttttggaaaggcgatggcaaygtctcaactacatccagagaggagacagtccagggacacactggttgtgcaccagtcacaggccctgcagggaaatgtgtgggccctggtcttcctcatgtgtatgatggggatgagggcagttgctttccttagggagcaaatgtaaggattaagtgagttaatgtctgtgaagcatttataccgagcttgctttgtgccaggcactactctgttaaattaaagacaaattcagaagcataaacagcaaagtaatgacatcaagaccccttggggctggaagggcccacacaaggatctccttcagccgttgtccaacatgagctcacagcagcatcagctggagggctccacgaaacagctccagagcttctgtttttggaggtgtggggtatgccgagaatctgcatttctagcaggtgagggtgcggctactgacagcccgacttctttcactgaggccgccgcttgagcagccttaggtgcaggcctgcagtgtcgggacgttagtttgcactcactttgaggctgaacccctgcgtgtaacatggccctccccgttctctttgtcttctttttccgttgatttctgctcctgcccgcaatcccggttccagctgtgtggtgcagtttggaaggtcagatgggcgggggaggaaggttccagaaacatgcatgtggcgtgtcaggaagtggaggctcctgagtggatctggagagggctgggctgatggtaaatgagcacagcg

SEQ ID NO: 718704 - DNA, 1025 bp, Homo sapiens
tatcatccaagagcaccagctttgaaatgtcattttaaaatataagcaactcttttttatcattagcttgaatttttgagttgcattttagagttttttaaagaatgcaatgccattttaatgttacagaattaatactgagttgtgtgtgacgtatttgctaccaccagactaaggaccctacgattagtctggcaaaagaaaagtctgtttctcaaagaagctggcattaacgggtcagacgtgcacacgactttttggaaaggcgatggcaacgtctcaactacatccagagaggagacagtccagggacacactggttgtgcaccagtcacaggccctgcagggaaatgtgtgggccctggtcttcctcatgtgtatgatggggatgagggcagttgctttccttagggagcaaatgtaaggattaagtgagttaatgtctgtgaagcatttataccgagcttgctttgtgccaggcactactctgttaaattaaagacaaattcagaagcataaacagcaaagtaatgacatcaagaccccttggggctggaagggcccacacaaggatctccttcagcygttgtccaacatgagctcacagcagcatcagctggagggctccacgaaacagctccagagcttctgtttttggaggtgtggggtatgccgagaatctgcatttctagcaggtgagggtgcggctactgacagcccgacttctttcactgaggccgccgcttgagcagccttaggtgcaggcctgcagtgtcgggacgttagtttgcactcactttgaggctgaacccctgcgtgtaacatggccctccccgttctctttgtcttctttttccgttgatttctgctcctgcccgcaatcccggttccagctgtgtggtgcagtttggaaggtcagatgggcgggggaggaaggttccagaaacatgcatgtggcgtgtcaggaagtggaggctcctgagtggatctggagagggctgggctgatggtaaatgagcacagcg

SEQ ID NO: 718705 - DNA, 1025 bp, Homo sapiens
tatcatccaagagcaccagctttgaaatgtcattttaaaatataagcaactcttttttatcattagcttgaatttttgagttgcattttagagttttttaaagaatgcaatgccattttaatgttacagaattaatactgagttgtgtgtgacgtatttgctaccaccagactaaggaccctacgattagtctggcaaaagaaaagtctgtttctcaaagaagctggcattaacgggtcagacgtgcacacgactttttggaaaggcgatggcaacgtctcaactacatccagagaggagacagtccagggacacactggttgtgcaccagtcacaggccctgcagggaaatgtgtgggccctggtcttcctcatgtgtatgatggggatgagggcagttgctttccttagggagcaaatgtaaggattaagtgagttaatgtctgtgaagcatttataccgagcttgctttgtgccaggcactactctgttaaattaaagacaaattcagaagcataaacagcaaagtaatgacatcaagaccccttggggctggaagggcccacacaaggatctccttcagccgttgtccaacatgagctcacagcagcatcagctggagggctccacgaaacagctccagagcttctgtttttggaggtgtggggtatgccgagaatctgcatttctagcaggtgagggtgcggctactgacagcccgacttctttcactgaggccgcygcttgagcagccttaggtgcaggcctgcagtgtcgggacgttagtttgcactcactttgaggctgaacccctgcgtgtaacatggccctccccgttctctttgtcttctttttccgttgatttctgctcctgcccgcaatcccggttccagctgtgtggtgcagtttggaaggtcagatgggcgggggaggaaggttccagaaacatgcatgtggcgtgtcaggaagtggaggctcctgagtggatctggagagggctgggctgatggtaaatgagcacagcg

SEQ ID NO: 718706 - DNA, 1025 bp, Homo sapiens
tatcatccaagagcaccagctttgaaatgtcattttaaaatataagcaactcttttttatcattagcttgaatttttgagttgcattttagagttttttaaagaatgcaatgccattttaatgttacagaattaatactgagttgtgtgtgacgtatttgctaccaccagactaaggaccctacgattagtctggcaaaagaaaagtctgtttctcaaagaagctggcattaacgggtcagacgtgcacacgactttttggaaaggcgatggcaacgtctcaactacatccagagaggagacagtccagggacacactggttgtgcaccagtcacaggccctgcagggaaatgtgtgggccctggtcttcctcatgtgtatgatggggatgagggcagttgctttccttagggagcaaatgtaaggattaagtgagttaatgtctgtgaagcatttataccgagcttgctttgtgccaggcactactctgttaaattaaagacaaattcagaagcataaacagcaaagtaatgacatcaagaccccttggggctggaagggcccacacaaggatctccttcagccgttgtccaacatgagctcacagcagcatcagctggagggctccacgaaacagctccagagcttctgtttttggaggtgtggggtatgccgagaatctgcatttctagcaggtgagggtgcggctactgacagcccgacttctttcactgaggccgccgcttgagcagccttaggtgcaggcctgcagtgycgggacgttagtttgcactcactttgaggctgaacccctgcgtgtaacatggccctccccgttctctttgtcttctttttccgttgatttctgctcctgcccgcaatcccggttccagctgtgtggtgcagtttggaaggtcagatgggcgggggaggaaggttccagaaacatgcatgtggcgtgtcaggaagtggaggctcctgagtggatctggagagggctgggctgatggtaaatgagcacagcg

SEQ ID NO: 718707 - DNA, 1747 bp, Homo sapiens
ctgggattacagacatgagccactgtacccagccataaaatttttaatgaaatatttctacattttttttatgaactatgtattcaaaatctggtacttagggctttacctcaaatttagttgctaagtttccataaaaaatactggaactatatttatatttcataaaatttacagttgaaaagtagatttcacatacccaagtcattccaaatatagttcttaattttccaaaaattggatcaaatgccaggtttaaattttagattaattttaattaaacagtattaaaaatcagttcctttcttgtgctagtcagatttcaagtgcccagaaaccacgtgtggctaggggctaccatattgcatagttctagactacccaaggatgtttggactgaatactgaaagtactcagttctaggagggaagcactgagtaactttaaacaggaaaatgattgagcaggtgttttagagaggtcatttttagaaaggatgattttttttcatatctgctaaaagatgttattcaaaactttaggcagaatggagaggaagagaaaaggaaaaacagttacttaaaacgtttaagtggacagactgcacgtactatgggaagtcctatttatagacaggccattaatgtgctgattataagtcatccttatatttttgctgaagtttgtccttaaatctctctacagtcaatgtatatatagtcctccttctttctatggctttgataacgaggagaactgtgtggcctgactggatatgtgaactggatgacccccatgagcagtcttttacataaccccracttttgaaaactgcatttgatgattttccccagatcatgcccaggttctgcacactgaggtctaccttgctgagccgctgctgttatcctctggcagtgagggatccctgtggtgtgaggctgtgtcttgtttaacaggggacaagattagaaaaggaaggtgctggcacacagaccgtgatcctaaaccatgctgtaacagcttggctttgtcccagaggttccatggtgccaatacatgaaaaataaaatgaaactcaagcaatggtttcaactgtctgggaaaattcaggaaaaacacaactagacataggcaatgtttggaccagccaactgttttatgatttacaaatccatggaactaaagaggaagagtaaacaaaatgtgtaattcccaaagcagtgtaattgctttcctcatttagtcatatgttctgttgactgttgggtagaaatattatcactgactgctctacttttccttcaagaagtcaggtaaaagctcagaaatttactatttcctgttcacttgcttttagctttttttttttttttttttttgagactgagtttcattctgtcactctgctcactgcaacctccgcctctcggggtcaagcgattctcctgccttagcctcccgagtagcaggaattacaggtacctgccaccacacccgtctactttttgtatttttagtagagactgggtttcaccatgttggccaggctggtcttgaactcctgacctcaggtgatccgccctcctcggcctcccaaagtcctgggattacaggcatgagccaccgtgcctggcctgcttttagctttttaataaaataatattttgctacactggtcagaacatcacttactgtgggatttttatatcatgtctcagaccaaaaatggtaaattctttttttt

SEQ ID NO: 718708 - DNA, 1747 bp, Homo sapiens
ctgggattacagacatgagccactgtacccagccataaaatttttaatgaaatatttctacattttttttatgaactatgtattcaaaatctggtacttagggctttacctcaaatttagttgctaagtttccataaaaaatactggaactatatttatatttcataaaatttacagttgaaaagtagatttcacatacccaagtcattccaaatatagttcttaattttccaaaaattggatcaaatgccaggtttaaattttagattaattttaattaaacagtattaaaaatcagttcctttcttgtgctagtcagatttcaagtgcccagaaaccacgtgtggctaggggctaccatattgcatagttctagactacccaaggatgtttggactgaatactgaaagtactcagttctaggagggaagcactgagtaactttaaacaggaaaatgattgagcaggtgttttagagaggtcatttttagaaaggatgattttttttcatatctgctaaaagatgttattcaaaactttaggcagaatggagaggaagagaaaaggaaaaacagttacttaaaacgtttaagtggacagactgcacgtactatgggaagtcctatttatagacaggccattaatgtgctgattataagtcatccttatatttttgctgaagtttgtccttaaatctctctacagtcaatgtatatatagtcctccttctttctatggctttgataacgaggagaactgtgtggcctgactggatatgtgaactggatgacccccatgagcagtcttttacataaccccaacttttgaaaactgcatttgatgattttccccagatcatgcccaggttctgcacactgaggtctaccttgctgagccgctgctgttatcctctggcagtgarggatccctgtggtgtgaggctgtgtcttgtttaacaggggacaagattagaaaaggaaggtgctggcacacagaccgtgatcctaaaccatgctgtaacagcttggctttgtcccagaggttccatggtgccaatacatgaaaaataaaatgaaactcaagcaatggtttcaactgtctgggaaaattcaggaaaaacacaactagacataggcaatgtttggaccagccaactgttttatgatttacaaatccatggaactaaagaggaagagtaaacaaaatgtgtaattcccaaagcagtgtaattgctttcctcatttagtcatatgttctgttgactgttgggtagaaatattatcactgactgctctacttttccttcaagaagtcaggtaaaagctcagaaatttactatttcctgttcacttgcttttagctttttttttttttttttttttgagactgagtttcattctgtcactctgctcactgcaacctccgcctctcggggtcaagcgattctcctgccttagcctcccgagtagcaggaattacaggtacctgccaccacacccgtctactttttgtatttttagtagagactgggtttcaccatgttggccaggctggtcttgaactcctgacctcaggtgatccgccctcctcggcctcccaaagtcctgggattacaggcatgagccaccgtgcctggcctgcttttagctttttaataaaataatattttgctacactggtcagaacatcacttactgtgggatttttatatcatgtctcagaccaaaaatggtaaattctttttttt

SEQ ID NO: 718709 - DNA, 824 bp, Homo sapiens
  misc_feature 724, 725, 726, 727, 728, 729, 730, 731, 732, 733, 734, 735,736, 737, 738, 739, 740, 741, 742, 743, 744, 745, 746, 747,748, 749, 750, 751, 752, 753, 754, 755, 756, 757, 758, 759,760, 761, 762, 763, 764, 765, 766, 767, 768, 769, 770: n = A,T,C or G
  misc_feature 771, 772, 773, 774, 775, 776, 777, 778, 779, 780, 781, 782,783, 784, 785, 786, 787, 788, 789, 790, 791, 792, 793, 794,795, 796, 797, 798, 799, 800, 801, 802, 803, 804, 805, 806,807, 808, 809, 810, 811, 812, 813, 814, 815, 816, 817: n = A,T,C or G
  misc_feature 818, 819, 820, 821, 822, 823: n = A,T,C or G
tgcccagccaagattgttttcttgatttcttttttggatagtttgttgctagtgtatatgctgctatgaacactgctgtacaagtacctctttgagacactgctttyaggtcttttcggtgaacactcagaagtacaactgccaaattatatggtaattctatttcacttttttgaggaatctcctctcttgaacctacatcaaccaggtgctcaccgcattactccactgaaccagctctcatcaaggttgctgtaacctttatatccatttggcacttctcatctcacttggcctctgggacaatgtccaactccctttgctggttctgcatctctgtgacctctcggcactggcactggtgcccttggtgatctcatccagccgtgttcacatcattgacacactgacaactcccaaatttatatctccagctcagatcttgaattccagactcagatccaactgtgtagtttatttttccctgtggatgtcaaataggaacttgaaaggtaaggtgcaagttggggcttttaattccctgacttctctccagtcttctccatccagagagtgggggcgccactgctttcatgatggacaagtttatgatggaaagatccgccgtcaccacctgcacctacttttcactaaacatgggacgaccactgagggcctcccagtgccacacaacaggaagcacacagcaccacctaggagcaannnnnnnnnnnnnnnnnnnnnnnnnnnnnnnnnnnnnnnnnnnnnnnnnnnnnnnnnnnnnnnnnnnnnnnnnnnnnnnnnnnnnnnnnnnnnnnnnnnnc

SEQ ID NO: 718710 - DNA, 824 bp, Homo sapiens
  misc_feature 724, 725, 726, 727, 728, 729, 730, 731, 732, 733, 734, 735,736, 737, 738, 739, 740, 741, 742, 743, 744, 745, 746, 747,748, 749, 750, 751, 752, 753, 754, 755, 756, 757, 758, 759,760, 761, 762, 763, 764, 765, 766, 767, 768, 769, 770: n = A,T,C or G
  misc_feature 771, 772, 773, 774, 775, 776, 777, 778, 779, 780, 781, 782,783, 784, 785, 786, 787, 788, 789, 790, 791, 792, 793, 794,795, 796, 797, 798, 799, 800, 801, 802, 803, 804, 805, 806,807, 808, 809, 810, 811, 812, 813, 814, 815, 816, 817: n = A,T,C or G
  misc_feature 818, 819, 820, 821, 822, 823: n = A,T,C or G
tgcccagccaagattgttttcttgatttcttttttggatagtttgttgctagtgtatatgctgctatgaacactgctgtacaagtacctctttgagacactgcttttaggtcttttcggtgaacactcagaagtacaactgccaaattatatggtaattctatttcacttttttgaggaatctcctctcttgaacctacatcaaccaggtgctcaccgcattactccactgaaccagctctcatcaaggttgctgtaacctttatatccattkggcacttctcatctcacttggcctctgggacaatgtccaactccctttgctggttctgcatctctgtgacctctcggcactggcactggtgcccttggtgatctcatccagccgtgttcacatcattgacacactgacaactcccaaatttatatctccagctcagatcttgaattccagactcagatccaactgtgtagtttatttttccctgtggatgtcaaataggaacttgaaaggtaaggtgcaagttggggcttttaattccctgacttctctccagtcttctccatccagagagtgggggcgccactgctttcatgatggacaagtttatgatggaaagatccgccgtcaccacctgcacctacttttcactaaacatgggacgaccactgagggcctcccagtgccacacaacaggaagcacacagcaccacctaggagcaannnnnnnnnnnnnnnnnnnnnnnnnnnnnnnnnnnnnnnnnnnnnnnnnnnnnnnnnnnnnnnnnnnnnnnnnnnnnnnnnnnnnnnnnnnnnnnnnnnnc

SEQ ID NO: 718711 - DNA, 1695 bp, Homo sapiens
gtctcatcctttgatgctcacctgctctgactggtggaggtgcaagtttcatctaacctgagaccaggaggagtgaccctactgggcacagcagcaggtttggtgattaaagggtttttttgctttaactagttttccaacatgtcattcaggttaattggaaatcaacatatttcttcaatgccaatgcctccaaatwttttttgagatggaatcttgctctgtcgccaagctggagtgcagtggcatcatcttggctcactgcaacctccgcctcctgggttcaagcagttctcctgcctcagcatccagagtagctgggactacaagcacgcgccacaacgccgagctaacttttgtatggtctcaatctcttgacctcgtgatccgcctgcctcagcctcccaaagtgctgggattacaggcatgagccaccgcacccagcccaaaatttactacggtttgctcacagggacacaagcttatcatttattaagaccacagctaaagcacctcagtttgtccatcatgcaagtcaggaggaggtgggaggctacttctgagataaaatattttggaagtgctcagatcaggaagggaaaagtctgtttcatttggaacattttgaaaatagttccgaaggttcagagctgtcactcatgggtcccaggtacactccaggctcaggtcacctctacatgcatttgcacctcaggggtccagggcctcataagcacagtgcactgacagataagtgcattgacataagctagtgctctgacaatcctaaaacgttacagggtggtggcctcatcactgggtgtcttaaatcaagccccataggcaattctaatcagtagatgcttttgtgaaactttggaagttgcttctactctgctggggcaataacaacttagcacatttccacttcagctttacctttagaaaaagccaatgtaagctggcatatcacttgccagtttggatattactcttagtaaaaaaaaaaaaaaattgagtgtcaccaacctccaatcttatttatgctaccttcacctgcctcaagttccctagtgattctcccacctgcaacatacccaccaatctcacccttatggcagctctctccctagacacaggatcctcctgccctgacacagagctcctcttcttcctgagattctgtataggactgagttacttccaggcgctgcccacatcccgtggaatccagcaattcctctgggatcctggggtcttacctttcccaaggcctgaagttaaccattcattcagcgcatgtttgcatttgccgggcactgttgtagggactggggatgctgcagtgaacaagatggacaaagtccttgcctcctacaggcaaaagggagataggcaataaacaaagtaaacaagaaccactttaattcaggaagtgaagactgctctaaagaaacatcaagcaggggaaggacagagagagtgatgcagattgtggagttgggggaagttttactccaagccctaaattgttggctgggatcccattagcttagaagaaacactgacctcccctccctaatccaggccgcattttttaggactggcacactaaaaaataaataaaatttaaaaaagaaaaatgccaagcccgtaatgaaagaattatttaaaatttcaagatggcggcagcag

SEQ ID NO: 718712 - DNA, 1809 bp, Homo sapiens
  misc_feature 1084, 1085, 1086, 1087, 1088, 1089, 1090, 1091, 1092, 1093,1094, 1095, 1096, 1097, 1098, 1099, 1100, 1101, 1102, 1103,1104, 1105, 1106, 1107, 1108, 1109, 1110, 1111, 1112, 1113,1114, 1115, 1116, 1117, 1118, 1119, 1120, 1121, 1122: n = A,T,C or G
  misc_feature 1123, 1124, 1125, 1126, 1127, 1128, 1129, 1130, 1131, 1132,1133, 1134, 1135, 1136, 1137, 1138, 1139, 1140, 1141, 1142,1143, 1144, 1145, 1146, 1147, 1148, 1149, 1150, 1151, 1152,1153, 1154, 1155, 1156, 1157, 1158, 1159, 1160, 1161: n = A,T,C or G
  misc_feature 1162, 1163, 1164, 1165, 1166, 1167, 1168, 1169, 1170, 1171,1172, 1173, 1174, 1175, 1176, 1177, 1178, 1179, 1180, 1181,1182, 1183: n = A,T,C or G
tgcataaattatttgggataaattatttaaaacaatgttggttgttacagaatttattgattgaggaagcaaaatcgatacattgagcacgaaagacataaaggagtgactcctggctcaaaatagcagactaagcatgtccctactgagaccctgtaaaatagaagtatagaagtctcattagtaaataaccccataataataaaggaaatggaaaggagtgtgtccagtgaatatgagattacagcaaattatttaaatcagaaatcaaatgtagttctttaatcagtaaaatgtaagtaccagacaaaaataggcggcagggagctacaacggagatgacagcctctctattaaatagaatgcccagaagtttaagtgaatatcacctttttttttttaatttaaagaaccagaaataaaaatgtagaacaaataaaagtaatcatgttcacatcaaactcagggaagaactaatgagaaggcagagaattaagcctttatgttttataccacagagttatctaaaaatgaaaatacaaaaaattgtcagtacttgatctagaatttctagaagtaatctccaggactagaaatccttatatttgttagttatcttaataaaaatggaaagctaaattaaatcttaaaaaacaaggcagggagtgatataattcagattgtggaaggggcagttattcaccatgtcatgtatacaacaacttggattgatctcagaaaggatgacatccagtatcagacctaagtgagcaacgtaaattcatcttggctagaacagaaggagaggggtggttggagaaaagtagaatataagttagtcagattaattatagctgatgaaaagcttcgaaggtatcaatatctgtgtagttgtatgactgttggaagctaaactttcaaatatatgggaagtaccttagactttgggtctgtgattttagaatgcctgttttgttggagccagcagataatgacagtaaagtattgatcaagccactcttttctttgccttccatcctatgaaatggagctaataatacctgcttgccttcaaatctcaagnnnnnnnnnnnnnnnnnnnnnnnnnnnnnnnnnnnnnnnnnnnnnnnnnnnnnnnnnnnnnnnnnnnnnnnnnnnnnnnnnnnnnnnnnnnnnnnnnnnntgtgttgactccgtgctttgcttgtttgcttttttatctctccagtgggacagcttgcctctttaaatatgtgtctctctaaccctgacaggyttgaagtatgctgttgtcactagaaagacacagagattgtgggggtgtgggggtctgtctggtggcagagcctatgtgtggcctagttaacaggttacagttcttccctgcccttcaggatgtcagcagagcccctctcaaggtcacagccagtgtactgagactgaacagaacatatggtccttccttgggagcctttgatattctgggctggagttgactgatgaggaccaaattattcaattgtgccatctatttcctgctgggacttaactaatacaatattgacagggttcaggacacactacccaaaaatatggcatcttgcatagctaatattttaagctgaaggaatttaagaaaactgcagaagcagaaaggccactcttatcttgccctgccattctcctctgaagcagatcataaaacctaggaaggatttcctggccttgccctgaagcaggtcatagaccctcaggagaaagggtccctaccctcctagaggagaggaacatccttatctctggagatca

SEQ ID NO: 718713 - DNA, 1866 bp, Homo sapiens
ataaatgtttctgagaggtaccaaactctatgtctcacacgtgcctctgtatctgtcatgtccccatctcatttgccctaatttgtacctctgggaccctgtatgccagctgaggtctgtgggtgagagatcaccagtccccaggacaaagggagggttgaattctccatcctccctattctgaccacgcagccctatgagctgtttctgttttaagagcatgagttgcaagaatgctttacgttgtgggcctcaggcaggttagggaagaaattagagagctaatggcaaactctgagttgccatcagtgactgcagcctgccctggggcatctggtttgcaggagaaaactcatgagatsagatgccggttacccagaggcacagagtgacacagcacagtggaagggaaggcagtgagggcagatggcacctgagaccccagggagaggagtgatgccaaacacacccactccacccccgcctgctctgcccagtctcccctcatcggccccccaagcacctgctcccctcccacccaagctttctccaggaaagggtgggcaggtgcagtgggcctaattctccagatcacactgccccgcatagaggaggagaggaggatctcctacctgtcattgcagtttgaggcctgggatcacgggaaggtcagcatgtcccagcagaacacgtgcatggcagcagtagccccagtgcccagccaaaacggagacaaggcaaaggccattgtgctgttaggacttgggggttcccggggagaggatatactcctgtcaatcaatagggcccagaaatgtcatctgagcatcgttgtctaactctgcttcccagggaagaggtgtgagcagccagagtgggcgccacgggcccacctcagtccatcactggggagctgcccgcaaaccccacccatttctttaacagtccccaagggtccctgacactctttccagcctcagaagtccccagggacccaagtagccaattctcatcttccttgagctgtttctcctggaagaacatccacttccgcaaccactactgctggttgtggttattaactactactgcgttaaaaactcaaacccccaaatctgaaggtgtggcctcagggctcgttgcccttgaccctcacccgtcaacagtcgacccctctgccttcacagccttttcctcctctgacattcctgacctccccgtggcctgccttcccctgtctccttggccgagccatcctctgtcaccttcactgtttccactaggttattgaggccttttggtcatgagctcctgccaccaaatcagtgcctgaggctgctgcataacaatctccttccttgattagagcatcttaattatgctccaggaatttgcttaaacagattaatcattctggaggacagatttagaagctgtgctagctgagggatctgctctgagtgtccccggggagattctggtgacaaccgcctgttgggcctttgccaaggccttgggtgcctcggagactcggacactggctggaagctctacgcacccccgaaggcttctctttgctcctctgggcctgtagagcaggctctgaaactcttggatgtgaaacgtggcaggagtttgagagtaaggaggccctggtgtcccctttcccttccagcggactcgctgcactctaaggagtggatttgtgggcccctcctcaataaagtaaagccttagtccacttacttgtggcaactgggcaccacagatattggagcctcacctccaaccaacttaatcaggatttctggggttgagcatctctaattttgcaggagcaactgaagagcccaccagttcgttcta

SEQ ID NO: 718714 - DNA, 1778 bp, Homo sapiens
  misc_feature 451, 570, 571, 572, 573, 574, 575, 576, 577, 578, 579, 580,581, 582, 583, 584, 585, 586, 587, 588, 589, 590, 591, 592,593, 594, 595, 596, 597, 598, 599, 600, 601, 602, 603, 604,605, 606, 607, 608, 609, 610, 611, 612, 613, 614, 615: n = A,T,C or G
  misc_feature 616, 617, 618, 619, 620, 621, 622, 623, 624, 625, 626, 627,628, 629, 630, 631, 632, 633, 634, 635, 636, 637, 638, 639,640, 641, 642, 643, 644, 645, 646, 647, 648, 649, 650, 651,652, 653, 654, 655, 656, 657, 658, 659, 660, 661, 662: n = A,T,C or G
  misc_feature 663, 664, 665, 666, 667, 668, 669: n = A,T,C or G
ggagcaatgagggaacaacagctcttggaaatgaggggagaatatatgaaagatatatatatattacatatgtatatgaatgataggtgtaaaaaattttaagtaaaatggttgtaaaataatgagcgagaatttcctagaaaggaaataaaaagaatgatgtgatggaaatgcaatgaaaattaaaaaattaaatcagtcctggaaatataacatctgactaatagaaattacaacaataaagaacagagaaaacaaaggataatgacaaaaacataatatgagaacatttctcagaatggaaggacacatatctctgattgaaaatcctaccaagtgccttggcaaaatgaatgggaaaaagcccttcactggtcatatcatcttttccaaactctttacaaggatcagactctccagtggatatctcaccaggtacccctgaaaatancagtcagtagagcaatgcctcaaatttgaagggaaaatgattccattttggaacttatactcggggaaatactattaagggggagagcggaatgaactattttaaacttacaaaatacnnnnnnnnnnnnnnnnnnnnnnnnnnnnnnnnnnnnnnnnnnnnnnnnnnnnnnnnnnnnnnnnnnnnnnnnnnnnnnnnnnnnnnnnnnnnnnnnnnnncatcactatctgtgtggctgcatttacaattattttcttagggtagatttctcaaaattataaataattgtgtcaaatggtaagaacagctttaagatttttgatacacattgatgtattgttttctgaaacgttgagacaatctataagagtaatgtaaaaggatgatattaataatcactaacccttgtggacctcatctttgtgccaggcgctgtcctaagaaatttacatacattaactcatgtcatcctcaccatgaccttttcacaactgaggagactaaagcacagctaaggagactcaagtcatgctggcatgacttgaatgcagtctttccagaggcagtaggatggccgggtgacattgttcagtctcttcagtccaatgaaaacttataaagaacccagtgtatttggtgcagagtaactggaagatttgttacagccttacatacatgaggtgataaaaatgtcattattactaataacaagaacaacaacaacagtatttatcaggaacaggcctacctattttgcaagaaaactcatcagtggtctgggatggctattgtcagtcctgtggcagaaatacctgtgctgacgcattagcgcttagcagcacaggtgagcaagaactggttattcstaaactgtatgctgggaagcagctctaataaaagaagaattaattcaaagcaatccaaaatgtgccagcttggatcacaacactgtttaatgttgttttaaagaatggttctaactctttttttttttcaaaataatgttaatggtaatttcagctgttagaagggacccagtgagaacttatttctccctcttcttgaagtctaaagttttgaatacctagtcatgggagttcctgattagcaaagggattttttgtcttcttttgtttataaggcaactggttggtttccttaagggttttaattttattcttgtgatttctcaacattagagaatggcaagagtggcatgggggtgggagcagggtctgggggcaggaggttgtcggggaggaagcttgccaggttgagcaaataaaatacacgacaccagttaaacctgaatttaaataatcagtga

SEQ ID NO: 718715 - DNA, 1778 bp, Homo sapiens
  misc_feature 451, 570, 571, 572, 573, 574, 575, 576, 577, 578, 579, 580,581, 582, 583, 584, 585, 586, 587, 588, 589, 590, 591, 592,593, 594, 595, 596, 597, 598, 599, 600, 601, 602, 603, 604,605, 606, 607, 608, 609, 610, 611, 612, 613, 614, 615: n = A,T,C or G
  misc_feature 616, 617, 618, 619, 620, 621, 622, 623, 624, 625, 626, 627,628, 629, 630, 631, 632, 633, 634, 635, 636, 637, 638, 639,640, 641, 642, 643, 644, 645, 646, 647, 648, 649, 650, 651,652, 653, 654, 655, 656, 657, 658, 659, 660, 661, 662: n = A,T,C or G
  misc_feature 663, 664, 665, 666, 667, 668, 669: n = A,T,C or G
ggagcaatgagggaacaacagctcttggaaatgaggggagaatatatgaaagatatatatatattacatatgtatatgaatgataggtgtaaaaaattttaagtaaaatggttgtaaaataatgagcgagaatttcctagaaaggaaataaaaagaatgatgtgatggaaatgcaatgaaaattaaaaaattaaatcagtcctggaaatataacatctgactaatagaaattacaacaataaagaacagagaaaacaaaggataatgacaaaaacataatatgagaacatttctcagaatggaaggacacatatctctgattgaaaatcctaccaagtgccttggcaaaatgaatgggaaaaagcccttcactggtcatatcatcttttccaaactctttacaaggatcagactctccagtggatatctcaccaggtacccctgaaaatancagtcagtagagcaatgcctcaaatttgaagggaaaatgattccattttggaacttatactcggggaaatactattaagggggagagcggaatgaactattttaaacttacaaaatacnnnnnnnnnnnnnnnnnnnnnnnnnnnnnnnnnnnnnnnnnnnnnnnnnnnnnnnnnnnnnnnnnnnnnnnnnnnnnnnnnnnnnnnnnnnnnnnnnnnncatcactatctgtgtggctgcatttacaattattttcttagggtagatttctcaaaattataaataattgtgtcaaatggtaagaacagctttaagatttttgatacacattgatgtattgttttctgaaacgttgagacaatctataagagtaatgtaaaaggatgatattaataatcactaacccttgtggacctcatctttgtgccaggcgctgtcctaagaaatttacatacattaactcatgtcatcctcaccatgaccttttcacaactgaggagactaaagcacagctaaggagactcaagtcatgctggcatgacttgaatgcagtctttccagaggcagtaggatggccgggtgacattgttcagtctcttcagtccaatgaaaacttataaagaacccagtgtatttggtgcagagtaactggaagatttgttacagccttacatacatgaggtgataaaaatgtcattattactaataacaagaacaacaacaacagtatttatcaggaacaggcctacctattttgcaagaaaactcatcagtggtctgggatggctattgtcagtcctgtggcagaaatacctgtgctgacgcattagcgcttagcagcacaggtgagcaagaactggttattcctaaactgtatgctgggaagcagctctaataaaagaagaattaattcaaagcaatccaaaatgtgccagcttggaycacaacactgtttaatgttgttttaaagaatggttctaactctttttttttttcaaaataatgttaatggtaatttcagctgttagaagggacccagtgagaacttatttctccctcttcttgaagtctaaagttttgaatacctagtcatgggagttcctgattagcaaagggattttttgtcttcttttgtttataaggcaactggttggtttccttaagggttttaattttattcttgtgatttctcaacattagagaatggcaagagtggcatgggggtgggagcagggtctgggggcaggaggttgtcggggaggaagcttgccaggttgagcaaataaaatacacgacaccagttaaacctgaatttaaataatcagtga

SEQ ID NO: 718716 - DNA, 558 bp, Homo sapiens
  misc_feature 76: n = A,T,C or G
cccttcccttcccttccttccagaaatggggtctctctaygttgcctcggctggtctctcaaacttcttgcctcanatgatcctctcaccttggcctcccaaagtactgggattataggcaggagtcactgtccccagccagtaagtttttcagtggtgaaatagaaataataacatattaactcatagagctcttgtgaagattaaattatatagatgccagcacttagcagctcctagcatggggtaatcagatactttaacaaaatagcggttgtgactctcattcttcatctctattcctacatattttgttaagagtaatgtttggtactcttatttgtattatactctttaagtataatttaccttatccctctgcaatgtccccagtcagagatacttagtatatatttacaagataaaggcaacaccatcttctgggtgatctccatctttcttctttcttttctcaatattgctattttttgaggccgcttatttatattttcatgtagaaatgaatgtccttgctgtggagctatttcttcaatttta

SEQ ID NO: 718717 - DNA, 558 bp, Homo sapiens
  misc_feature 76: n = A,T,C or G
cccttcccttcccttccttccagaaatggggtctctctacgttgcctcggctggtctctcaaacttcttgcctcanatgatcctctcaccttggcctcccaaagtactgggattataggcaggagtcactgtccccagccagtaagtttttcagtggtgaaatagaaataataacatattaactcatagagctcttgtgaagattaaattatatagatgccagcacttagcagckcctagcatggggtaatcagatactttaacaaaatagcggttgtgactctcattcttcatctctattcctacatattttgttaagagtaatgtttggtactcttatttgtattatactctttaagtataatttaccttatccctctgcaatgtccccagtcagagatacttagtatatatttacaagataaaggcaacaccatcttctgggtgatctccatctttcttctttcttttctcaatattgctattttttgaggccgcttatttatattttcatgtagaaatgaatgtccttgctgtggagctatttcttcaatttta

SEQ ID NO: 718718 - DNA, 558 bp, Homo sapiens
  misc_feature 76: n = A,T,C or G
cccttcccttcccttccttccagaaatggggtctctctacgttgcctcggctggtctctcaaacttcttgcctcanatgatcctctcaccttggcctcccaaagtactgggattataggcaggagtcactgtccccagccagtaagtttttcagtggtgaaatagaaataataacatattaactcatagagctcttgtgaagattaaattatatagatgccagcacttagcagctcctagcatggggtaatcagatactttaacaaaatagcggttgtgactctcattcttcatctctattcctacatattttgttaagagtaatgtttggtactcttatttgtattatactctttaagtataatttaccttatccctctgcaatgtccccagtcagagatacttagtatatatttacaagataaaggcaasaccatcttctgggtgatctccatctttcttctttcttttctcaatattgctattttttgaggccgcttatttatattttcatgtagaaatgaatgtccttgctgtggagctatttcttcaatttta

SEQ ID NO: 718719 - DNA, 662 bp, Homo sapiens
aaaagaatgttgtgtggcagaaatatgggtacaaatgtgcaagccttctgtagatgattctttaaaggcaggtggagtgggagccgctgggctaacctaccccaaatcactgcacttcctttcttcccttgtcattaaaaccatatgacccctttagtgtctgtgttgcactcatgagttcagaagttccaatgcatctatcaarcacatgtgtttgcctactgtgcatgttgttctaagtgctccttcactgcttctgacaaccctatgaggtactattataagcctccttttacacatgaggaaactgaggctccagagagttaaataagttgcccatagtcccacaggcagtggtggcattgggatttggactcaagttgtctagctccaggttcgcagaatcaccctaataatgtgccctccaaattggctatttcagcaactgcagtgttcaggaaagaattatactctgatgagccttcatgaggcagggttgaaaaacctgtgtcaggaaaagatatgacaccttactggttatcagaccatgctagaaggagcctctttaaaatcgaacaacagagccactgctctggtgcaagcagcactctcacccagccctctgacctcagtcacagtgtgagctctatagttcctggcaa

SEQ ID NO: 718720 - DNA, 662 bp, Homo sapiens
aaaagaatgttgtgtggcagaaatatgggtacaaatgtgcaagccttctgtagatgattctttaaaggcaggtggagtgggagccgctgggctaacctaccccaaatcactgcacttcctttcttcccttgtcattaaaaccatatgacccctttagtgtctgtgttgcactcatgagttcagaagttccaatgcatctatcaaacacatgtgtttgcctactgtgcatgttgttctaagtgctccttcactgcttctgacaaccctatgaggtactattataagcctccttttacacatgaggaaactgaggctccagagagtkaaataagttgcccatagtcccacaggcagtggtggcattgggatttggactcaagttgtctagctccaggttcgcagaatcaccctaataatgtgccctccaaattggctatttcagcaactgcagtgttcaggaaagaattatactctgatgagccttcatgaggcagggttgaaaaacctgtgtcaggaaaagatatgacaccttactggttatcagaccatgctagaaggagcctctttaaaatcgaacaacagagccactgctctggtgcaagcagcactctcacccagccctctgacctcagtcacagtgtgagctctatagttcctggcaa

SEQ ID NO: 718721 - DNA, 584 bp, Homo sapiens
ctactttttaaaccttccttccttggaagacaaggcaaagagctttttttagcttcctggtattttatctgctttctaattttgtttcaacaatgatgtcaattagtttgacatgtcagtaacagcctttctgtctctyattagagtttatctttttagctaagattcagtggtttttctcaccaagtctcttgaattgtgatttcattacctttgatttcgatttttgtttgtttgtttgtttgttttttggtaaatttttcccaaacagaagctacataataaaattactgcatctttggaaataaattgtgctctgcctgggaataatatttttatcaaatccttttatcttaggagttctgtaatgttgcttcagtgatatttggagtcaggatgtaagaaataagatgtggccttagatgaaaatccaattgggaaaagacattggttctgtcacatgttagatatgtaaaatttgtttagatattctagataaggaaattacctatctaccttataatgttgtgaagatcaatttagatatatatttgattctatataaactttaggaatgtatataa

SEQ ID NO: 718722 - DNA, 1101 bp, Homo sapiens
agaaaataaggttgctttagagagggtggcagggaaggcctctcttggaaggagagttgacatttgcactaattctcaaatgtggagaaaggtcagctataatgtagggtgtctcaacctcagcattggtgacattttggactggatcggtttttgtgatgtggaattaccctgtcccttgtaggatgttaagcagcatccctggcttctacccactagatcttgcagcagctccacctccaagtcagggcactcaaaaatatctccagacattaccaaatgtctcctaggagacaaaactgcccctgactgagaatcactaggctatgtgaagatttggggaaaagcatttcagagggagaaacttcaacaagcccggcagtaggaatgaacttggtatgttgcaggaagaagaccaatgtgaatgaagtatatgagcaacgtgtagagtaaaagcaggatgaagctagtggggccccagattgtgtgcttgcacgtgcacatgtgtataaagaaaaaatatatatgtacctccatttcagtaattgtctcctcactgggctattgtgttgggctatgtcccctctgtaaaaatgttcaacatcattttaaaaaaggtttgcaatgaacatcagcagcactaagtgaagaagcacttaatttatcattccttgtggctttggacaggtccgggattgtcacagtaaataaatcatatgtcacatttgatttgtgagcaatttacatgctattttatcagaagttaaacaaaaagcaggtttcaaattgcagtataaaatcatctttaggaaagtttattctgagacagaaacaaagagattcttctctttctttttttcctgaactggagataccattaatgatgttaatcctcatgaacattgagatagacatcctatcatgataaatgaagtagaatttctcagctggtttatgtctgggaaaagtagtgatgaaagctagaagactgatkcttcaacactttccaaattccagctacacaaaagttcccttcaaaatattcacagcatgattaatcgagctgtaagctaagaaattgactgcatgtcagaaataata

SEQ ID NO: 718723 - DNA, 644 bp, Homo sapiens
tgtcttattcaataacaataacaaaacaagtaaaaaaactatgygttaaaagactatgtataggtttaagaaaattactctgtatgagaaaatagaccttttatccaacttaacactttcccccaaaaaggataaagtaagaaaggaaatagaaagccttttaaaaactttcatccctgaacctaacattcaaaattgataagattatatttatatagaatatgttctgaaaacagatatatttaagtatctgattttttatttatgaggtagtcagattaaaatttgacaaatgtaaaaatttactataaaatagaaatgtatcataagtgtattatagattttatcaaaaatattactaccattttagaggaactctgttgaatcaggaagtaattaagcttttttctatattttctggtgttcacttgctttgattgaaagctaacaattcatattcatttcctttcattagttttagatacatctattaatttataattttttctatgcaaccaataggtcctataaaaatttatttttgttaatgttacattagagaacattaaatataaattattttaaaagccttcccttttgaatgctttctataattatcatttacatagtgatcactttgtcat

SEQ ID NO: 718724 - DNA, 914 bp, Homo sapiens
ggcgaggtgactttgcagacaatgggtagacctttcaacctgccaaatgatcaacaacttacaacttcattgggtcagaaccccatagctgaactcagtgactatctctttccttgcagccattcatgaaatgctttatgacagcttgttttcattactgaacattgatttaggccattttctttaaaaatgtaataatcttggaacttattcataaagagctttcaaagggccctgaatacaaatgaatcttcaattaatgctacaggctttgattcaaaactttattataaaatgaatagcattcagtaatcatgcaaatttatgtgaaatttcttatttttttctggcttttaagttctcagcaattgttatgttttcctaaactttccttaaattaaaaacaagttgaatattccctgacccatcagtaaaataataatgaaagttgtcataaagaacaacacagggtaagaggacaagktattattgctggccccacttttctgtaagtggattacaaaacagaatttttaatttgttttgtatgattttacatattggaaggtcctagtagaaagtcttacttaatatttagtctgaggaactgctcatttttaatatctgtatttgagttgacatagcaaattataaagaaacacagctttgtcttaacatctaagaagaaaaagtttgcaaaaattgttgataaattgtttttaactgcatagttctaagaagtctgttttatatttgtgatcacttaaagttattttacgtgttcatgggacatttggatatccttatcgttgtggagtgcttgttcagaaactatgttctttttccatagggctgatcgatgtcattttctcattattcataagaactatttaaagtacataaattgctatggg

SEQ ID NO: 718725 - DNA, 946 bp, Homo sapiens
ctgccggctggcacggtggctcacacatgtaatcctagcactttagaagtcgaaggcaggcggatcgcttgagctcaggatttcaagaccagcctgaggaacacggcaaaacccgtctctacaaaaaaaaaaaaaaaaaaaaaaaaaaaaaaaaaaaaactagacgggcatggaggtgcatgcctgtagcccttgctactggggagattgaggkgggaggatcgcttgagcccaggtaggtccaggctgcagtgagccagtgattgcaccactaccctccagcctgggtaatagagtgagaccctgtttataaaaagaaaaaaaatagcttaatatatttaaatatttaaaaaggtatccgtgaaaacaaaaactgaccttttatttttgtcataggaaaattctaatcttattatttaataaaattataccatttttgtatgttcaacatgcagacagatgtaactcactaaatttctataattactctgtagttaagtttcttacaatattagtgaaatagtataacttgcaaaatatcatggaagaagaaacgtccatctttgagagtgcctacatgagtataagactattacaaataatttggctaataattgtgttctatttcgttgatgctggtcactaatcgccagtttcctgcacagaagtttctgagtatggtgaaataaattgttaattctaaagtggctgccttttataggcattgtcagtggtgaaaaaatgggctgttattctaatgcttgcaattaagactgctttgaaagaagcctattatctatgccaaggcaagcagaagaaaaaccgaaggtgggattttgatactggattagaattttattattcagaagacttctgtccccgacatgaaaccttttctgatcattctaaaacgttatgactctcctctgagcaagaagagaggttt

SEQ ID NO: 718726 - DNA, 946 bp, Homo sapiens
ctgccggctggcacggtggctcacacatgtaatcctagcactttagaagtcgaaggcaggcggatcgcttgagctcaggatttcaagaccagcctgaggaacacggcaaaacccgtctctacaaaaaaaaaaaaaaaaaaaaaaaaaaaaaaaaaaaaactagacgggcatggaggtgcatgcctgtagcccttgctactggggagattgaggtgggaggatcgcttgagcccaggtaggtccaggctgcagtgagccagtgattgcaccactaccctccagcctgggyaatagagtgagaccctgtttataaaaagaaaaaaaatagcttaatatatttaaatatttaaaaaggtatccgtgaaaacaaaaactgaccttttatttttgtcataggaaaattctaatcttattatttaataaaattataccatttttgtatgttcaacatgcagacagatgtaactcactaaatttctataattactctgtagttaagtttcttacaatattagtgaaatagtataacttgcaaaatatcatggaagaagaaacgtccatctttgagagtgcctacatgagtataagactattacaaataatttggctaataattgtgttctatttcgttgatgctggtcactaatcgccagtttcctgcacagaagtttctgagtatggtgaaataaattgttaattctaaagtggctgccttttataggcattgtcagtggtgaaaaaatgggctgttattctaatgcttgcaattaagactgctttgaaagaagcctattatctatgccaaggcaagcagaagaaaaaccgaaggtgggattttgatactggattagaattttattattcagaagacttctgtccccgacatgaaaccttttctgatcattctaaaacgttatgactctcctctgagcaagaagagaggttt

SEQ ID NO: 718727 - DNA, 635 bp, Homo sapiens
caaaatcaaaattaatggtaaacagaatgcagttcttgatagctgaagttcacccagatgcagagaactataaaggggctattggaggcagctgccaattagggaccgattccacgggttttcagaaagtgaggctctagtttcacactcgggactggcaggtcatgtttgcttaggagatctgcactgcaaaggagccagagccatgctgagtgtgcatgtgatggtcacccccttttttccttttccctgaagacagcagcagccctcctctcccgggttccctcacagccttgctagaagccaggccaggctggacagggctggaacatgtgcgggagccagcgctgggaggtgggcaatgcaacatgacattggtgctcatccccaaactcgcagcccctaatcacagcacaatcacggacatctggaatagcttacagatcgccctatgctcctcagagatggctgacaagggctgaattatcccagccatttgctcagcttactcaagtgttcgctcatggctgtaattcaacatgatgggaacagtcagagaaaagtacyggtttgagtagatgaattttggcagtcgcaatcagcattggccctcacagtggacacgggagtatctt

SEQ ID NO: 718728 - DNA, 651 bp, Homo sapiens
gacaaccgaatgttgaatgaataaataaacaatgaagtaaatacacaagtgcagcaaaaccacagagaagatctacatagtatttttctgrtagaaggctgcctgttttttaatatcccagtgttatagaatatttgagtctcttagcacagtatttcgcagccaattatttatataggaaaaaattgcatttatgtctctaatactcaatatgacatttcttaacaaaattgttttgggaaaaaaagttatgttccaaatagaattgacacaatgtcataatcacaaggacagtttgaggagcaggccaattctcatcgaagggggtatttatcttagatgttgctggcactaaaaaagtcaattttactggcaacaaattatatttttatcaagcaaataaattatatttttatcaagcaaataaattttatttggtgatctggaagaaatattttaaatattcactgtgttttaggaaattgagagcttagagttgacaaacactcattatatttttttccctttaaaatgatgggaaatagattcttgacagcatttctattcagatctttatattaaggaacattattttcaatacatgggcgatagctgtataacatttatacttattacattcaaactgttgtg

SEQ ID NO: 718729 - DNA, 1035 bp, Homo sapiens
ttcacaaagcttaaatataacagaagatttgataagtcctagagtattagaaacctgcttgagtttgcaacatatttaccaaaattactggccaaaggactcctctgctataaagtaacaactctttatatataactgaggtttcttaaagcgatttttgaaaatcactgctttaagataaacaattcatgtatgtatgtatttattgtatctcagaggacttattgttttcatgtctgaagacaaacttcctcttctggaagtcatctctaaatattaaatgcctgtgcagtttggtagactgagctacccaaccagaaagagagatgccctctaaccacatttctrtgggaaggtgtggactgtagcttccctgactgtggtttaggttgaaaaggttactctctcctgctgagatggatggtcggcttcacccatcagcaaaagtgcttatgtggtactccttggctggcatgggttctttgatttatcctaatctaagaactgtcaatattatctacagtatgaaataggcacagaactgaaaagaaaagacaaacgcatacaatttcacttttctagatgtttctacaattataatattgagcctgtcattaaaaactaagtggttgctgtcctgcagaaaagagcagaatatgatcatgggtgtccttttggaagagctgatcaatttccttgagtagtggaacacagtcacaaataatacatccctatcatgtggcctggtttgagaacactcaaattctgcatgccattgctgctgcatttacttggtctgcaacctgcatatggagactattcttttattttgggaaaaaaaaacattcaactctgccacacttttatgccataccacgaattatgcagatatatatatatatatatatatatatatatatatttttttttttttttcccttaggaatgttccttgtacctctagttcagcccaggcttacatcctcttaacaaagatgatgtcactagttgttatccacattcacattgggaggc

SEQ ID NO: 718730 - DNA, 621 bp, Homo sapiens
gacctagtcctgaatgtcttgtcaagcttgacctcctggcagtcagcaaaagaactgaataatttttctgaatctagagaaatttttaaaactctgtgtgagagttttgcctacaatcagacactcttgaagatgcaagaggaacccaactaaactgtagtgcttatagactctgccattccctgtggggagtttattgctgagttgcttgcagttccttttgtgctcaaacttagagcttctgtaggtggcaatattgagtgaagctctgggaaacttccacctccaccttcctatgtatctgtgcctatgacaggactaacggacataaagacctttctggaaagagtaaaaaatacaatgctgtccatcttttttaacttgtggctccacgattttaacttttggattttggaacagtttttgggacagtttttcaggaaagaattaagaaactctttatttttaacgtaagtatcacaaaatagaataaaaattgtcatatatagaacakcacatatatgtttagtatagtaagtttttattttagaaaatgttgtagctcttcttgcttaagtgagtataatgtttaagagttgaacagccaacttttctaatacc

SEQ ID NO: 718731 - DNA, 1449 bp, Homo sapiens
atatcatctgaaatagaatggattgtatgaattataatgctctgaaaactcaaaatgctattatattgtggtttaacttgtgaaatgcatacattttcttcctcaggttttatggagattcaaaggaaagaaaccaactacattaggtgccaatactcagctctatgtttggatatgccagagtgatcttcatggtaagattatgacaaagtaaaataaggaatttcatgagggaaaaattgaattactgtttaacagctaataagtttaacaaaaatttaaaatgtatagtttgttactttaattttaattaaataaataattggtcattaattttttgattcttacttcctatttttaaagtaagtttcaagcaatgcagaattttttttttcaaatgaatacatatggctcattttattcaatamtcatacttacagaatatatgcaaatccgcctttccaatgataaatagtagtatttaagactgataaacttttgaaagggcagttaaaggttatagtctactgttttctaacttcagaaatacttttgtttgaaaggtgggagataaagtttcaaggagattaagtcccaatattcctattttaaatctctcagcttgtgcaggcagggcaggtaaacatgaagtttttaaggatagaagggtcctgaaagatagtagagtatgtctgctacataataggtactcaggttaggtttgatgaataagtggaatgaaagaatggataaatacagttggggagttcaatatttttaaatgaactcctataaggcaatatttttgcaatagtaattatttatatgtgttatgtttatttttaaagaatacaattaaaatgaaatgattaatctatcattgtttgcataaaaaattgaatgaatatataagaaaaacatgtacataataaaatatatagaaaataaaatctggaaacataaaaacattccctttttacttctgaagagactaaaagttcaaagaagataacaatacacacaataatgataaaaaataggaagcaagaaattatttttatcagtgcaagattcatattcctctcctcccaaggattattccattaataataaacttttactaaaagttttgtacatgctcactgcagcaatcacagataagaaaaaggaaaaaaactacttaaaattcaaatgctcagaaattacaaatttaatattttatacatattttttgctaaaacaagaccatagtatgtttgtgtgtatgtataatttaactgatttttttcctcactagctataacaaaatacatcttttcacatccacgtacttctgtatctattgccaccttcaatggtcacatattattccatccaatggatgcaactgaaatttatgtataggattcattctatgggttctttttaaaataagtgttgtgaaaaata

SEQ ID NO: 718732 - DNA, 1449 bp, Homo sapiens
atatcatctgaaatagaatggattgtatgaattataatgctctgaaaactcaaaatgctattatattgtggtttaacttgtgaaatgcatacattttcttcctcaggttttatggagattcaaaggaaagaaaccaactacattaggtgccaatactcagctctatgtttggatatgccagagtgatcttcatggtaagattatgacaaagtaaaataaggaatttcatgagggaaaaattgaattactgtttaacagctaataagtttaacaaaaatttaaaatgtatagtttgttactttaattttaattaaataaataattggtcattaattttttgattcttacttcctatttttaaagtaagtttcaagcaatgcagaattttttttttcaaatgaatacatatggctcattttattcaataatcatacttacagaatatatgcaaatccgcctttccaatgataaatagtagtatttaagactgataaacttttgaaagggcagttaaaggttatagtctactgttttctaacttcagaaatacttttgtttgaaaggtgggagataaagtttcaaggagattargtcccaatattcctattttaaatctctcagcttgtgcaggcagggcaggtaaacatgaagtttttaaggatagaagggtcctgaaagatagtagagtatgtctgctacataataggtactcaggttaggtttgatgaataagtggaatgaaagaatggataaatacagttggggagttcaatatttttaaatgaactcctataaggcaatatttttgcaatagtaattatttatatgtgttatgtttatttttaaagaatacaattaaaatgaaatgattaatctatcattgtttgcataaaaaattgaatgaatatataagaaaaacatgtacataataaaatatatagaaaataaaatctggaaacataaaaacattccctttttacttctgaagagactaaaagttcaaagaagataacaatacacacaataatgataaaaaataggaagcaagaaattatttttatcagtgcaagattcatattcctctcctcccaaggattattccattaataataaacttttactaaaagttttgtacatgctcactgcagcaatcacagataagaaaaaggaaaaaaactacttaaaattcaaatgctcagaaattacaaatttaatattttatacatattttttgctaaaacaagaccatagtatgtttgtgtgtatgtataatttaactgatttttttcctcactagctataacaaaatacatcttttcacatccacgtacttctgtatctattgccaccttcaatggtcacatattattccatccaatggatgcaactgaaatttatgtataggattcattctatgggttctttttaaaataagtgttgtgaaaaata

SEQ ID NO: 718733 - DNA, 1449 bp, Homo sapiens
atatcatctgaaatagaatggattgtatgaattataatgctctgaaaactcaaaatgctattatattgtggtttaacttgtgaaatgcatacattttcttcctcaggttttatggagattcaaaggaaagaaaccaactacattaggtgccaatactcagctctatgtttggatatgccagagtgatcttcatggtaagattatgacaaagtaaaataaggaatttcatgagggaaaaattgaattactgtttaacagctaataagtttaacaaaaatttaaaatgtatagtttgttactttaattttaattaaataaataattggtcattaattttttgattcttacttcctatttttaaagtaagtttcaagcaatgcagaattttttttttcaaatgaatacatatggctcattttattcaataatcatacttacagaatatatgcaaatccgcctttccaatgataaatagtagtatttaagactgataaacttttgaaagggcagttaaaggttatagtctactgttttctaacttcagaaatacttttgtttgaaaggtgggagataaagtttcaaggagattaagtcccaatattcctattttaaatctctcagcttgtgcaggcagggcaggtaaacatgaagtttttaaggatagaagggtcctgaaagatagtagagtatgtctgctacataataggtactcaggttaggtttgatgaataagtggaatgaaagaatggataaatacagttggggagttcaatatttttaaatgaactcctataaggcaatatttttgcaatagtaattatttatatgtgttatgtttatttttaaagaatacaattaaaatgaaatgattaatctatcattgtttgcataaaaaattgaatgaatatataagaaaaacatgtacataataaaatatatagaaaataaaatctggaaacataaaaacattccctttttacttctgaagagactaaaagttcaaagaagataacaatacacacaataatgataaaaaataggaagcaagaaattatttttatcagtgcaagattcatattcctctcctcccaaggattattccattaataataaacttttactaaaagttttgtacatgctcactgcagcaatcacagataagaaaaaggaaaaaaactacttaaaattcaaatgctcagaaattacaaatttaatattttrtacatattttttgctaaaacaagaccatagtatgtttgtgtgtatgtataatttaactgatttttttcctcactagctataacaaaatacatcttttcacatccacgtacttctgtatctattgccaccttcaatggtcacatattattccatccaatggatgcaactgaaatttatgtataggattcattctatgggttctttttaaaataagtgttgtgaaaaata

SEQ ID NO: 718734 - DNA, 585 bp, Homo sapiens
tgaaaattaaagcagaagtaaaggctgccaaagcagataaagaaccagctccagctgagggaagaatcatgtatcaaaaaccagtaaagcaccagtcaagtgcccctcagatgaaaaatattcaggtttaaaagcaagcccaaaaagaagacaaattaagatgcaataaatcaggactcagtcaaaaagaactcacaaaaacaaataaaaaacagtagcctcctttcttttgacagtgaagatgacaataagtaagtgtaaatattttgaatttagtctacgttgaaagtacatgcgatgttttttaaagtaacatttttttcctattataaagatactacaggccaggcacggcggttcacgcckgtaatcccagcactttggaaggccaaggagggcacatcacttgaggtcaggagttcgagaccagcctggccaacatggtgaaacgccatctctactaataatacaaaaattagccgggcatggtggcagtcacctgtaatcccagctactcaggaagctgaggcaggagaagagcttgaatctgagaggcggaggtttgcagtgaactgagatcaggcc

SEQ ID NO: 718735 - DNA, 585 bp, Homo sapiens
tgaaaattaaagcagaagtaaaggctgccaaagcagataaagaaccagctccagctgagggaagaatcatgtatcaaaaaccagtaaagcaccagtcaagtgcccctcagatgaaaaatattcaggtttaaaagcaagcccaaaaagaagacaaattaagatgcaataaatcaggactcagtcaaaaagaactcacaaaaacaaataaaaaacagtagcctcctttcttttgacagtgaagatgacaataagtaagtgtaaatattttgaatttagtctacgttgaaagtacatgcgatgttttttaaagtaacatttttttcctattataaagatactacaggccaggcacggcggttcacgccggtaatcccagcactttggaaggccaaggagggcasatcacttgaggtcaggagttcgagaccagcctggccaacatggtgaaacgccatctctactaataatacaaaaattagccgggcatggtggcagtcacctgtaatcccagctactcaggaagctgaggcaggagaagagcttgaatctgagaggcggaggtttgcagtgaactgagatcaggcc

SEQ ID NO: 718736 - DNA, 760 bp, Homo sapiens
ggctgaaattttagcctacttgcaaactagtaagtcagtctgccacaatttcatatgtactggcagaaaacaaaacactcttgggtcagagacataggattttactcctcatggcacagaaagcactatgagcttcatgtttgtgtcagctcccttcttactcaaatcctacagaatgacataaaatggttcctgtggaagctttgcacgcagagggtttgcatcagagctgaggaaccctgagtttagaaaaccttgagtttctgtaatggactggaagcaaatctgcctaatcttttcctagagggaaacattatctttatcacactaggcagcccacaaatctaccctttactctgagggacacaccataccttctaagctgcttgttatacaaacatccataagagataatctggaacaaaaggaatcagtgcctctgcttgtgcagtaatatgatagactcatggagaactatctcctcaaaygctcctgcctgtgaactatcacagaacacattttctgttctgtatcatacattatcttaaattcatttttttatcaatatatcgagcctccccaagtcaaccataagctgccattaaaaataactcatttttacaccaatagatttacttaatttctaaggtaatgtcataacatgatttgtgctcaatacatatttaagaacaattactgatgatgatgattgattaactgattggtgctaattgattgatgaatcgatggtggaaattat

SEQ ID NO: 718737 - DNA, 821 bp, Homo sapiens
gttgtgtttctcatatagtttataaacacgtgtagcaatatttaaaaaatagaacccactgtctaaaaacctacggttgttgacttggattacatacatttctatttttcaagtaaaataactctcattaacatagcttatgaggcctatcattaactgactcctgcctctgccttcagtctctgctcccaccttcactccccaccccctattctgtgttttccagtcacatggactcacttgcacttccccaagtctccaggctctccctgcattctggcctgtgtatacaccattctttctgagtgtaacatgcctttccctccttctttggcagtttaattcctcttcattcttagctgtaagcatggaagtagcttccttagaagagtgttctttgtcctctcaagtccgggttaattgagtcaccttggtctttcaggccccttttgtacccacttgggttatggtactaatctcattaaactggaactgcccatgtgtctttatagttggcccctctatacttagcacctagcacagggccacagacattatagataagatgggaaagaatcgttkattgaatgaatgaatagtctttgttttgtagtgtactatagtgctacacacgtgagcagataatgtcctttcgctctatcattataacaaaatacattctcatttccatccacttcttaatttgatgcgttatctaaaagtattttgaagccatggttatgggaggtcacaccctagtctatgctgagcgttgatttaaaaatacacttaataaaatgtgttcagaaacacatagtaat

SEQ ID NO: 718738 - DNA, 821 bp, Homo sapiens
gttgtgtttctcatatagtttataaacacgtgtagcaatatttaaaaaatagaacccactgtctaaaaacctacggttgttgacttggattacatacatttctatttttcaagtaaaataactctcattaacatagcttatgaggcctatcattaactgactcctgcctctgccttcagtctctgctcccaccttcactccccaccccctattctgtgttttccagtcacatggactcacttgcacttccccaagtctccaggctctccctgcattctggcctgtgtatacaccattctttctgagtgtaacatgcctttccctccttctttggcagtttaattcctcttcattcttagctgtaagcatggaagtagcttccttagaagagtgttctttgtcctctcaagtccgggttaattgagtcaccttggtctttcaggccccttttgtacccacttgggttatggtactaatctcattaaactggaactgcccatgtgtctttatagttggcccctctatacttagcacctagcacagggccacagacattatagataagatgggaaagaatcgttgattgaatgaatgaatagtctttgttttgtagtgtactatagtgctacacacgtgagcagataatgtcctttcgctctatcattataacaaaatacattctcatttccatccacttcttaatttgatgcgttatctaaaagtattttgaagccatggttatgggaggtcacaccctagtctatgctgagsgttgatttaaaaatacacttaataaaatgtgttcagaaacacatagtaat

SEQ ID NO: 718739 - DNA, 845 bp, Homo sapiens
tggggaatatagaagttattgactgaccttgaccagaattgcttcattggagtaatggaaagaaagactatttaaaacgagctgaataggagyacttagagagagtaggagccatttgtagtagcagttctttggaatatgttcagtaatcaactagagattaataaaagcattgatgagcagcagaagatgaaattgggttgtatggcatggatattaaatagaataaacttgtctaattttattcactaactttattgaacgcataaaattcatgacattattgaacacatacaattcatgacattaatttagataccaaagatttaaagctgaataatacagtctgtgttgtttcttcctagttccctcttcccaatttccctgagaaattcgacgctatattgctgtctagttcctattgaacagataggaactgaagaccagatcatatacctggattccctgacattaaagtggactgctgttctcatatatgaaagcctgtctgctgacaatctagcagatttatcatcattccctcctggccatgccagactcctgaaattgaatgtattgagtatcaatattgggataattttttttctataatctattgaaaatagagatttgagctcctggcctaaattcatccagtttcatgatgtccatccacaaacccagcctcagtaggagaaacagtagttaaagaatttcataaatatctgtcacagtaaggttgataagaatttcttagcatgaaagagtctctgctatgaagaaaattatgattggaatgactagccctggagtctaggcttggaaaggaggcatgggaggtgagg

SEQ ID NO: 718740 - DNA, 357 bp, Homo sapiens
  misc_feature 351: n = A,T,C or G
ggggaaatcctaaacgatatttattctcagaatatcctaaagaacctgtagattttaagaactgtctttggctgggcgcagtggctcctgtctgtaatcccagcactttgagaggctgaggcgggaggatcgcttgaacccaggagtttgagaccagcctgagcaacatggcgagacccccccttttttttttttwaactgtttttttgtgagctttcactgatagagtctcttaggagagaagaaattagagtggtttacttatttcggaggatttgacctgggatgacaagcccagtttttgttaatacccccccgccgttttaagtgtgccaagcgctatgggaagtnctacgt

SEQ ID NO: 718741 - DNA, 645 bp, Homo sapiens
ttctttccttgagcagtggtttgcagttctccttgaagaggtccttcacatcccttgtaagttgtattcctaggtattttatttctctttgcagcaattgtaaatgggagtaaaatgtctcattcatatttataattatgcctcctttctcattctcagtgttcttttgtgttctctctctctctctctccttgaccataattgccawttcattatttacctgttattttctttaagaaactaatttttggttttactactcaggagtcaggtctcctgttttctaattttttaaattttaatattcaacttcttggttgtacttttattttgtcagcattcgccccactcccagattttacccaggatatggcacagaattctaagatctgctgtcttctctcctttaaacacttaagatagacaaagcacacctgaatgcagggaataaatgtcatcagaaagtagctagtgagacacttattaggatgtatctcctgctctgtcctctcagtgaactttcttgccattgaagaattaggcattccaatttattgtttttagaccagtccactggacaatgagcccaactactgaaccaaagtacttgactactggtctaatgagaattcaggaataaattta

SEQ ID NO: 718742 - DNA, 645 bp, Homo sapiens
ttctttccttgagcagtggtttgcagttctccttgaagaggtccttcacatcccttgtaagttgtattcctaggtattttatttctctttgcagcaattgtaaatgggagtaaaatgtctcattcatatttataattatgcctcctttctcattctcagtgttcttttgtgttctctctctctctctctccttgaccataattgccaattcattatttacctgttattttctttaagaaactaatttttggttttactactcaggagtcaggtctcctgttttctaattttttaaattttaatattcaayttcttggttgtacttttattttgtcagcattcgccccactcccagattttacccaggatatggcacagaattctaagatctgctgtcttctctcctttaaacacttaagatagacaaagcacacctgaatgcagggaataaatgtcatcagaaagtagctagtgagacacttattaggatgtatctcctgctctgtcctctcagtgaactttcttgccattgaagaattaggcattccaatttattgtttttagaccagtccactggacaatgagcccaactactgaaccaaagtacttgactactggtctaatgagaattcaggaataaattta

SEQ ID NO: 718743 - DNA, 1092 bp, Homo sapiens
taaattatataaacaattattatttagaatggcaagacactttaggtattatagataactatcatttgaggagtcttaagtttgttcttggttagcctggaatgtggcagaggtttaagagagagaaatcagggaataaaacagaaatgggtacatacaaactagtgatattaaaggagaagctgagtttacccaaagttgcagacaaaagcagctgcaaaattgcagacttcctcaccttcacaactacctgcccttgcaagttctgagactctctctaaatttctacggacaagagaccagagcagaaaagcatgtgtttggaggaatgtacaggtatgaaactccctgaaagacagaaagaggacagatggagctgacattcacatgcacagtgctcagacattcctcaagctttggagagaagtatgaatgaagaatgggtaaataaatggtagaacatttcttcccaattcatctgaggagataggaattcttgttttattggcctatgcagaaatgcagataatttgaagggatgtcyactcctacactcatatgattaaatgaggctgactcagaaggagggagagaccctttcattttctgattctgttccttgatcctatctggaaaagacatggccatgcctgttcatttaagtattaatcgtggttgctttcagatcacaacagcagccatcgtgacagagaacatatggcctacagagccacaaaacattccactatctgtccttttataaaaaaacaattgcagatacttgatctggatcaatcacccaggcagcagtgggatatccttttctttctatttgtcaagtagcataagaagccccaaatggcaagggatcggtctcagctcccaattcaatgcaatggttgctatgtccccttgtgaaagcaattctttgggtgctaaattctccaaccagcaaaacacagaattttggaaacaggaatgaatttttgcaagtggttaataaggtataataatggaagatgtcacatctatatcaaccccttgatttccagacccatgtgttataacagtgggagaagtagcatctcatat

SEQ ID NO: 718744 - DNA, 675 bp, Homo sapiens
attagcatgcacagggaaaaaatcagagtgattacccaaaatctcaatgggatagagatgcttatatattctactttatagtggaatatagtggaatcttataggaagatgggaaagtgtggatgattttagggggagtattaaatgattttcagggaaattcaatgggcttaaaaaaagatacaatggcctaggatagtgtctcttgggcctgaagagcagatgatggtttgtgacaaaagtctgtccatgagtgtggataggcttctgtctttcttcgtgtgatattagttcagttaatgaaaactgaagtcccagcagacataattgttctgagtccaggctttaggcagataagagaacttcagaaaacaacttcttcttgtgcttcaggaaagacaaaggattgagagacaggagcgaggggctgggtggagggaagtaaggtagttcaggaagactttgaggcttctttttcagttcagagtatcmaagcgccgtattttgaggtattggcttctaagcctcagcacaatgtaaaactatcacctagcatccacctctcctagctgcagcatttcttccaactgatctactggacctttcctgcaatcttctagttgagaagagttcaagttttctcccagggcttcccattctacctttgaagtataa

SEQ ID NO: 718745 - DNA, 1468 bp, Homo sapiens
gaaataggcattttgattaccattgatattttaaatcaagaatgaccaagtacattgccattaagtgaactgatttgagtttataatctatttgtaattaaatttataaagctatgtggttctttatttgaaaattagttataactccagttttataaccaacccttgatgcctgctcttgttttgttttgccctacccaaacatctttataataagatataaacccaagtttcaagtcatgttatttgaagagtaggtcaagctctggttcaggctgaaattcatctttatagtcaaagtgtgactgatgatattaaacaacagaacattttaactttataggaggatcttaaagtgaaattgctgcctcaaaggaccatcatcttgtgggaactaatgaaaaacatattttgccatggaaagcactcacatatgtatttaataaatgtcgttactgaccatctactatatcctaggcactgtgatccagagacaattgaaacatatttcttatccctatggagtttacagtttacttggggagatttgaaatactataagaactcactataaaaagatatttttattagctatcttagattggaaatccactttctgcttactgtgtctctgttccatcttctttcattttattggttttagtttgcaagcctagttcttaagaagactgtggattactttcttggaattttttcccaattaggagagcagaatcctaactgctaatgagattgaattgtaatggcatttgtttctgagcatagacgttttattttccctacccattcatgacttcaattcaccaagcattaaacatttacttaggtctcatgctttatattagatattgaagcaattaaaattaagtgtttgtgagtcagattctctgttttagaggtcagcaaactatggtccaggtaccaaatctggcctgttgcctatttttaaaataagttctattggaacacagtcatgctcatttgtttacgtgttatctatggctggttttgcactacagcagtagcattgattagttgcaatagaaactctgtaactcacaaagcctgaaatatttactatctaactttttctgggaaaagtttgctgacccctgttctatttaataaacattataatgcttttaagtttaacataaaaaggtacttagatttatagaatattaaaattacaaataattcattccagrtcagttttagatgtttttgatcctttgatattttacattttaaggtttatcaaccttctctacatatccactgtgatattcatgcaatgtttatgtaaatgtatctatactatattccaatatatttttgttatgctattttttgtatgtaaattatatcacaagtgaaaaatctgaatgctcattaaagtcctctgtatagatgacttttcaacctcacaaaaacaaatgaccaagaa

SEQ ID NO: 718746 - DNA, 1001 bp, Homo sapiens
tctccatctcttcatgaatgttcatcttttacattagagtcttcaacatattaatcatggttattttaaagttcatttgtgattatgctagtactgagttatctgtaagtctggttctattcattgtctcctgaattttattttttctttttgtgtgtcttatacattttgattgaattctagattattacttctagacttttttttgttgttgaaatcttgccaaatcccagtctgaataaatccagctttctattatatttgctcctagtctactgaatgttgctaaagtaagtcctaggcttattgatagtaatatagattcatgtgctgtaattatagttagagcttcgatgttatctgcatttcttttactaatctaagtattcgatattaattttatcttcgttctttccttttgattgaggaattctttatctctcattgttccatcttttgaaaactgttttcaaatttctatttgttagtcttcattttgatctacctctttgcttccttctggctccctgtgataagtatgccagtaaggtatatttattcattgtggagaatttatttaatgakagctaccacttttatatgctttcaataaatgttccaggcactgtgctcaacattttacatgcattgtttctctatgtcttctttagacaataagttctttaatgtaaagaacttctcagtacctgtcatactttgcagtcaataaataactacatgaatgaaactactgattccatatagagacagggaagtttatagctgtaaatgcctacatttaaaaaagaaaaaagatctgaaatcggcaacctagctttatactttaaggaactagaaaaagaagagcaaactaaacccaaaatagtagagaaaatcaaggaaactaaaagttgattctttgaagagatcaacaaaattgacgaaactttagctagactgacaaagaaagagagaagatgcaaataactagaatcagaaaa

SEQ ID NO: 718747 - DNA, 503 bp, Homo sapiens
ttgttgatcacctgctgcatttcaggaaactgagcattttgctgaggttacaaaaatgaataaaaccaagttttggctcttaaagcatttacagactagctggagaaccagatatataaacaatggtcttaaaaatagtaatagaggaacataaaaaataccaaggaactcagaaaaaagtatggcttttattaggctgttcctgatttctttctttctttccttctttcyttctttctttctttctttctttctttctttctttctttctttctttctttctttcttttcttttcttttctttctttttctttctttctttctttcttgagatggagtcttgctcttgttgcccaggctggagtgcaatggcacgatctcagctcactgcaacttccatctcccaggttcgagcgattctcctgcctcagcctcccgagttgctgggattacaggtgcctgccaccacgcccggctaatttttgtatttttagtagagatgg

SEQ ID NO: 718748 - DNA, 646 bp, Homo sapiens
tggataaaatagatgttgagaccttgtaaatacagaattgtacagatataaacaagtaatattgtatttaatgtaaaatttatattccagatctcagatgtagattaactttatcactatataaacataataacaaatattttggccaggcacagtggctcatgcttgtaatcccagcactttgggagtcctaggcaggcggatcaccaggtcaggagatcgagaccatcctggctaacacagtgaaaccccatctctactaaaaatacaaaaaaattagccaggcatggtggtgggtgcctgtagtcccagctactcaggaggctgaggcaggaaaatggcatgaactcgggaggcggagcttgcagtgagccgagatcgcgccactgcactccagcctgggtgacagagcaagactccatctcaaaaaaaawaataataataataataaatattttacaaaggcattaataattactttaaaatgtgatgttagtgtattatatgtagtagtatatatctttgtgtgcatatattacatatacatgtagtagagacagaaagatcatgggaatcagcaaagaaggaaataacaaagattcaaggttaaaagatgaagaagggagtataacaaatcaggaaaatt

SEQ ID NO: 718749 - DNA, 603 bp, Homo sapiens
atgatatgagccaggcacaggggctcacgcttgtagtcccagcattcagcactttaggagcccaaggcggtcagatcacttgagctcaraagttcaagaccagcctgggcaacatggtgaaaccctgtctctacaaaaccatacaaaaattagcagggcatggtggtgcacacctgtagtcccagctactcaggaggctgaggtgggaggatggcttgaccccaggaggcattgattgcagtgagccaagatcacaccattgcactccagccttggtggcagagtcagactctgtctcaaaaataatagtaatcattattgtggtaataataattagttacaatatattatactatataatattactatataatatcatatagtaataattattattactataataattattattgtataaggcaagatacaaaaggatatgacaaaagtcatgtcctgggaacaaataagtaaaatagaagctcaggaaggagaggcatatttaacttggaatcttcaaggaaagttccagtgaagtaaacttaaaatactcccaaaagattaaatttacataagcagaaagaaggaaaaataccctagaaa

SEQ ID NO: 718750 - DNA, 626 bp, Homo sapiens
ctttgcctgtgtctgaatgcccagccttaacagtgttgctaatcacttatgcgaaatgtgtgaccaagtctacatttgctggaaatttytgacattgtaaatatttgggtatattgttgtaatcatcattaattagtattttcaggaaggaaccaggggtaacatatagcaacctagcaagtggatttacttttacagattcattcctctacagttctgttcatgggtcatggttggttttttttttttttcagtttcttttattgtggtaaaatacacataacgaaatgttctgtcttacccatttttaagtatacaatttattggtattaagtatattaatattattgtacaactatcaccaccatccatctccagaactcttttcattttgcaaaattgaaactttctatccattaaacagtaacttctcattccttcctcctcttagcccctggcaaccatcattctgctttttgactatgatttggactacaatgaataactaatttaagtggaatcatacagtatttatctttttgtgaccaatttatttcagttaacatgatgtcctcatcaaggttcactcatattgcagcatatattagaatttatttatttttgtt

SEQ ID NO: 718751 - DNA, 1384 bp, Homo sapiens
agattttagggtattttctatgtactagtattatggtaacagattactgaatcatacaacaaccaatgccattctatcacccatatttctactgcagcaacagaatatggccaacatgtgtgcttcaaataaaactcaggacagtttgacgcaagtgttcataacagaaagagtacattttgtgaggggatagattgtatttctgcatttcttatggagagcagtcttcttcctgtaactcaagcccattgccaagtccctaaaacamatcagattcttaataaatatttttaaattaatgaatgaatgattttttcatgaagcatctcataagtaaatggaaactgcaaaaaaaaatgatgtgttacacttcttatatttcccaattttgtaattacagtgctgaccgtgtagtaagaactcaataaacagtacttgctaatttgttaattgattgatgagactcagccactatcaattaccactgaggaatgaaccaagaagcagaattaaacttcattaagaaagatttcattaggctcataagacttttgtgactttcaatgttcctaactaccagaaaaggatattttattgcctgtctggggaactaaagcctcttatatgttttgcaaagtaaactttcatatgggatgtgtaatgtcttccacagtcatgtcatggattaattattgttcattttttttattctatgttcattctatgctcacatgtcaactacaagttcttatataagacaaaaagggtgccttaaattatgtgctattttggtccataaaatatttaaagaaaaaatttatttcagatatgagagtagtattttatgaaataatatcaaaatgaaaacactggcaagagctacacattcattaagtattgatggaacatccacaatgtacaaggcaaaatgtttggggctggacaaggtacaaactctaatttccacccctgaggaagaagaaacgggcaaataactgactatgacaattatgatgttatcggggcatatatatggtaagaggaaataattaactgcgtggaaaaaagggaaagatttcatgagggcttcaagatgtgagctgaaaataagcgaaaattagccaagtagaaaaggagaggaagactgatatggtttgaatgtgtgttccctccgatatctcatgtagaattgtaatttccagtttggagaaaaggcctggtgggaggtgaattggtcacgggggcagatttccccttgctgttctcaggatagtgagtgcgttctcgcgagatctgtttgtttaaaagtgtgtagcacctccctcttcactatcttcctcctgctctggctgtgtgaagatctgcctccttcctcttcggcttc

SEQ ID NO: 718752 - DNA, 1384 bp, Homo sapiens
agattttagggtattttctatgtactagtattatggtaacagattactgaatcatacaacaaccaatgccattctatcacccatatttctactgcagcaacagaatatggccaacatgtgtgcttcaaataaaactcaggacagtttgacgcaagtgttcataacagaaagagtacattttgtgaggggatagattgtatttctgcatttcttatggagagcagtcttcttcctgtaactcaagcccattgccaagtccctaaaacaaatcagattcttaataaatatttttaaattaatgaatgaatgattttttcatgaagcatctcataagtaaatggaaactgcaaaaaaaawtgatgtgttacacttcttatatttcccaattttgtaattacagtgctgaccgtgtagtaagaactcaataaacagtacttgctaatttgttaattgattgatgagactcagccactatcaattaccactgaggaatgaaccaagaagcagaattaaacttcattaagaaagatttcattaggctcataagacttttgtgactttcaatgttcctaactaccagaaaaggatattttattgcctgtctggggaactaaagcctcttatatgttttgcaaagtaaactttcatatgggatgtgtaatgtcttccacagtcatgtcatggattaattattgttcattttttttattctatgttcattctatgctcacatgtcaactacaagttcttatataagacaaaaagggtgccttaaattatgtgctattttggtccataaaatatttaaagaaaaaatttatttcagatatgagagtagtattttatgaaataatatcaaaatgaaaacactggcaagagctacacattcattaagtattgatggaacatccacaatgtacaaggcaaaatgtttggggctggacaaggtacaaactctaatttccacccctgaggaagaagaaacgggcaaataactgactatgacaattatgatgttatcggggcatatatatggtaagaggaaataattaactgcgtggaaaaaagggaaagatttcatgagggcttcaagatgtgagctgaaaataagcgaaaattagccaagtagaaaaggagaggaagactgatatggtttgaatgtgtgttccctccgatatctcatgtagaattgtaatttccagtttggagaaaaggcctggtgggaggtgaattggtcacgggggcagatttccccttgctgttctcaggatagtgagtgcgttctcgcgagatctgtttgtttaaaagtgtgtagcacctccctcttcactatcttcctcctgctctggctgtgtgaagatctgcctccttcctcttcggcttc

SEQ ID NO: 718753 - DNA, 1384 bp, Homo sapiens
agattttagggtattttctatgtactagtattatggtaacagattactgaatcatacaacaaccaatgccattctatcacccatatttctactgcagcaacagaatatggccaacatgtgtgcttcaaataaaactcaggacagtttgacgcaagtgttcataacagaaagagtacattttgtgaggggatagattgtatttctgcatttcttatggagagcagtcttcttcctgtaactcaagcccattgccaagtccctaaaacaaatcagattcttaataaatatttttaaattaatgaatgaatgattttttcatgaagcatctcataagtaaatggaaactgcaaaaaaaaatgatgtgttacacttcttatatttcccaattttgtaattacagtgctgaccrtgtagtaagaactcaataaacagtacttgctaatttgttaattgattgatgagactcagccactatcaattaccactgaggaatgaaccaagaagcagaattaaacttcattaagaaagatttcattaggctcataagacttttgtgactttcaatgttcctaactaccagaaaaggatattttattgcctgtctggggaactaaagcctcttatatgttttgcaaagtaaactttcatatgggatgtgtaatgtcttccacagtcatgtcatggattaattattgttcattttttttattctatgttcattctatgctcacatgtcaactacaagttcttatataagacaaaaagggtgccttaaattatgtgctattttggtccataaaatatttaaagaaaaaatttatttcagatatgagagtagtattttatgaaataatatcaaaatgaaaacactggcaagagctacacattcattaagtattgatggaacatccacaatgtacaaggcaaaatgtttggggctggacaaggtacaaactctaatttccacccctgaggaagaagaaacgggcaaataactgactatgacaattatgatgttatcggggcatatatatggtaagaggaaataattaactgcgtggaaaaaagggaaagatttcatgagggcttcaagatgtgagctgaaaataagcgaaaattagccaagtagaaaaggagaggaagactgatatggtttgaatgtgtgttccctccgatatctcatgtagaattgtaatttccagtttggagaaaaggcctggtgggaggtgaattggtcacgggggcagatttccccttgctgttctcaggatagtgagtgcgttctcgcgagatctgtttgtttaaaagtgtgtagcacctccctcttcactatcttcctcctgctctggctgtgtgaagatctgcctccttcctcttcggcttc

SEQ ID NO: 718754 - DNA, 567 bp, Homo sapiens
tttttttttgacgggttctaagggagaatctgttccatgcatctcttccagctgctgacatttatcagcaatccttagcattccttggcttgtagacacatcactccaatctctgcctctgtcatttgatggtcttctttccccgcatttctctgctccttcagattcttctctccacgtgtttctctcctcttataaggatgccagtcacgttgagtttcttcctactcccttgtgacttcatcataaccaatttcatttgcaactcmttttcaaataagatcacatgctgaagtactgagggttagtacttccacagatcttttggagggacacaattcaactcacaatagtgtgtaacttgaaaaatgcaataactcagaactcctgggtatgatgtcccctcaattaagcatgataatggtaaattacctttccaaaaagaaccagataaaggcggcacgtggcacagagaaatgtctgtatacctatagttcacacatgaggttcagggacagatccatgatatggcaaggggtgggagattcttcatacccctgtaaccct

SEQ ID NO: 718755 - DNA, 613 bp, Homo sapiens
tggtctttaagaaggtaatttgtattttaaggagkaagcaatacgatccattgagattcaggaagaaaatattagagcttctactttcacacatttttaaattgaaaaaataagaaaattatattacaccaatgtttactatatcacttgacacatggaccttcattcagtctctatgtcatagacttaccttgaagagtttcattttggatgtaagtttgaaatattttggggacatccaaacaaggatgtcaaggaagcagctagataagtgatcacaagggagagaagggcagattcataaaccaagaaggtgtctgaatatagaaggagtggatgggatgcctttggtgacaaaagcaagtgtaactaggaggggagtgtaacatttagagtttgggtacaaaaggaagaaatgaacaaggagaactgagaaggaggcaagggtcaagggtggcaagagaagcaggcgggtttccaggaaaaaatgatagcgtgtcaagaaagacggattaaccacattaaatactgctggagggttgaggaaaatgagggcacagtatgcctactggatttgattacacgagcactatggtgaactcagcaagagagc

SEQ ID NO: 718756 - DNA, 604 bp, Homo sapiens
ggtttgggtagctgtgtaccaatttgatagctcccccttttatctggctctcaaactttcttggaatgtctgcctctyctccttacctgattcaccacagccagccacacaaacactacatagttgattcctgagccaaactcaaagtatttgcagataactcaaaaatgttgcctcatcaatgaagctctctctggttctctaaggaacggtattcttgtactactctaaagctgcatagcattttatcctaattatcattattactttctaccttccatgataaatacgtgccccatttccctattcttcaacatcagcccctcctcctgcattggcggaccgagggactcaagccctattcctgacccattgcaggctccttctgctactctgcagccacaggtctttatcaatcttccctcctttctcactccttagggcctttttcacaagttgttctttctcttggaatgactgcttcttctccaagtttcagcatgagatctcttcattgaaaacctttcctcttctacctcctactaatttcatctagatgtctctcctctgtgctcctactcacactatactgatggcatttaaa

SEQ ID NO: 718757 - DNA, 604 bp, Homo sapiens
ggtttgggtagctgtgtaccaatttgatagctcccccttttatctggctctcaaactttcttggaatgtctgcctcttctccttacctgattcaccacagccagccacacaaacactacatagttgattcctgagccaaactcaaagtatttgcagataactcaaaaatgttgcctcatcaatgaagctctctctggttctctaaggaacggtattcttgtactactctaaagctgcatagcattttatcctaattatcattattactttctaccttccatgataaatacgtgccccayttccctattcttcaacatcagcccctcctcctgcattggcggaccgagggactcaagccctattcctgacccattgcaggctccttctgctactctgcagccacaggtctttatcaatcttccctcctttctcactccttagggcctttttcacaagttgttctttctcttggaatgactgcttcttctccaagtttcagcatgagatctcttcattgaaaacctttcctcttctacctcctactaatttcatctagatgtctctcctctgtgctcctactcacactatactgatggcatttaaa

SEQ ID NO: 718758 - DNA, 604 bp, Homo sapiens
ggtttgggtagctgtgtaccaatttgatagctcccccttttatctggctctcaaactttcttggaatgtctgcctcttctccttacctgattcaccacagccagccacacaaacactacatagttgattcctgagccaaactcaaagtatttgcagataactcaaaaatgttgcctcatcaatgaagctctctctggttctctaaggaacggtattcttgtactactctaaagctgcatagcattttatcctaattatcattattactttctaccttccatgataaatacgtgccccatttccctattcttcaacatcagcccctcctcctgcattggcggaccgagggactcaagccctattcctgacccattgcaggctccttctgctactctgcagccacaggyctttatcaatcttccctcctttctcactccttagggcctttttcacaagttgttctttctcttggaatgactgcttcttctccaagtttcagcatgagatctcttcattgaaaacctttcctcttctacctcctactaatttcatctagatgtctctcctctgtgctcctactcacactatactgatggcatttaaa

SEQ ID NO: 718759 - DNA, 979 bp, Homo sapiens
caattctcttttattttttatcttttctcctgtgagtcaatgctcatcacaagagcccttcagtctagtttctacttccttactgtttttttatttccttatatgcaatttgaggtgctttttgttatggcttatttgctttgttttgttttgctttttggctgtgcatgcaactaagaccagagagttaatagtgtcatactcatggaaactgaagtcagttaaacctaggagttgacagaagcatcaatattttttatataagaatctctgctgagcactgaggaacatattctatgaataagatgctctttacatctgcagtaggtggtcataggaacttccaccaggaatccatgctctacttcctagaagtgatgactgtgaatgtgaaataccacacccatgatggtgttgtatgacacagttgacattataaaatagataatatcttagtgggcctgatctggacctgatccaatcacatgagacctaaaaagcaaagaattttctctgactggtgaagaaaaagaagacaaaaatgggagccagagagtttcaaagcacaagaagsagcagatgcactattgtttgctttgaagctggaggaagccatgtgagaagtagagtggacagcttctaggagccaaggctgacctctactgacagccgtggggaaacagggaaatcagtcctacaaccaaaaggaactagattatgccaacaacttacatgagttggaagtggattctccccaaagcctctagtgaagagctaggctggctgacatcttgatttcagtctttggagaccctaagcaaaaaggctagttaagctcacctaaatatctgacatacagagctgtgaaagaatattaaatagtgttatttgtattaagccaataagattgtggcaattctttacacagcaatggataactaataccgcattcttcaagagtataaaattactagagaag

SEQ ID NO: 718760 - DNA, 617 bp, Homo sapiens
gaacagaaaaccaagcaccgcatgttctcactcacaagtgggagttgaacaatgagaacatattggacacatggagggaaacatcacacaccagggtctgttggggggtgggggacttgggagggaaagcattaggaaaaatacataatgtagatgatgggttgatgtgggcagcaaamcaccatggcacgtgtatacctatgtaacaaacatggacgttctgcacatgtatcccagaacttaaagtattaaaaaaaaaaagaaggagatctgtagtttaaaaaatagtaatcaccaagtttaatcaattaaaaaataaatattctgttaatttaacagaaaaaaaaagaatgacatcagctactgtatttagggcccatcctaatggatgatataaccacatcttaactaattacatctccaaagacgctatttccaaataaactcacatggtaaggttctgggtgggcacgaatctgggaagacacccttcaaccccgtgcacagggatcagagggcaagcaggagagtagcccctgggttgtcagggtccaggagagctgacggaagctcagggcagagcggcagtggagctctagtggagccagaagtgggga

SEQ ID NO: 718761 - DNA, 638 bp, Homo sapiens
caacttccctagtagctgcgactataggcacacgtcattgctcctggcttaaagagaactatgagtaaatattggtataggtggtgtctcggtgtggccaaagttatagagtataggagaccccagactcttgtgacctgagggttcttccgtaatgtcactgtgagcttccgggatacttttcttaaatagctgcacatgcgttttaaattcttgtgacacacaattaataataacaactaatgctatttggagagtccttttaaggaattcatgacaccccttcctacacattccagggccacccaatggtccaccagaacgccactgccgcacctttatgacccgcgccgttyactttccagtcgctcgctttcaggtgggccggccgggatgtcttcactagcaggtgctggacgtccctccaggttaactggctgctgcaatgacacaacacaccctagagtccacacagctcaacaacggcagccacacaggccactcagaggcagggggtcggcagccaacccacgtctgaacttcagcaagcccctcaggctaaggactgcattccttggcaagggtttatttcaccacctctttgtaaacaagtttccggcaactaaatcctgagggaa

SEQ ID NO: 718762 - DNA, 1638 bp, Homo sapiens
ccatagaatactactcagccacaaaaacgaattgaaataatgtcttttgcaacaacttggatggagctggaggccattattctacatgaactaactcaggaatggaaaaccaaatacttaatgttctcacttgtaagtgggagctaaggcatgagggtgcaaatacatatagagtgatataatggactttggggactctactggggtaggtttggagagggtgagggataaaagactacatattgggtacagtgtacactgcttgagtgatgggtgcactaaaatctcagaattcaccactatagaacttatctaggtaaccaaaaaccacctgtacccaaaaaaactattgaaataagaaaataataaggcctataaaaggttttctgaacataacaaaaccaaaaaacttaagccttataggtttactccataattttcaagaaacagggcacccattcacagctctccctgaataatatcttactgatccttttgttaatactggacgattgtcacagaaggactgagcctaaattaacaataatttgggatttacaaattaatcttttcatttttataaacatttaaaactccaatattaccaatgaataaaacaagtgataaaaaacaaaaactcaaagaccaaaatgtgcttcaagaacttcagtaacacagtaactgaagaacaacacaacacaggattcaccagtcttaattgaggtaatcaggaaagaaagcaactgaaaagtggagcaggcactccagttacggtccctgtgcacacccacctggtggaccttgagagaagagaattatcatcaattcccatgtgccatctttgaacacctaaaacccaagggcattgatacaaaagaagaaactgacaccagagggttcttgtttactaaaacagccagcaaaagcacacttttttttttcactctctaatggagattttggacattaatattataaaaccacttattactaatctaaactatgacaacatctgaatacattttactgacaagcagggcattaaaaggctaaatttctgcattatactcacagaacagacaaatatttctcactaattttaccttcaaataatgcaatttttaagtcaccgcagtttagtaagtgctcaatttttttttttttttttttaaacagggtctcacttttcaccaggctggaatgcggtggcacaaacacagctcactaragcctgaactgcctgggctcaagcaattctcatggctcagtcccccaaatagctgggattacaggcactctccaccatgcccacttaattattttattttatagagatgagatttcaccatgttgcagaggctggtctccaactcctgagctccaacaatccgcccacctcggcctcccaaagtgctaggattgcaggcatgagccaccacacccagccttaagtgctcaaaactttttaaaaagggattttagaaaatgcttcctttagtaaatgcttctatttatgagatgtcaaaattccgtcttagaatcacttaactgtcttcacgtcgtgttcagaagtcacttggcatataaaacagacatgtccaaaccatagctcaagaatctcaattggcagaaaactgt

SEQ ID NO: 718763 - DNA, 252 bp, Homo sapiens
taattctttgcccagaaagatccaattttatcccatggtttccatatgtcagtacacaatctgttatgttgcaattgaattgggaagttctcaacaaataattttaagatttagtcattatttcctgaggttcactaaattagtaatactgcaggctaatgactcaattttgttttaatwtcattgttcaaattcttaatacacatagattgtgtcctattacataacacttaatgtaggcgcattcacaag

SEQ ID NO: 718764 - DNA, 2017 bp, Homo sapiens
atatatatatatggatcaatgagagtgcaaacaaactgtgactctatctgtatagcatattaatgcccatcagagatatccactrtggaaggggcactgtacaagaactatatcaaacgacctggcaaactgtcatcagcggaggctgtctttgctgtcccagcactgctgtcatgggctaattaatgctgtagctagggggcaggcatggaggctatgcatgagcttaactctaggagcttccactcagtaatgctaaactagctactgtcactgacaaatgtccaacctacaagcaataaggacttaggagtaagtcaattacataggacttcttccaccctagaaggagcagcagttcattttaactgggatgaacccaaatgtaggctttccttttttgcctttactgtctcaactagcaactatctgaaggcttatgttataagtaagccttgcaagtattatttcaaccaacacattatcccacataacatcccatggaatcaagagatccactttaaagaaatggagggagcaatggccacatggcatggaatctctctagcctgtcacctaccataccatttagaagctactggcctagtagtgcaaatggaacaaacttttggagaaaaatttggggtggcaataaatgacagattgtgagggctgggtaccagcaattgtaatatttagaatgcatgggtctgtgaaacaaaggtggaagtaaatagtagtggcaaacttgaatttgtttcttgtctcggtacttctagtctcggcatgtctagaagacctagttctcaaaaggaagggtacgcttctgccagagcttttatgaaactattaaactttaagctgttgctgacttccagtcactttgtgcttcttatgccaggaaactagctgtcaaagaaaggatgaactgtcttgtaggtagctgaccctgatcatcagaggcagaaatagtaattttggcaccctaatgattcataggagaatttcttcatactcctgtgtctaattataacagcaaatggacaggtgcagctgtcacagcctgaaaagtacctggcgactgttgcggggcaacgacagctgatggagtgggggtaaaagaagaatttactaagacagctatagggaaaggaaggcagatttattagagaaagtaggaaaatatgttgccagagagagaacgggctgccggaaactgactgactgtaaagaaacaaaggcttgctggagatttataggttagtgtttatgctgtctgtcaaagagagctttctgcagtactgataatgccaaggttgcagtgagctaacttgcaggtgtcttgtgatagttgggcacagagagattgtgagttacttgcacaggagggctgtgtgtcctggatcttgaagaaaggcagacttgtagcttatctcctttctgtcttcgctttcccctactcccaccagcctgactccttttgcctaattaggattccacagtgaccagggctcagatcttttaaagatgatatttgggcaacccatccaagtgagccacctagactaggcaatgtgctgacaaatagcgagaggaatctggaataggtagtagagaagagagatggtaagtactaagttatgcctttaggaccagcaccattatgagctttgtttgtcttattaactttcctcttgtaagttacccttggaaaagaaccaccttaaaccacaaggaagctgtttatagatggggtaaactcacggcttgaagcaataagtggactgtaatggatgctgtgatttggcacccaggtccttctttggactgagactgtcattttcccaattgtcaggaatgttggctgcttgtggcgtagagcgacatctttcgctctggaaattgtcaatcaataaagaaggttgtctcttgtaacgttatacacccttatcccaccaccgtccttcgggaggtagcttacaaccagtggttgaatgttgaaagagtgcaaaggctt

SEQ ID NO: 718765 - DNA, 2017 bp, Homo sapiens
atatatatatatggatcaatgagagtgcaaacaaactgtgactctatctgtatagcatattaatgcccatcagagatatccactatggaaggggcactgtacaagaactatatcaaacgacctggcaaactgtcatcagcggaggctgtctttgctgtcccagcactgctgtcatgggctaattaatgctgtagctagggggcaggcatggaggctatgcatgagcttaactctaggagcttccactcagtaatgctaaactagctactgtcactgacaaatgtccaacctacaagcaataaggacttaggagtaagtcaattacataggacttcttccaccctagaaggagcagcagttcattttaactgggatgaacccaaatgtaggctttccttttttgcctttactgtctcaactagcaactatctgaaggcttatgttataagtaagccttgcaagtattatttcaaccaacacattatcccacataacatcccatggaatcaagagatccactttaaagaaatggagggagcaatggccacatggcatggaatctctctagcctgtcacctaccataccatttagaagctactggcctagtagtgcaaatggaacaaacttttggagaaaaatttggggtggcaataaatgacagattgtgagggctgggtaccagcaattgtaatatttagaatgcatgggtctgtgaaacaaaggtggaagtaaatagtagtggcamacttgaatttgtttcttgtctcggtacttctagtctcggcatgtctagaagacctagttctcaaaaggaagggtacgcttctgccagagcttttatgaaactattaaactttaagctgttgctgacttccagtcactttgtgcttcttatgccaggaaactagctgtcaaagaaaggatgaactgtcttgtaggtagctgaccctgatcatcagaggcagaaatagtaattttggcaccctaatgattcataggagaatttcttcatactcctgtgtctaattataacagcaaatggacaggtgcagctgtcacagcctgaaaagtacctggcgactgttgcggggcaacgacagctgatggagtgggggtaaaagaagaatttactaagacagctatagggaaaggaaggcagatttattagagaaagtaggaaaatatgttgccagagagagaacgggctgccggaaactgactgactgtaaagaaacaaaggcttgctggagatttataggttagtgtttatgctgtctgtcaaagagagctttctgcagtactgataatgccaaggttgcagtgagctaacttgcaggtgtcttgtgatagttgggcacagagagattgtgagttacttgcacaggagggctgtgtgtcctggatcttgaagaaaggcagacttgtagcttatctcctttctgtcttcgctttcccctactcccaccagcctgactccttttgcctaattaggattccacagtgaccagggctcagatcttttaaagatgatatttgggcaacccatccaagtgagccacctagactaggcaatgtgctgacaaatagcgagaggaatctggaataggtagtagagaagagagatggtaagtactaagttatgcctttaggaccagcaccattatgagctttgtttgtcttattaactttcctcttgtaagttacccttggaaaagaaccaccttaaaccacaaggaagctgtttatagatggggtaaactcacggcttgaagcaataagtggactgtaatggatgctgtgatttggcacccaggtccttctttggactgagactgtcattttcccaattgtcaggaatgttggctgcttgtggcgtagagcgacatctttcgctctggaaattgtcaatcaataaagaaggttgtctcttgtaacgttatacacccttatcccaccaccgtccttcgggaggtagcttacaaccagtggttgaatgttgaaagagtgcaaaggctt

SEQ ID NO: 718766 - DNA, 740 bp, Homo sapiens
ttagctttaggcactacattattaaaattataacttcactaagcagtcaactaacttttaatctctgtttttatgtggtggtaaaattctactgcctgaaaataacaatgttataaagaacttttctataaatttacaaactgggagaaaatctaaataactttctgaaataatcagatttcatttgagcctaaagtgaattgaaatagtaatggaaatgagctataattttcttcgtatagtatgttattcctctagtgagawctgattaaaaatatgccagtgttcaggcacattttattattcaccatattgatgaattcaggttatcccaatgtgagctgaaataatatattctaagaggacatattatccttcacggaaatatgcataataaagagaaatttaggaatctatggcttatggtgtgttgattgatctctagaggaagctccactttgttttgtgccctggagattttcatactcgggaggtgcatcgcaggaacacatggaatctgtaaagggtgtggctttcttttgtaaactacaaagtcaattatgtgcaaattttaaaaagtctatttaagaatatagtacagatagaaggtgagaaactacaagctgattttcttaaaatgatttgcatccttctcctgaacatcgttctgtgctaacatggaaatcagtatcctattttgaggcactgttacatatattttggagatgctttatgttaac

SEQ ID NO: 718767 - DNA, 1103 bp, Homo sapiens
ccatgtccctgcaaggacatgaactcattcatttttatgactgatagtattccatggtgtatatgtgccacattttcttaatccagtctatcattgatgggcatttgggttggttccaagtctttgctattgtgaatagtgccacaataaacatacatgtgcatgtgtctttacagtagaatgatttataatcctttgggtatatatacccagtaatgggatttctgggtcaaattgtatttctagttctagatccttgaggaatcaccacagtgacttccacaatggttgaactaatttacactcccaccctgcaaagacattatttccaaataagttcatattcacaaatactaaaggttaggactttaacatatctttttgggagacatacactaattcaacccacaactttaggcatatgctgtgactaattatatcaattatattttgaattcaatatatattgaatttaatatatattgaattatttgaattcaatattgaatgttatatataatcatattttttaaacttatgtgtgtctttgtatatcaaaatatacccacaaacacacgcacagagatatggttatatgcatatttgtaatwttctcttcccaccatatcaaactttgacatccatttgttgaactctgacttgcttcccttaattctattatacataacactgctccctttgtttgaattgaagctactgtaattctgactgattaacctagtgaaaggcagtcaggagaaaggtcccagtcttcttattctaatagcaacaaaaaagtgccttaagaaaaacaatctatcaatacaatttctaaattataatgaacaaaaatagtatggagctcttttagattggtaaaatctacctccctgtaatttgtggcaatttttagtttaaaaaaatcaggtgtttggtattgattaaagagggaacaaagcataaaatctcacctgcagtaacatgtcaaaattttgctgtaaactaacaattcagggaatacagccactccaggacacccaacagaaatgtgaaacaactgggaagcaggactactgcaaagcatggctaaatgacctaaaatg

SEQ ID NO: 718768 - DNA, 1103 bp, Homo sapiens
ccatgtccctgcaaggacatgaactcattcatttttatgactgatagtattccatggtgtatatgtgccacattttcttaatccagtctatcattgatgggcatttgggttggttccaagtctttgctattgtgaatagtgccacaataaacatacatgtgcatgtgtctttacagtagaatgatttataatcctttgggtatatatacccagtaatgggatttctgggtcaaattgtatttctagttctagatccttgaggaatcaccacagtgacttccacaatggttgaactaatttacactcccaccctgcaaagacattatttccaaataagttcatattcacaaatactaaaggttaggactttaacatatctttttgggagacatacactaattcaacccacaactttaggcatatgctgtgactaattatatcaattatattttgaattcaatatatattgaatttaatatatattgaattatttgaattcaatattgaatgttatatataatcatattttttaaacttatgtgtgtctttgtatatcaaaatatacccacaaacacacgcacagagatatggttatatgcatatttgtaattttctcttcccaccatatcaaactttgacatccatttgttgaactctgacttgcttcccttaattctattatacataacactgctccctttgtttgaattgaagctactgtaattctgactgattaacctagtgaaaggcagtcaggagaaaggtcccagtcttcttattctaatagcaacaaaaaagtgccttaagaaaaacaatctatcaatacaatttctaaattataatgaacaaaaatagtatggagctcttttagattggtaaaatctacctccctgtaatttgtggcaatttttagtttaaaaaaatcaggtgtttggtattgattaaagagggaacaaagcataaaatctcacctgcagtaacatgtcaaaattttgctgtaaactaacaattcagggaatacagccactccaggacacccaacagaaatgtgaaamaactgggaagcaggactactgcaaagcatggctaaatgacctaaaatg

SEQ ID NO: 718769 - DNA, 630 bp, Homo sapiens
  misc_feature 471: n = A,T,C or G
taaaaaattgtttaccatttatctaaggcttagaaaggaattcagtgacaaattgtccttcaaattaaattagtaccccaaaatttacccatgtacaataattcttattataacactaatcatgtacctataactaaaaaatatccaaatgcctctcaatggcaataactatataagttataatgtattcaaataatggaatacaatacagcaatgagaayagattactataagtaacaatataggtaaatctcacaaataataagagaaaagccagacacaaaaggttgcatagtatcttatttgatttatataaaacttaaataggcaaaattaatgcatgtgttagagatcaatataggatgtagtgttttaaaaagtggacacagtgtggggtttctggggtactggttcttttttttttatctggatgctggttgcatgtgtgcactctttctgcaaaggatctgngtccttttatacatctatgctacacttcagaaaagttcagagaaattatcttactaaaggcagccttaaaacacctgttcagcacatatcaaataaaattcttaacagtcaaaaaccaggcatggatcggtaaaacttagttacataagactggtagca

SEQ ID NO: 718770 - DNA, 630 bp, Homo sapiens
  misc_feature 471: n = A,T,C or G
taaaaaattgtttaccatttatctaaggcttagaaaggaattcagtgacaaattgtccttcaaattaaattagtaccccaaaatttacccatgtacaataattcttattataacactaatcatgtacctataactaaaaaatatccaaatgcctctcaatggcaataactatataagttataatgtattcaaataatggaatacaatacagcaatgagaatagattactataagtaacaatataggtaaatctcacaaataataagagaaaagccagacacaaaaggttgcatagtatcttatttgatttatataaaacttaaataggcaaaattaatgcatgtgttagagatcaatataggatgtagtgttttaaaaagtggacacagtgtggggtttctggggtactggttcttttttttttatctggatgctggttgcatgtgtgcactctttctgcaaaggatctgngtccttttatacatctatgctacacttcagaaaagttcagagaaattatcttactaaaggcagccttaaaacacctgttcagyacatatcaaataaaattcttaacagtcaaaaaccaggcatggatcggtaaaacttagttacataagactggtagca

SEQ ID NO: 718771 - DNA, 612 bp, Homo sapiens
tttaaacacaaagcctctttattttagggcaaggctttcttcccagaaggcaagaaagctatagtgaagaggaatgtcttattataatgattttagtatgaaaaaaagggaaacaatttgcactttgctaacctacacatttaataacacaaaaagaagcagtttttctaccttatttcttagctaagatttagcagcagttgtgggaattaaaaattactcatacttaaccctaatactctgtgatktattatctgacagagaaaagaataatgtaagtgatatatgcttaaatgttggaaggtagattagagtatcttattcttgatatttgtcatagttgctttttttaacctgctataaactcctactttcttatacttgcttcatttcctaactctctttctccagtaggcattattttcattcagtgctattatcttctattatgatgttatttatttcttcttttcaaccagagctttctatctttttgagctctgcttctgctttcatattatagcagagtttttctagctctactagtaagaaagacaccattaacttcccagacagcatattctatccatcttatcttaaccccttaattcc

SEQ ID NO: 718772 - DNA, 612 bp, Homo sapiens
tttaaacacaaagcctctttattttagggcaaggctttcttcccagaaggcaagaaagctatagtgaagaggaatgtcttattataatgattttagtatgaaaaaaagggaaacaatttgcactttgctaacctacacatttaataacacaaaaagaagcagtttttctaccttatttcttagctaagatttagcagcagttgtgggaattaaaaattactcatacttaaccctaatactctgtgatgtattatctgacagagaaaagaataatgtaagtgatatatgcttaaatgttggaaggtagattagagtatcttattcttgatatttgtcatagttgctttttttaacctgctataaactcctactttcttatacttgcttcatttcctaactctctttctccagtaggcattattttcattcagtgctattatcttctattatgatgttatttatttcttcttttcaaccagagctttctatctttttgagctctgcttctgctttcatattatagcagagtttttctagytctactagtaagaaagacaccattaacttcccagacagcatattctatccatcttatcttaaccccttaattcc

SEQ ID NO: 718773 - DNA, 1117 bp, Homo sapiens
atttctgtccagaactcaacatgcaattcttgtgaactttgtggagatggtttcaacatcacagtatgaaagatgtcattataatacatattcctattagaaatttctgggcacagaaaataatacatgctacctttgtcacaaaatacaaacctgctatgtaggaatcagacagcagtggcttgcttatctttcttgtccagtgtccctggtactaacagcacctagatgatgatgatgatgatgatgattgttattattttaacaagaaataattgcatcttgagaaatactaacatcccatttcagagcagcccaggaagcactgtaaattgaatgaaaactgaggagaggggtcttagatgaaactgaggctattaggttgtttagattttgttttttttattttcctttccagcatggttgtggtaaagacttgaagagtagcaagtttaaaaggtgtaagcaggtctgctacattagagatacagacataattcattctggagayggaatgttaagagggtggccttttagttaatcaaatgcaaagccattacacagcctttattcttagatgagattgaatcacaattggcagtgtgtgtgcatgaatgtgtatgtctgtgaccacactttgtaagtattgagaagggacccacaattgctaagagttacagtggaggtgtgtataggaataaacttttgttttggggggcacgaagcttatctggagagaggcagaaaataaggtttttaagaaaatttacgaagatgcaaatgtatttatttagaatgagaaaagaaatcacaagaaattcaaaattttcagaagttgacaaatacaaaaatccagaaatactgcacaattgcacttattaacaaccttaaaaacaccataatacttttttctaacatatgtatttttgctgtatactctgaattgcctcttgatatgacattgattttataatattttccatggagagaatagaaagataattcagtctttcctctagattgatcaaaaaaatttttttaatttggtagtttagaataatttattataatttcgttacttattgtttgggatgtcaaattaaatttttaggattgc

SEQ ID NO: 718774 - DNA, 1117 bp, Homo sapiens
atttctgtccagaactcaacatgcaattcttgtgaactttgtggagatggtttcaacatcacagtatgaaagatgtcattataatacatattcctattagaaatttctgggcacagaaaataatacatgctacctttgtcacaaaatacaaacctgctatgtaggaatcagacagcagtggcttgcttatctttcttgtccagtgtccctggtactaacagcacctagatgatgatgatgatgatgatgattgttattattttaacaagaaataattgcatcttgagaaatactaacatcccatttcagagcagcccaggaagcactgtaaattgaatgaaaactgaggagaggggtcttagatgaaactgaggctattaggttgtttagattttgttttttttattttcctttccagcatggttgtggtaaagacttgaagagtagcaagtttaaaaggtgtaagcaggtctgctacattagagatacagacataattcattctggagatggaatgttaagagggtggccttttagttaatcaaatgcaaagccattacacagcctttattcttagatgagattgaatcacaattggcagtgtgtgtgcatgaatgtgtatgtctgtgaccacactttgtaagtattgagaagggacccacaattgctaagagttacagtggaggtgtgtataggaataracttttgttttggggggcacgaagcttatctggagagaggcagaaaataaggtttttaagaaaatttacgaagatgcaaatgtatttatttagaatgagaaaagaaatcacaagaaattcaaaattttcagaagttgacaaatacaaaaatccagaaatactgcacaattgcacttattaacaaccttaaaaacaccataatacttttttctaacatatgtatttttgctgtatactctgaattgcctcttgatatgacattgattttataatattttccatggagagaatagaaagataattcagtctttcctctagattgatcaaaaaaatttttttaatttggtagtttagaataatttattataatttcgttacttattgtttgggatgtcaaattaaatttttaggattgc

SEQ ID NO: 718775 - DNA, 656 bp, Homo sapiens
ttttattttgttttattttttgagatggagtctctctgtctcctaggctggagtacagtggtgtgatcggctcactgcaacctccgcctctgggttcaagctattctcctgcctcagcctcccaagtagctgggattacaggactgtgccaccatgcccggctaatttttatatctttagtagaggcggggtttcaccatactggcaaggctggtcttgaactcctgacctcaggtgatccgcccacctcggcctcccaaagtgctgggattacaggcatgagccactgcacccagcctccatcagagatttataaaaatgtattttcaacattttaatctttcttcctttctcacagtaatccatattcacagggcagaataaggacaaacatggaacacactgtcaaagagtaaggctgacagtgcagagtctggagactaacaagcctggttccagtccttgttctgctccttgctgttgtaaccttggggaaatcattcacsttccctcagcctccatttccccacctgcaaaatggggtaataacatcatcgcctcacacagctgttataagattgagcacagcacctgggacactttgtgggcttggcacagtgcatagagcaccttagatgatcaataattacatgtgt

SEQ ID NO: 718776 - DNA, 1604 bp, Homo sapiens
  misc_feature 818, 819, 820, 821, 822, 823, 824, 825, 826, 827, 828, 829,830, 831, 832, 833, 834, 835, 836, 837, 838, 839, 840, 841,842, 843, 844, 845, 846, 847, 848, 849, 850, 851, 852, 853,854, 855, 856, 857, 858, 859, 860, 861, 862, 863, 864: n = A,T,C or G
  misc_feature 865, 866, 867, 868, 869, 870, 871, 872, 873, 874, 875, 876,877, 878, 879, 880, 881, 882, 883, 884, 885, 886, 887, 888,889, 890, 891, 892, 893, 894, 895, 896, 897, 898, 899, 900,901, 902, 903, 904, 905, 906, 907, 908, 909, 910, 911: n = A,T,C or G
  misc_feature 912, 913, 914, 915, 916, 917: n = A,T,C or G
tccccccacgaccgtggcagggcagatggcccagcaggcccagggaaggagcctgactcagatgccacaagctggcatcttggcagtgggcccagggtatgaggaagaaaagataaggtgaacctcacagtgcgtggccaacatgcagccgcagcccagagtgtggaggcctcaatctggccccaaacccaaagcccagctctgccgcttgctctgagtgtcaccccaacactggagaggtcaccatcctctcccaggatggtgaaggtgagatgggaactgaatgcggagcgtcaggcatggagcagatgccagtttcccggctttacaaacacacatgacccccgtgagcctggatatggggacaggtctgatttttcattcatgcacctactggggcaacggggagcagggaaagagggaagtcagcctgggcctactctgagcagcagatgaggacgctttagaatgagcacactgggccgggcgcggtggctcacgcctgtaatcccagcactttgggaggctgaggcgggcagattgcctgagctcaggagtttaagaccagcctgggcaacatagtgaaaccccatctctactaaaaaaaaaaatacaaaaaaattagccaggtgtgatggtgggcatctgtactcccagctactcgagaggatgaggcacaagaatcgtttgaacctgggaggcggaggttgcagtgagccgggatcacgccactgcactccagcctgggcgacagagcaagacttggtctcaaaaaaaaaaaagaataagcatattgactgggggatcctctagagtcnnnnnnnnnnnnnnnnnnnnnnnnnnnnnnnnnnnnnnnnnnnnnnnnnnnnnnnnnnnnnnnnnnnnnnnnnnnnnnnnnnnnnnnnnnnnnnnnnnnnatccccctatgcccggccatacttttccaattgaaaaaaaaaggctgggcatggtggctcatgactgtaatcccagcactttgggaggccgaggcrggtggttcacgaggtcaggagatcgagaccatcctggctaacacagtgaaaccctgtctctactaaaaaatacaaaaaaaattagctgggcgtggtggtgggcgcctgttgtcccatctactcgggaggctgaggcaggagaatggcgtgaacccaggaggcggagcttgcagtgagccgagatcgcgccactgcactccagtctgggtgacagagcgagactctgtttcaaaaaaaaaaactacattccttaatgatctccaagagccttcacaacttttcacaacccatgacaatctccagcctcagatcctacggcccatctctcaaaattaccctctgccacactgaacatggagcttcttgaactcacagttataatacttcctggagcctgggggaggggcaagaattggggcactattctatagcccctgtcctcctatcaacaaaaaagcccttgtcccactagcacagcgatgattcaggaccatggagagcatcccgcgtgcaacccctgaccccgaccctgactgaggcatgctctgcctgtgtggcctattcactcttcccacttgtccttcaggaacc

SEQ ID NO: 718777 - DNA, 442 bp, Homo sapiens
cagtgagagcctatctctattaaaaataaaaaaagaaagaaaaaataaagtgaggggcagtcttttcatactgaatctttagcctgtggattcagacattaactctggatagttaatgccagaattgaattgaatctttagacacccagttggtgtttgcagaaaattggagaattccttggtgtggaaaacccacacatctcgtgcccagaagtgttgtgaatatagaagaaaagtagtttccttttacagccccactctgatgacctcatttaactttacccctaaagayctaaatacagttgcattggggattagggcttctatatataaatttggtggtggtgttggtggtggtgggtgggagggggaatgggcacaatttggtccaaacctttgggttaaaagcttactaaaattatatgtattgtaattccaatga

SEQ ID NO: 718778 - DNA, 442 bp, Homo sapiens
cagtgagagcctatctctattaaaaataaaaaaagaaagaaaaaataaagtgaggggcagtcttttcatactgaatctttagcctgtggattcagacattaactctggatagttaatgccagaattgaattgaatctttagacacccagttggtgtttgcagaaaattggagaattccttggtgtggaaaacccacacatctcgtgcccagaagtgttgtgaatatagaagaaaagtagtttccttttacagccccactctgatgacctcatttaactttacccctaaagatctaaatacagttgcattggggattagggcttctatatataaatttggtggtggtgttggtggtggtgggtgggagggggaatgggcacaatttggtccaaacctttgggtyaaaagcttactaaaattatatgtattgtaattccaatga

SEQ ID NO: 718779 - DNA, 617 bp, Homo sapiens
cccacctaaggatggagttgtttttttaaagctatctaataatgcccaagtaatttcagtactgggccacatgaccataactcaggttatgtgtactgtgtgaaagttgagtagaatggtaaagtataatataacctgaaatcatttttaaaatggaatttataatttttaatattaytgtaaaagcagttcaggaaagtactcattgggacctagttaaagtgagctgtcttacagaaccacagaatataaaattgataataataatatataacagatagtacctattcctctctggttcaatacacatgttccatttcaacctgatagagtagcatatttgtttttctaaagaaaagtactttttgagcctccaggaatcagcaaatttaattcaaaagtccttgacctgagggaaaaagtcttcatactctgcttaaacttttttacaaatacatttggttcccaagtaacagaaaacttatgtaaatctaactttatgaaaacattcttgattgtaagcatattgttaagtgcgaacaacaacaacaaaaaatgagaacaagaagtttggacaggaatagaaaccaggtagccatgtactctaaggagtgtac

SEQ ID NO: 718780 - DNA, 617 bp, Homo sapiens
cccacctaaggatggagttgtttttttaaagctatctaataatgcccaagtaatttcagtactgggccacatgaccataactcaggttatgtgtactgtgtgaaagttgagtagaatggtaaagtataatataacctgaaatcatttttaaaatggaatttataatttttaatattactrtaaaagcagttcaggaaagtactcattgggacctagttaaagtgagctgtcttacagaaccacagaatataaaattgataataataatatataacagatagtacctattcctctctggttcaatacacatgttccatttcaacctgatagagtagcatatttgtttttctaaagaaaagtactttttgagcctccaggaatcagcaaatttaattcaaaagtccttgacctgagggaaaaagtcttcatactctgcttaaacttttttacaaatacatttggttcccaagtaacagaaaacttatgtaaatctaactttatgaaaacattcttgattgtaagcatattgttaagtgcgaacaacaacaacaaaaaatgagaacaagaagtttggacaggaatagaaaccaggtagccatgtactctaaggagtgtac

SEQ ID NO: 718781 - DNA, 1283 bp, Homo sapiens
atagtgccactgcactccagcctggcaaaagagggaaactccgtctcaataataagtctcttgcatttgttcttcctgtttaactgaaattatgtattctttgatcaacatctccccagtctccacccctaacccctggtaaccacaattctactctgcttccgtgagttcaactttatgaatagtccacatgtaagtgagatcatgtggtatttgtctttctgtgcctagcttatttcacttagcatagtgtcctccaggttcacccatgttgtcaaaaatgacaggatttcccccaacttttttaaggctgaacagtattccatgtgtatgtgtataaattagattagtagatgttgccactccctcctccaccacagtggctctatccctggctcctggctccagccgagtacactagaggaggatattctaaacagcaacaacacaggagcaaagacattacaatggggtgttgtcttattgcccccattagactgtaagcatcttgaagacaggacccccatcacagagtgatgttgtcatccctggagtgggcactgtgcatgattgatgactggaagcaatgaacatacagaagggcaaaacagaaatcagcaggatgctttgcatttcagcattgactttgccaaatatgcccaactgttcagggagttacaytggttctaacgaagctcctgtgattcctaagcacaggaatggtgataatatatataatggtgcatgcatatatacgcatatctagataatgatatctcattatatgtgagaactgaagaactccgttatgtttctcgtctaaccaaaaagggcctacagctacgataatttccaaacaaataaatctgtgctacttgattttcatgcaaagctcatatttgttcaaaaggaaaataaagcttaatttaaaatcaatttaggctatttttatctaagtatgcttaccgttattcaactccctgcagatattgtcaaatttctcaatatggtaaatatttattctgttaaaatatatccatagttacactaaagacagagaggtcttatatgttctaaacaacatagagcaaatgctcataaacagcattttattcctatctcccggaataacaacgctacttccaattgctggaatctaaattattaaaataaacccatgctgcaagctttgtatgcttaacattctcaaatgttcacttttcagatatggaagtgaagcaaatcaacaaacgtgcctctggccaggcttttgagctgatctt

SEQ ID NO: 718782 - DNA, 1283 bp, Homo sapiens
atagtgccactgcactccagcctggcaaaagagggaaactccgtctcaataataagtctcttgcatttgttcttcctgtttaactgaaattatgtattctttgatcaacatctccccagtctccacccctaacccctggtaaccacaattctactctgcttccgtgagttcaactttatgaatagtccacatgtaagtgagatcatgtggtatttgtctttctgtgcctagcttatttcacttagcatagtgtcctccaggttcacccatgttgtcaaaaatgacaggatttcccccaacttttttaaggctgaacagtattccatgtgtatgtgtataaattagattagtagatgttgccactccctcctccaccacagtggctctatccctggctcctggctccagccgagtacactagaggaggatattctaaacagcaacaacacaggagcaaagacattacaatggggtgttgtcttattgcccccattagactgtaagcatcttgaagacaggacccccatcacagagtgatgttgtcatccctggagtgggcactgtgcatgattgatgactggaagcaatgaacatacagaagggcaaaacagaaatcagcaggatgctttgcatttcagcattgactttgccaaatatgcccaactgttcagggagttacattggttctaacgwagctcctgtgattcctaagcacaggaatggtgataatatatataatggtgcatgcatatatacgcatatctagataatgatatctcattatatgtgagaactgaagaactccgttatgtttctcgtctaaccaaaaagggcctacagctacgataatttccaaacaaataaatctgtgctacttgattttcatgcaaagctcatatttgttcaaaaggaaaataaagcttaatttaaaatcaatttaggctatttttatctaagtatgcttaccgttattcaactccctgcagatattgtcaaatttctcaatatggtaaatatttattctgttaaaatatatccatagttacactaaagacagagaggtcttatatgttctaaacaacatagagcaaatgctcataaacagcattttattcctatctcccggaataacaacgctacttccaattgctggaatctaaattattaaaataaacccatgctgcaagctttgtatgcttaacattctcaaatgttcacttttcagatatggaagtgaagcaaatcaacaaacgtgcctctggccaggcttttgagctgatctt

SEQ ID NO: 718783 - DNA, 1283 bp, Homo sapiens
atagtgccactgcactccagcctggcaaaagagggaaactccgtctcaataataagtctcttgcatttgttcttcctgtttaactgaaattatgtattctttgatcaacatctccccagtctccacccctaacccctggtaaccacaattctactctgcttccgtgagttcaactttatgaatagtccacatgtaagtgagatcatgtggtatttgtctttctgtgcctagcttatttcacttagcatagtgtcctccaggttcacccatgttgtcaaaaatgacaggatttcccccaacttttttaaggctgaacagtattccatgtgtatgtgtataaattagattagtagatgttgccactccctcctccaccacagtggctctatccctggctcctggctccagccgagtacactagaggaggatattctaaacagcaacaacacaggagcaaagacattacaatggggtgttgtcttattgcccccattagactgtaagcatcttgaagacaggacccccatcacagagtgatgttgtcatccctggagtgggcactgtgcatgattgatgactggaagcaatgaacatacagaagggcaaaacagaaatcagcaggatgctttgcatttcagcattgactttgccaaatatgcccaactgttcagggagttacattggttctaacgaagctcctgtgattcctaagcacaggaatggtgataatatatataatggtgcatgcatatatacgcatatctagataatgatatctcattatatgtgagaactgaagaactccgttatgtttctcgtctaaccaaaaagggcctacagctacgataayttccaaacaaataaatctgtgctacttgattttcatgcaaagctcatatttgttcaaaaggaaaataaagcttaatttaaaatcaatttaggctatttttatctaagtatgcttaccgttattcaactccctgcagatattgtcaaatttctcaatatggtaaatatttattctgttaaaatatatccatagttacactaaagacagagaggtcttatatgttctaaacaacatagagcaaatgctcataaacagcattttattcctatctcccggaataacaacgctacttccaattgctggaatctaaattattaaaataaacccatgctgcaagctttgtatgcttaacattctcaaatgttcacttttcagatatggaagtgaagcaaatcaacaaacgtgcctctggccaggcttttgagctgatctt

SEQ ID NO: 718784 - DNA, 1283 bp, Homo sapiens
atagtgccactgcactccagcctggcaaaagagggaaactccgtctcaataataagtctcttgcatttgttcttcctgtttaactgaaattatgtattctttgatcaacatctccccagtctccacccctaacccctggtaaccacaattctactctgcttccgtgagttcaactttatgaatagtccacatgtaagtgagatcatgtggtatttgtctttctgtgcctagcttatttcacttagcatagtgtcctccaggttcacccatgttgtcaaaaatgacaggatttcccccaacttttttaaggctgaacagtattccatgtgtatgtgtataaattagattagtagatgttgccactccctcctccaccacagtggctctatccctggctcctggctccagccgagtacactagaggaggatattctaaacagcaacaacacaggagcaaagacattacaatggggtgttgtcttattgcccccattagactgtaagcatcttgaagacaggacccccatcacagagtgatgttgtcatccctggagtgggcactgtgcatgattgatgactggaagcaatgaacatacagaagggcaaaacagaaatcagcaggatgctttgcatttcagcattgactttgccaaatatgcccaactgttcagggagttacattggttctaacgaagctcctgtgattcctaagcacaggaatggtgataatatatataatggtgcatgcatatatacgcatatctagataatgatatctcattatatgtgagaactgaagaactccgttatgtttctcgtctaaccaaaaagggcctacagctacgataatttccaaacaaataaatctgtgctacttgattttcatgcaaagctcatatttgttcaaaaggaaaataaagcttaatttaaaatcaatttaggctatttttatctaagtatgcttaccrttattcaactccctgcagatattgtcaaatttctcaatatggtaaatatttattctgttaaaatatatccatagttacactaaagacagagaggtcttatatgttctaaacaacatagagcaaatgctcataaacagcattttattcctatctcccggaataacaacgctacttccaattgctggaatctaaattattaaaataaacccatgctgcaagctttgtatgcttaacattctcaaatgttcacttttcagatatggaagtgaagcaaatcaacaaacgtgcctctggccaggcttttgagctgatctt

SEQ ID NO: 718785 - DNA, 650 bp, Homo sapiens
tctatattatagatatatatagctatctctatatattacatataccaattatagatataratataacaatggtaactggtgtatatgtgatgtgtatatatgtatatgtataccataattatatattaatattgtatatatgccataattatatattaatattggtatatatacaccatgattatatattaatattggtgtgtgtatgtgtgtgtgtatatatatatatatatataaaatactagttatcattgttctagatttaaaaaacaggaacctgagctactaactcgactatatatatatatatatatacaggaagttgctttaaaacatttttatcagcttttttattgttatttttagctttattctcatagtaaagctaaaataaattattcaacattatcaaaactttgctgccagcagatgtaagcaatacctaaaacagtggagagcatgttgcacccaaagcagtttaagctctgacccaagcactggcatcttataggcactgggtagagataagagtcataggtcgacatatattgagatgctatgacttgattagaatatggagtcagtgactgaggtgaaattaaaactcaaaccacaattcaacatcctgatttaggatgttgctggtgttt

SEQ ID NO: 718786 - DNA, 882 bp, Homo sapiens
gttttgtcatgaattaattcagaaacttcacgacttgtttaaatttaygtagaatgtttgttctttgcaattagaccaaatacatttaggtggcaactgataccaactgattattttcatgtcccttctatattcacccaaaagattatttttcctatttaattagataggcctctcatgctaatgacatcaaaatgtgacctattctttgtccagatcatctttgtaaggactaaaaaaaaaattctactatttctcatattttgtggggagcctgacatggtaacttaccagaaaatatgcaagacaccaaatatcagtagtgttttttctttagactgaaatgtgtgatcctcattttataactaggaccaaaaaacaaataaagcagctcaagtttgagaagtccaaccaaccagcataaatgtattggctagactaatctagctaataaaatttttcctgactatttacaggtcaaccatctattgagtcaatacagtaaccaatacctggataaacacttcaggaaaagtggaaccattaatttgatttttttaaaaaaagcataaataaggttgcccaaactgatccatgggacttgttctcctagttggttataggccatttcaaaactaaatacaagatgggatttcaaacgtttcttttgacatttataatggtcctcattttcttctgaatgagatgcaattactttaaaaattactatagtgccattatgctaggctgacactcagctatatctgaatccatataggctgctatgacaaaaataccacaaactctttagcttttagacaacagaaatttatttctcacagttccgaaggctaagaactccaagatcaaggtgctggcaga

SEQ ID NO: 718787 - DNA, 882 bp, Homo sapiens
gttttgtcatgaattaattcagaaacttcacgacttgtttaaatttatstagaatgtttgttctttgcaattagaccaaatacatttaggtggcaactgataccaactgattattttcatgtcccttctatattcacccaaaagattatttttcctatttaattagataggcctctcatgctaatgacatcaaaatgtgacctattctttgtccagatcatctttgtaaggactaaaaaaaaaattctactatttctcatattttgtggggagcctgacatggtaacttaccagaaaatatgcaagacaccaaatatcagtagtgttttttctttagactgaaatgtgtgatcctcattttataactaggaccaaaaaacaaataaagcagctcaagtttgagaagtccaaccaaccagcataaatgtattggctagactaatctagctaataaaatttttcctgactatttacaggtcaaccatctattgagtcaatacagtaaccaatacctggataaacacttcaggaaaagtggaaccattaatttgatttttttaaaaaaagcataaataaggttgcccaaactgatccatgggacttgttctcctagttggttataggccatttcaaaactaaatacaagatgggatttcaaacgtttcttttgacatttataatggtcctcattttcttctgaatgagatgcaattactttaaaaattactatagtgccattatgctaggctgacactcagctatatctgaatccatataggctgctatgacaaaaataccacaaactctttagcttttagacaacagaaatttatttctcacagttccgaaggctaagaactccaagatcaaggtgctggcaga

SEQ ID NO: 718788 - DNA, 882 bp, Homo sapiens
gttttgtcatgaattaattcagaaacttcacgacttgtttaaatttatgtagaatgtttgttctttgcaattagaccaaatacatttaggtggcaactgataccaactgattattttcatgtcccttctatattcacccaaaagattatttttcctatttaattagataggcctctcatgctaatgacatcaaaatgtgacctattctttgtccagatcatctttgtaaggactaaaaaaaaaattctactatttctcatattttgtggggagcctgacatggtaacttaccagaaaatatgcaagacaccaaatatcagtagtgttttttctttagactgaaatgtgtgatcctcattttataactaggaccaaaaaacaaataaagcagctcaagtttgagaagtccaaccaaccagcataaatgtattggctagactaatctagctaataaaatttttcctgactatttacaggtcaaccatctattgagtcaatacagtaaccaatacctggataaacacttcaggaaaagtggaaccattaatttgatttttttaaaaaaagcataaataaggttgcccaaactgatccatgggacttgttctcctagttggttataggccatttyaaaactaaatacaagatgggatttcaaacgtttcttttgacatttataatggtcctcattttcttctgaatgagatgcaattactttaaaaattactatagtgccattatgctaggctgacactcagctatatctgaatccatataggctgctatgacaaaaataccacaaactctttagcttttagacaacagaaatttatttctcacagttccgaaggctaagaactccaagatcaaggtgctggcaga

SEQ ID NO: 718789 - DNA, 1445 bp, Homo sapiens
taggaattgttcttgctcataaacaaggttgtggatactcaaatattttgaatattttcacattttaacatttctgaactcaggaggattttaagagatgtagttgtaattgtcatagaagtcttaaacagtttcttctagtaacattttactttctctgtgttcacagtatgtcaaaagcctgaaaaataatttttagtaaatacaaaataaaaactcaaagtgacaagaaaagatgtattcatagctcatggtcttgaacttctatttcagcttaccacgtctgcatttttactattgaacatgacacatctcacatcaaaggagaccacccaaagtattgtctaagttgtctatagccttaaacagaggcttaaaggtaatcttcaaaaaaaaatgtttgagtgttattttggcataaacagacaaataagtagttgaaataagtagttcatagttctgtcagacttccaaaaaatctaagtttaataaaagaagtctgagcatagttagcaagtgtttactagaaaaatgcaaacccagcaacatcctgccgaaggtcactcttttttttttcagatcatcacacattgcccatcaagtgtgagtgaatctcttttagcattcctaaaaaccttcatttctttgaccactatcccagcactataatagaattctataaaatgtgaacaaaacacttcatccaaggtttgttctgcacaccagggttaagagaaaaagaaaaagtgggagaccttttccttagctccaacccaatgtgttgcttaatgwcaacaagataagccaaaatttcattccatttcatatcaattcaagcataaagactcactccttggtatttttcagtctgcttttcatttagtgggaagattcttagagtagtagaaagtaattttttgtgcaaaattaaaaaatgaagagaaggatagaattgacaaagacaggagtggaactggtaaagttcaagtgggagaaaagagggaaaaagtatctgaagactttctttgtccacggatacaaagaaaataatgcaccaaaagcaaaacatattgatagatcacttagaaacactcagttgaactgatgaactaaagaatttttaaattttttgtaaaatatgttcgatttctagtcagaagtaacctgaatataaatctggtgccttcattcacatgacccacatctctgtcatccttaaataaagttataccaagtaaataggtgagctactaaacttcataaccagtatgttttcaaagtcgaaggggaaaccattgtgtctttaaaaaaaaaagagagagagaagaaaaaaactgctaggccttgtttataaagaacagtgcggttggctgcaggaaaaagtaaagtcacatagaaataaggtagacagtgacgcctgccacatgaccagcctgtgttatcca

SEQ ID NO: 718790 - DNA, 656 bp, Homo sapiens
tttaagcgtgtgtggcacctcactttccctcacttgctccaaattttgccacgtttgcacaatctcccacttcaccttacaccacgaataaaggctccctggggcctttctggaagccaagttatgtcagtgctatgcttcttgtacagcctgcagagccaagggtcgattagacctctttttttttttttttttttttttaataaattacccagtcttaggtatttctttagagcaatacaagaatgacctaatacatacatatttactaattaatttcactgtcgaatatgatgcccagaacaattgcaaaggtaacatgaaagatcaatgatcacagatcaccataataacgataataataatgataatcataagatttgaaatactgtgacattaccagactgtgacamagagatatgtagtgagcacatgccattggaaaaaaatgatgctgatagactttcttgatgcagggttgccacaaacttgaatttattaaaaaatgcaatatctgtaaagtgcagtaaagcagatcataataaaataatttatgtctgtttattcaaaattaagaccatattaatgacattttgatacagttgtattttataccttcttcaaaaagagaattccaaggcatcttctcagacata

SEQ ID NO: 718791 - DNA, 1072 bp, Homo sapiens
tattctgcagaagctgtaagtaatttcagaaggacttggagtgtaatgggacttggttaaaagtggtttgggggaragactaataaccctgtgataaataggttgaactgctgcagactgcaatacaacagttcagacactacgtaaactctaactttcctcagctgttgaatatctgggttcttgtcagggactgaaataagaaccagggtaaaggagctgaagattcattccttcctttattgatgcctcctaaaagaactgggcaatgtgtaacactctagggatgtgacgctgaatgggatctagttcctgttcttactgaactcatagtgtgctggaaaaacagattataaaacagttcattgcagtgcaacacttccaatgggatgagtgctgtatgagcaaagttatggggaagaaaagaaggggtcagtaaactgacctgcctgtagagatttgagagggctttacaaagggagttaaattttatctggatttttttaaggtgctttcagttacaagtaatggaaaactcaactcaattaggtttaagcaattaaaagcatttattggttcatgtagctaaaaacacccagaggtaaagcagacttcagggctagggatcaaagttccatggccatttctcgatgaatttcctgagtctggccttttccatgtggcagttccaacctcagcctagcttagctcagagcttggaaatggttctgtcagtaccacgtctcacatctacttaccctaatgccactttgtctacatcaagagatagcctccccctaacaaccaaataaaaatatgatggttagtctaacttgaccacctgaggcccctgccaattctgtaaccagttattgtagcgaggaaatgccatcagtgaatcgacatatatatgggctacttgccagtcctgcacataaccctggggcaaggagatatatcagtgttctctggcttatagcagtgaagctccccctgaggcaatgtgtcatgttcactcctatctaaacacagagtagctacatgaatggaaaagggatagaggaatgcttgt

SEQ ID NO: 718792 - DNA, 1072 bp, Homo sapiens
tattctgcagaagctgtaagtaatttcagaaggacttggagtgtaatgggacttggttaaaagtggtttgggggaaagactaataaccctgtgataaataggttgaactgctgcagactgcaatacaacagttcagacactacgtaaactctaactttcctcagctgttgaatatctgggttcttgtcagggactgaaataagaaccagggtaaaggagctgaagattcattccttcctttattgatgcctcctaaaagaactgggcaatgtgtaacactctagggatgtgacgctgaatgggatctagttcctgttcttactgaactcatagtgtgctggaaaaacagrttataaaacagttcattgcagtgcaacacttccaatgggatgagtgctgtatgagcaaagttatggggaagaaaagaaggggtcagtaaactgacctgcctgtagagatttgagagggctttacaaagggagttaaattttatctggatttttttaaggtgctttcagttacaagtaatggaaaactcaactcaattaggtttaagcaattaaaagcatttattggttcatgtagctaaaaacacccagaggtaaagcagacttcagggctagggatcaaagttccatggccatttctcgatgaatttcctgagtctggccttttccatgtggcagttccaacctcagcctagcttagctcagagcttggaaatggttctgtcagtaccacgtctcacatctacttaccctaatgccactttgtctacatcaagagatagcctccccctaacaaccaaataaaaatatgatggttagtctaacttgaccacctgaggcccctgccaattctgtaaccagttattgtagcgaggaaatgccatcagtgaatcgacatatatatgggctacttgccagtcctgcacataaccctggggcaaggagatatatcagtgttctctggcttatagcagtgaagctccccctgaggcaatgtgtcatgttcactcctatctaaacacagagtagctacatgaatggaaaagggatagaggaatgcttgt

SEQ ID NO: 718793 - DNA, 600 bp, Homo sapiens
tagtccattctctaccaagctttccttcctctaaaataccatttttaaagccatgttatccagtagaaataaaatgcaaaccacacaagtaagtttgttatactgtagaaacagatcaaatgaattttgacaatatagtttatttaatctatcatttctacctgtaataaacttaagattattaatgagatatttccattttttttgaagtcttagaaatctggattatattttatacttaaagcacatgtcagtttggacaagccacattgcaagtgtccagtgtggctagagcttactacattgaacggtccgggttcagagcctgtgccacattctctagctctcaatcatgtacytccttatttcatagctttctaccagaccaaattgcaaacaactctgtagagttggcggctccattttacacttcctctgtcttcacattttattcctgtgtgtgtagtaagctattagtaattgcctattgatggattggtaatattaattttatctgtgacctcttaaacacagcatacttactcctactacagtttcctcaggcttgaaatttccctcctcttccccatatttatatta

SEQ ID NO: 718794 - DNA, 600 bp, Homo sapiens
tagtccattctctaccaagctttccttcctctaaaataccatttttaaagccatgttatccagtagaaataaaatgcaaaccacacaagtaagtttgttatactgtagaaacagatcaaatgaattttgacaatatagtttatttaatctatcatttctacctgtaataaacttaagattattaatgagatatttccattttttttgaagtcttagaaatctggattatattttatacttaaagcacatgtcagtttggacaagccacattgcaagtgtccagtgtggctagagcttactacattgaacggtccgggttcagagcctgtgccacattctctagctctcaatcatgtacctccttatttcatagctttctaccagaccaaattgcaaacaactcygtagagttggcggctccattttacacttcctctgtcttcacattttattcctgtgtgtgtagtaagctattagtaattgcctattgatggattggtaatattaattttatctgtgacctcttaaacacagcatacttactcctactacagtttcctcaggcttgaaatttccctcctcttccccatatttatatta

SEQ ID NO: 718795 - DNA, 851 bp, Homo sapiens
gagtctcactctgtcacccaggctggagtacagtggtgtggtctcggctcactgcaacctctgcctctcaggttcaagcgattctcctgcctcagcctcccgagtagctgggattacaggtgtgccccaccatgcctggctaatttttttacatttttagtagagatggggtttcaccatgttggtcaggctgatctcgaactcctgacctcgtgatccgcccacctcggcttcccaaagcactgggattataggcgtgagccaccacgcccggccagtttaaatcttaagtcagggaaaacctctctctcatttgggaagggtcagccctttgttctggccttcagctgactgaatgaggccccccacattagggagggcaaactgctttgcttagtgtacagattgaaatgttaatctctttcaaaacactctcacagaaacagccagaatgatgtttaaccaaatttgtggagtcccacaaattatgtagctggcactggatagggagaatwctcaagaaaatctttttttttttcttttttttttttagacggagtttcgctcttgttgcccaggctggagtgcaatagcatgatcttggctcaatgcaacctccgcctccccggtgcaagcaattctcctgcctcagcttcccaagtagctgggactacaggtgctcgccaccacgtccagctaatttttgcattttttagtagagacggggttccaccatgttggtcaggctggtctcgaactcctaacctcaggtggccacccggctcagcctctcaaagtgctgggattacaggcgtgagacacggcgcctggccctcagtgaaatctttagc

SEQ ID NO: 718796 - DNA, 851 bp, Homo sapiens
gagtctcactctgtcacccaggctggagtacagtggtgtggtctcggctcactgcaacctctgcctctcaggttcaagcgattctcctgcctcagcctcccgagtagctgggattacaggtgtgccccaccatgcctggctaatttttttacatttttagtagagatggggtttcaccatgttggtcaggctgatctcgaactcctgacctcgtgatccgcccacctcggcttcccaaagcactgggattataggcgtgagccaccacgcccggccagtttaaatcttaagtcagggaaaacctctctctcatttgggaagggtcagccctttgttctggccttcagctgactgaatgaggccccccacattagggagggcaaactgctttgcttagtgtacagattgaaatgttaatctctttcaaaacactctcacagaaacagccagaatgatgtttaaccaaatttgtggagtcccacaaattatgtagctggcactggatagggagaatactcaagaaaatctttttttttttcttttttttttttagacggagtttcgctcttgttgcccaggctggagtgcaatagcatgatcttggctcaatgcaacctccgcctccccggtgcaagcaattctcctgcctcagcttcccaagtagctgggactacaggtgctcgccaccacgtccagctaatttttgcattttttagtagagacggggttccaccatgttggtcaggctggtctcgaactcctaacctcaggtggccacccggctcagcctctcaaagtgctgggattacaggcgtragacacggcgcctggccctcagtgaaatctttagc

SEQ ID NO: 718797 - DNA, 376 bp, Homo sapiens
ggcaggagaatcacttgaatccaggaggcggacttgcagtgggccgagattgcaccattgcactccagcctgggtgacagagtgagactctgtctcgaaagaaaaaataaataaataaataaataaataaaggcagggccttactatgttgcccaggctggtcttgaactcctgggctcaagtgattctcctgcctcggtctctcagagygctgggattacaggtgtaagccactgcacctgatcccctcataattttctaattttatctggaagtttctgggaccttcctgggaaacagagtctgagagtctgagatttttgtgcagaaggttaactgcggtgcactttcaggatcagcacttgtgaagagtaaa

SEQ ID NO: 718798 - DNA, 2528 bp, Homo sapiens
tgtcatatttagtttcctcgtgggcgtataactaaaatccccattttataactatcttccaaccatggaccactgtcagcagctagaggtcaccttcaggttcttacttcctgaaccccataggtcatttacaacatggctgtttgctttcttccaggccagcaggttctctctttgactcctcactttattccatttgattaagttaggaccttccaggataatctcttttggctaactccaagtcaactaattagtaacctaatcacaggagtgacatctcattatattcactggttctacccagttaaagtaggttaggggattataaggcatgcgtgtacacaagggagtgggaatttgagatccctcttagaatttttttcaaccacactcagccttgctaatttttaacattttcaatctttcttactggcaacaaactctttctatatcctcatgattgctgttagtttattttagctgtttttttaaaatgtttgtttacttacattttcctcttaggttataagaaaaggaggatcttgaggtcaacacctctgtggattttcagtaatccctttcattttattcccctgtagctccttcagaattcacacttaagtcatgaatactgtcatgccaggaaaacagaagggggttaaccttagaataaagaattataaagagagtacaatatttgggaagtttccaccaaagagaaaaggcaggtaaaagcttttcatataggagaagaaaagagatttgaatgaatcaatactaaagtaaagataaagcttgtgaccctcagtaactcagtgcaccctcccatgagtgccaagaacaaaatggacagtgactgagaaggtgtcagtcatgaggtgtgaggtgagtgctgagtccctgcccatctgctcagtaaaaaatatctgaactggtgccaaagcagcaatgtggggaaatgaagtctttactgctccaagaggccagccagtgagttacagcatctgtgacacttcagaagagaatgcaaggaggtcagaactctatgcctagaaaacaggcaaaatgagctacatttcatttatgggtcagtgaagccatggrgaaacatagcatgaaggcaggagattccctgaggctataggagatttcctatgtgtccagatgccatcttaggaaggtggagaagagaaagctctttcagacagaaatgaaaacctcattttacccccaaataagattgtttacagtaggaaagactttattacttataactggaaatagcttctgctgtcagtggaaacagaaacagaagaaaaggtttgtatttgttatagaaatagagaaactaaagttcatatgtacactctaggttgtgttgcactaaattttgaccctactctaaatgtattatctcatttaatcatttcataaaccttactattattctcattttagagcagatagtactgagattataggaatgtagataatttgggcaacatcacaaagctagtaagtcatagatgtaaagttttgtttgaccgtaaagctgtctattttaatcatctggcttaacaatataagagatatattattttagtgacaatttaagtgacaccaacatgagtttcattggagtcaatatatgaattcctaattgggacttcaaatattcagaaagcatgttaatttttaaagtttaaaggagaatattgaaattcaaggtgcttttctttttctctatgtctacatcacaacttagtcattggtcctgcctgcagacagtaaagtcagcctacactaaagactccttcttcagaatcattctgatccctcaaaatggtgttacatgccattttttttttatttcttcactgtttggtaccatatagtaccccttatccagacttaccactgtgcaagagcacaagcctagggagaccgatttaggaactaaaaccagtctacctccactggccaagctttggcacagaaagacacccacttgataagtcagtggtggccatgacagtatctctgaataggaaatggctatttacccaaagtcccacccagactgtagatctttgaggactggcactgccttggtctttacttacccattttatcctgttatttattacttcttttctggatgattttcatgctcttttttgtatcaacctttttgttatttgtctgtgtcagttattttattcataggaaagaatgcttgacttgcaaggctgaaccatggtaggcatatacaaactactgtggttttaatttaggggcaataagtgtaaaaacattctgatgtatttatttgaacaaaatggaaatcaaacattctaaaaaatatatcttttcatagtctaaaatttgtctcccaacaaagtctattcaaggatgcatcaatattttgagttctggcctaggtattcagccaaaatatattcttttcctttggcctcagcattggcctttgaaggatttgggctaaagattcatgtataatttca

SEQ ID NO: 718799 - DNA, 2528 bp, Homo sapiens
tgtcatatttagtttcctcgtgggcgtataactaaaatccccattttataactatcttccaaccatggaccactgtcagcagctagaggtcaccttcaggttcttacttcctgaaccccataggtcatttacaacatggctgtttgctttcttccaggccagcaggttctctctttgactcctcactttattccatttgattaagttaggaccttccaggataatctcttttggctaactccaagtcaactaattagtaacctaatcacaggagtgacatctcattatattcactggttctacccagttaaagtaggttaggggattataaggcatgcgtgtacacaagggagtgggaatttgagatccctcttagaatttttttcaaccacactcagccttgctaatttttaacattttcaatctttcttactggcaacaaactctttctatatcctcatgattgctgttagtttattttagctgtttttttaaaatgtttgtttacttacattttcctcttaggttataagaaaaggaggatcttgaggtcaacacctctgtggattttcagtaatccctttcattttattcccctgtagctccttcagaattcacacttaagtcatgaatactgtcatgccaggaaaacagaagggggttaaccttagaataaagaattataaagagagtacaatatttgggaagtttccaccaaagagaaaaggcaggtaaaagcttttcatataggagaagaaaagagatttgaatgaatcaatactaaagtaaagataaagcttgtgaccctcagtaactcagtgcaccctcccatgagtgccaagaacaaaatggacagtgactgagaaggtgtcagtcatgaggtgtgaggtgagtgctgagtccctgcccatctgctcagtaaaaaatatctgaactggtgccaaagcagcaatgtggggaaatgaagtctttactgctccaagaggccagccagtgagttacagcatctgtgacacttcagaagagaatgcaaggaggtcagaactctatgcctagaaaacaggcaaaatgagctacatttcatttatgggtcagtgaagccatggagaaacatagcatgaaggcaggagattccctgaggctataggagatttcctatgtgtccagatgccatcttaggaaggtggagaagagaaagctctttcagacagaaatgaaaacctcattttacccccaaataagattgtttacagtaggaaagactttattacttataactggaaatagcttctgctgtcagtggaaacagaaacagaagaaaaggtttgtatttgttatagaaatagagaaactaaagttcatatgtacactctaggttgtgttgcactaaattttgaccctactctaaatgtattatctcatttaatcatttcataaaccttactattattctcattttagagcagatagtactgagattataggaatgtagataatttgggcaacatcacaaagctagtaagtcatagatgtaaagttttgtttgaccgtaaagctgtctattttaatcatctggcttaacaatataagagatatattattttagtgacaatttaagtgacaccarcatgagtttcattggagtcaatatatgaattcctaattgggacttcaaatattcagaaagcatgttaatttttaaagtttaaaggagaatattgaaattcaaggtgcttttctttttctctatgtctacatcacaacttagtcattggtcctgcctgcagacagtaaagtcagcctacactaaagactccttcttcagaatcattctgatccctcaaaatggtgttacatgccattttttttttatttcttcactgtttggtaccatatagtaccccttatccagacttaccactgtgcaagagcacaagcctagggagaccgatttaggaactaaaaccagtctacctccactggccaagctttggcacagaaagacacccacttgataagtcagtggtggccatgacagtatctctgaataggaaatggctatttacccaaagtcccacccagactgtagatctttgaggactggcactgccttggtctttacttacccattttatcctgttatttattacttcttttctggatgattttcatgctcttttttgtatcaacctttttgttatttgtctgtgtcagttattttattcataggaaagaatgcttgacttgcaaggctgaaccatggtaggcatatacaaactactgtggttttaatttaggggcaataagtgtaaaaacattctgatgtatttatttgaacaaaatggaaatcaaacattctaaaaaatatatcttttcatagtctaaaatttgtctcccaacaaagtctattcaaggatgcatcaatattttgagttctggcctaggtattcagccaaaatatattcttttcctttggcctcagcattggcctttgaaggatttgggctaaagattcatgtataatttca

SEQ ID NO: 718800 - DNA, 573 bp, Homo sapiens
gaagtctagacagggagccaggctggggtaaggccctactggtagtggcaccgctggaggggatgcagagaaaaggcagagccctctgattactttcactgactctcatggtctgagggctgttggtaaagttcctattgaacagagaatgcaaaatcctttatcgtatggtcatgcaaattattacttcaatacagagcattcaaacaagtatcaacaaggcaaagcttcyatgaccaatcacatggagggacctccaggtgtctggctgcagggccccttgggggagaggcaagcatccaacacggacactgatccatcaatacaagccgggatcacacctcctagggaaagtgaaggtgctctgagcacattgaggagcagaaaagcctagtcagaaaagacttcccatgaaactggcattcaaacacatatctgaaggatgagttacttggggaagagaggggatccttcaggaagggcacagaatgagcaagactaagaggtggagaggttgttaggagaatagcaggatcaaaaagtatagccgtgaagctggacagagagttgggg

SEQ ID NO: 718801 - DNA, 573 bp, Homo sapiens
gaagtctagacagggagccaggctggggtaaggccctactggtagtggcaccgctggaggggatgcagagaaaaggcagagccctctgattactttcactgactctcatggtctgagggctgttggtaaagttcctattgaacagagaatgcaaaatcctttatcgtatggtcatgcaaattattacttcaatacagagcattcaaacaagtatcaacaaggcaaagcttccatgaccaatcacatggagggacctccaggtgtctggctgcagggccccttgggggagaggcaagcatccaacacrgacactgatccatcaatacaagccgggatcacacctcctagggaaagtgaaggtgctctgagcacattgaggagcagaaaagcctagtcagaaaagacttcccatgaaactggcattcaaacacatatctgaaggatgagttacttggggaagagaggggatccttcaggaagggcacagaatgagcaagactaagaggtggagaggttgttaggagaatagcaggatcaaaaagtatagccgtgaagctggacagagagttgggg

SEQ ID NO: 718802 - DNA, 573 bp, Homo sapiens
gaagtctagacagggagccaggctggggtaaggccctactggtagtggcaccgctggaggggatgcagagaaaaggcagagccctctgattactttcactgactctcatggtctgagggctgttggtaaagttcctattgaacagagaatgcaaaatcctttatcgtatggtcatgcaaattattacttcaatacagagcattcaaacaagtatcaacaaggcaaagcttccatgaccaatcacatggagggacctccaggtgtctggctgcagggccccttgggggagaggcaagcatccaacacggacactgatccatcaatacaagccgggatcacacctcctagggaaagtgaaggtgctctgagcacaytgaggagcagaaaagcctagtcagaaaagacttcccatgaaactggcattcaaacacatatctgaaggatgagttacttggggaagagaggggatccttcaggaagggcacagaatgagcaagactaagaggtggagaggttgttaggagaatagcaggatcaaaaagtatagccgtgaagctggacagagagttgggg

SEQ ID NO: 718803 - DNA, 1269 bp, Homo sapiens
ctaccttgcttcccagggatgggtaaaataaagtatgaaaatgtggctgggcacagtgtctcatgcctgtaatctcaacatttttgggaacctgaggcaggaggattgcttgaagccacgagtttaagactagcttgggcaacagagagagaacccatctctacaaaaaattttaaaagttagctgaacttggttgcacacacctgtcgtcccagctacttgggaggccggagtgggaggatcacttgagcacaggaagtcgaggctgcagtgagctatgattgcaccactgcactccagcctgagccacagagcaagaccctgtctctaaaaaagataaataaataaataaagataggaaaacgtcctttgaaaattaaagaaccctatttaagtataatttacagacaacattgtttatatttttaataaaaatccagataaacctttgcagaaacaggcctcaggtgaatcacttccttgagaaactgtgagtaacccaagggcactgtggaagccctgggccttggggatagaggatcaaccagcagccgctggggaaaatgtgtagaaaaggaggaagagggtgagagatgtaaaatctgtaatcatgactaggatgcagatggttacaagtgaaatcttggtgttcgttttctgacgttaattgtatattactcaaaaaatttttttttcaatcagtctttttggaaagtaattttgtagcatgggttcttgttaggatgtcactcactgagccgtctcagactttagttagcatgttgtctgggtagtttggagcctgctaagtttgctattccagaccgtattgtctaaatggaccttcaaactgggaatttagaggaatgcaatcatattattgataaattacacacagcttcactaaacaattatggtcagtatttcgacytacgcatgctattacaatgagcatgtgtagtccctcccctcaataggggattggactattaataatgttaaataattaaataaacctgtgtgcccactcgtctccatttctagccccttcccatccagctggagaagtggaagcattaaaaaggagaagatgacataactcagagattaggcaccacccttagggctagaggaaactaagagggcctcaggagccaggagattggaggagatgcttccagaaaaagaagtaaataagacagcagtagaaggaagagaccaagagcaagagagagaactacagcttctctccatcttctgtctactatt

SEQ ID NO: 718804 - DNA, 614 bp, Homo sapiens
tttagatgccacatatatgccattccattttctgccagaaagcctatcatattcttatgccaaagagatgattccaatgtcacaaactattggctrtatgttttgctactatgctctgtacccattctctgtcttttttttttttaatgaccgcatggcaattggtttcctcaatatctttattctttcataggccttcattcagccactcacctgaagtttctccactttgttttgcttctgttttatgatacaagaataggcagatgtgagttcaaatcctggctcaatgactcactatataaacatttatcgtggtcaagttattcacctttcttaatatctttacctcatcggtaaaattggactaaaataagtgttttacaaagttgttttgagaaataaaatagttacttatgttttatagagaggccagcacggcatctagcatgtggtaagtacaaaatatatttcctcaatggaatttataagctttctctgcctagggttgtgcaaacttagactccaatgcttggtcaggataataaattcatgcactggaaagttttgtccctgtcacttttccccagaatggtatagccagtgatttgccc

SEQ ID NO: 718805 - DNA, 664 bp, Homo sapiens
atggacccatctccaggctcgaacttgcaattgagtctgagaaatgtaaaggtctcaatgatattctctcaaaatgtatttctcatttggttaactgtagccatggtctacatgtttcttttgctaatgtactaaatatgccaaaactttccctctacaaccataggtcttttttcaatctcttagtatatttttctaataatttcatttctcctgtgctcactatcttgtgatattaaggggtaagggtgtggaagagtccaggcatagcaccctggttgccagttagatgttcatccatggttttgaatcatgagtatgattgataaacctgaaattcgttttcaggtgggttttgctgttaatttttagctccttgtctgatcttcaatccaatctagatatctatgtttgatattattcttcaatgatttaaaattcaaggacaagatttgtgtacctctagttcatctttatttttttcgaatstaaattaatattttcccccttctctctttttctttcttttctaactagcatacatcctaagtcttttatattgcacaataatccagaccaagactatttctatgattggtcaaaatattaaacagtagcataaatatctcatcgtaagcccttattaagttattagtaaactaac

SEQ ID NO: 718806 - DNA, 1751 bp, Homo sapiens
tcttacatatatattacatatatacacatatatatctcatttaaatatataaatttaaatataaaaataataaacattatatttatatctcaagatttatatatatattttgtttctctgagaaaccctgactaatacaggtacttaaaacaatgattgtaatcatgtttatgatttttcattttgctttataaatttgacataacatcatcagcattacttcatattattgcatactcttaataagtattttaatggctccatagtaagtaagttcattaagaaagtaaaactaagccttccctcaccataattttctttctatctggtgtttagacttttactagagtacagctcaagctacagatgtgaaagaaataatagaataaagaaaagagagaaagaatggaaggaagagaaagaaaragagagagagaaagaaagaaagaaagaaagaaagaaagaaaatggagggaagggagggagagagggagggagggaaaggaagagagagggagagaaaaagaaagaaagaaagatagaaagagaaagagagagaagagggagggaggaagggaggaaggaaggaagggagggagggaaagggagagagagagagaaagaaagaaagagaaagaaagaaaaaaagaaaaagagaaagaaagaagaaagaaaggaagaaagaaagaaggaaagaaagaaagaaagaaaaaagaaagaaagaaagagaggagggagagggaagaaaggaaggaaggaagggagggatggaaggagagagggaggaaaggcaaaggaaaaggaaagggagaagaaggaaaggggaaaaaaagaaagggaaagacagcagcttaaactgatggccgttcatttctctgtcacacaacagtccatggcaggcaagggttcaggcctccctcaccctggccccccactgtgtgccccagttggctactctaggtcatattatctcccagccagcatgatgtggagataggaccaggtgagtgccctcacaatccttttaatggcaagacccaggagtggcacacatcacttctaccatgtatcactgacctcaacttaaccttatggccacatcagcaataatggagggctggatcctacacttccgataaaaataaaaaatatattgactcaattggcatttattgcacaaacgttgtgtgatcgagactttcagcagttacttcatttaatattctctgactagatatcatcagcttggtagctgggggtcaccaagccactgcagaggttaagtaaccttcaaggtctcaacatctcctttattcagacagaactaattccaagtctgtttaattccaaaactactgttcttcctggtatattattattttgtttctttattaaattcctaaagattaaactttaaaacttcaaagcatttacttccaagacttctgaatttttaaaataattcttagtgaaataaagaatctctgttatgcctccaaatacaggtttagtagaaaatattgtcaggtagttttagaataagttctgtctctggacttctgggactagttaagtaaataaccagtatttataatgctccatttgttcccatgtaaattatgacaacaatagtcattgtttttcaaacgtttctagatcttagagaatagacctttttgtgacaggaaactggaaaaaatatccccccagattattcacacaaaaaatagtgatattgttttgctaggggg

SEQ ID NO: 718807 - DNA, 658 bp, Homo sapiens
tttacatggcttccaatctctcattgcacctaaacttgcaagaagcagtgtgacagctatgtcaacccaaaatctgtgcaggtatggaaaacataaagataaaatttcacataaccaagcttcagtgggagaagtccctagattcagacacagatctctgattaacatcattatagaaagcaagttrctaaattaaattggagaggatggcatgattgagacctctgaatccagcacttccctccctgaaattataaaattgcaactttaaaaatgaaagtgactgaaatccacttatcttcagggattggcttacagattattccataataggcacacaaaatgattgcagtaattgaagttgagacaaggtaatattaagtaggcctcccaccggaaatttccaaggaagctgtaaggaattgggacctttttccatttctttcaaatataataatgtccaatttttctaaatcagttataaatgttagtatctgagatgcaggttaaagggacaacaaaattttgttcctcagttttcttccctgctgtggaacaagaacgaacttggtgtaaaagatgttaaaatagttatttaataggaattttctatttctattattttctgctcctttgcagtacatcctgtagcctcttg

SEQ ID NO: 718808 - DNA, 614 bp, Homo sapiens
tatttaaatgtttttaataaagaaaacaatttttaagttcttaagcttatttcaagataattataattgtgatcaccttctaaaatagcaccaaggaacctgtaaacatagataagttttatgtatatatgtataagcaatctctactccagttcttcttttccacagctctcaagggcatctgtgacaataataaaacatctaaataaaggacatctaaaacaaagaatatgatcctgttactaccttactagattttaatggttgtctaatgtcttcaacaaaaaatgtcaatttcttagcatgacataaaaggactttaaaatttgggtgcttcatttctttctatctcttctaccatgcagtctttatagtttctaaatttccaggttttcagggtttcagaastgcttgctttcatgtaagctgttttctgccttcacctagataaatgcttctctattctttgatgctgtgtttaaatattgcttctttttgtctgttttagatttcacgagatgtttcttcaacacacacacacaaaaaacaaaagagaaagtgggagagggaaaaggagacaatcatagtggcaaagtaaaaaaaaagctagatga

SEQ ID NO: 718809 - DNA, 614 bp, Homo sapiens
tatttaaatgtttttaataaagaaaacaatttttaagttcttaagcttatttcaagataattataattgtgatcaccttctaaaatagcaccaaggaacctgtaaacatagataagttttatgtatatatgtataagcaatctctactccagttcttcttttccacagctctcaagggcatctgtgacaataataaaacatctaaataaaggacatctaaaacaaagaatatgatcctgttactaccttactagattttaatggttgtctaatgtcttcaacaaaaaatgtcaatttcttagcatgacataaaaggactttaaaatttgggtgcttcatttctttctatctcttctaccatgcagtctttatagtttctaaatttccaggttttcagggtttcagaagtgcttgctttcatgtaagctgttttctgccttcacctagataaatgcttctctattctttgatgctgtgtttaaatattgcttctttttgtctgttttagatttcacgagatgtttcttcracacacacacacaaaaaacaaaagagaaagtgggagagggaaaaggagacaatcatagtggcaaagtaaaaaaaaagctagatga

SEQ ID NO: 718810 - DNA, 968 bp, Homo sapiens
aagcgttgggattacaggggcgagccaccacgcctgacttgttgtttttaagaggatcttgctctgtcatccaggctgctggaatgcagtgacattgtcatagctcactgaagcctccaactcctggactcaagtgatttttctgcctcagcctcctgagtggctaggcttaaatgtgtgtgctgccatgcccagctaattctttttattttwtttttttgtagagattgggtttcgctagttacccatgtttgtggaactctttaaagatttgttatctgtttgtgaaggcagagaataacctcttggcactctattgtaaagaaatatttgtgccactctgctttttatctttcctaggcacagacgccttgtacaaaatctttgaaaactttggaaactttacagctggttgtatcctcagccactcttttttatttttatttattttttgagacggagtctcgctctgtcgcccaggctggagcgcagtggcctgatcttggctcactgcaagctccgcctcccgtgttcacgccattctgcctcagcctcccgagtagctgggactgcaggagcccgccaccatgcccggctagctaatttttttgtatttttagtagagacggggtttcaccgtgttggccaggatggtcttgatctcctgacctcgtgatccgcccacctcagcctcccaaagtgctgggattacaggcgtgagccaccgcgcccggctcctcagccactcttatcctagtcctgaatttcagaattgtctgggaatggcccaagatgcccacagtggctatgtctcttggagtatctagtgaattttggttcctgggttttttcctcccagaggacagcctatggcatggagatggagcctctcagtgaagcagctggatgtcctggggctgagagaagtcttctggtacacccttcacctaaaaagctaaccccttaaa

SEQ ID NO: 718811 - DNA, 968 bp, Homo sapiens
aagcgttgggattacaggggcgagccaccacgcctgacttgttgtttttaagaggatcttgctctgtcatccaggctgctggaatgcagtgacattgtcatagctcactgaagcctccaactcctggactcaagtgatttttctgcctcagcctcctgagtggctaggcttaaatgtgtgtgctgccatgcccagctaattctttttattttatttttttgtagagattgggtttcgctagttacycatgtttgtggaactctttaaagatttgttatctgtttgtgaaggcagagaataacctcttggcactctattgtaaagaaatatttgtgccactctgctttttatctttcctaggcacagacgccttgtacaaaatctttgaaaactttggaaactttacagctggttgtatcctcagccactcttttttatttttatttattttttgagacggagtctcgctctgtcgcccaggctggagcgcagtggcctgatcttggctcactgcaagctccgcctcccgtgttcacgccattctgcctcagcctcccgagtagctgggactgcaggagcccgccaccatgcccggctagctaatttttttgtatttttagtagagacggggtttcaccgtgttggccaggatggtcttgatctcctgacctcgtgatccgcccacctcagcctcccaaagtgctgggattacaggcgtgagccaccgcgcccggctcctcagccactcttatcctagtcctgaatttcagaattgtctgggaatggcccaagatgcccacagtggctatgtctcttggagtatctagtgaattttggttcctgggttttttcctcccagaggacagcctatggcatggagatggagcctctcagtgaagcagctggatgtcctggggctgagagaagtcttctggtacacccttcacctaaaaagctaaccccttaaa

SEQ ID NO: 718812 - DNA, 1302 bp, Homo sapiens
tctcaatataccccagggcctctaaccctgtgagcttggcctctaatctgagtatgayacccccgggcctctaactttttgggctgagtctctcaccctaacattataccctggggcctctcgcttaagtaatagtggataatcattcttgtccaccagaatggcttcacaactctaaaagatggcccacttgcccaatcaatcagtgtcagcagattgattctgtgtggattgttttccttggagtggggatcttgtcttggtgtcccttcatggtgttactgaaagatgttgctggaaaagagggtcctgatacagaccacaaaggaggattcttagatcttgtgcaggaaaacatctgaggtgagtcagagaccacagtgcaagaagcaagtttattagaaatgactccattacagagttgggcatcctcagaaaacaaaagcaggaatgcaatgtcttttgttagtgtctctacttataagtaactgtaaagagaaagagttacaattaaacttggaaggtgcagatgtactcactaaaggcaggggttattggttttaacaatgaccattaaccctttgacctaagctagctcattaaatttatctttaagaaaaaatgctgcactcctaggacatttatacatttttaaggctggatggaagatgtcttgtatggccttaaattatacgatgggctcccgtcttccatgatggacaagtcggaaaacactgcttttcttatcttctaagttgttctccagggcctctgggcttctcacctgcctttctagtattgtctgaatgcctgacctctcactggggagagctttattgactccagtgaccaagccatggtgaccttcacagatcataaagcagagaaagtgtgacttttattcctgacccctcggggaaaaaaagaagttaaggatgagctgtcacatttaccacctgaggtgttctcacaagtaaatcctgaggtttgggccacacaggctctgggaaacacactaaacacttcccccattcaaatccaactttggcctagtgctcctcgcccttggaagagacaatacactttaaggcaagaagcatgaggggaaattcaaccccttattgccaaattcttgccgtatgacttgttaaggccatgagagtctccttacaatactcccatgttaccagatcaaaagcctaatctggcaagtacagatttgtcagaaaccttagagcattaataaatgcagctgttgtctccatacaccccattgtccccaatccttacccaagtcccagg

SEQ ID NO: 718813 - DNA, 1302 bp, Homo sapiens
tctcaatataccccagggcctctaaccctgtgagcttggcctctaatctgagtatgatacccccgggcctctaactttttgggctgagtctctcaccctaacattataccctggggcctctcgcttaagtaatagtggataatcattcttgtccaccagaatggcttcacaactctaaaagatggcccacttgcccaatcaatcagtgtcagcagattgattctgtgtggattgttttccttggagtggggatcttgtcttggtgtcccttcatggtgttactgaaagatgttgctggaaaagagggtcctgatacagaccacaaaggaggattcttagatcttgtgcaggaaaacatytgaggtgagtcagagaccacagtgcaagaagcaagtttattagaaatgactccattacagagttgggcatcctcagaaaacaaaagcaggaatgcaatgtcttttgttagtgtctctacttataagtaactgtaaagagaaagagttacaattaaacttggaaggtgcagatgtactcactaaaggcaggggttattggttttaacaatgaccattaaccctttgacctaagctagctcattaaatttatctttaagaaaaaatgctgcactcctaggacatttatacatttttaaggctggatggaagatgtcttgtatggccttaaattatacgatgggctcccgtcttccatgatggacaagtcggaaaacactgcttttcttatcttctaagttgttctccagggcctctgggcttctcacctgcctttctagtattgtctgaatgcctgacctctcactggggagagctttattgactccagtgaccaagccatggtgaccttcacagatcataaagcagagaaagtgtgacttttattcctgacccctcggggaaaaaaagaagttaaggatgagctgtcacatttaccacctgaggtgttctcacaagtaaatcctgaggtttgggccacacaggctctgggaaacacactaaacacttcccccattcaaatccaactttggcctagtgctcctcgcccttggaagagacaatacactttaaggcaagaagcatgaggggaaattcaaccccttattgccaaattcttgccgtatgacttgttaaggccatgagagtctccttacaatactcccatgttaccagatcaaaagcctaatctggcaagtacagatttgtcagaaaccttagagcattaataaatgcagctgttgtctccatacaccccattgtccccaatccttacccaagtcccagg

SEQ ID NO: 718814 - DNA, 1567 bp, Homo sapiens
taggcactatctgctgccatgccaagtcctccatgatttggctctgcctggcaccctgaccactcctaccacgttattattctcatttctctacctaccccagggcctttgtcctgcctttccctcagcactagctattgtacttatctgcacgtggttgattccttctcataataaataattcaattaaatacattctgtaagagacttagcctctctattttatgtacttcctattttattcatattaacttcttttgtttctccactgcatttattaaaatctaactaatttatgtgttcacctttttcttatcagcctcttcactagaaaataagttctgtgatagtagaacttgcttgttgtggatctccagcccaatgcttagcataattataaaagctcaatgaatacttatggaaataacacttttaaaaataaatgtaaatagtatatgtttttcttaactcttaagttgcttaaatgtctaaaacgtataagcaaacccacccatgaaacacaagaccatgcaatttagttctagattaattctcaatcagcgatcttctttcttgagatttcctctgcttaagcagtagcatataaaaaatggtattaatctaatgmagacttttttttttttttgagacggagtctccctctgtcgcccaggctggagtgcagtggcgcgatctcggctcactgcaagctccacctcccggcttcacgccattctcctgcctcagcctctggagtaggtgggactacaggcgcccgccaccacacccggctaattttttttgtattttttagtagagatgggggtttcaccgtgttagccaggatggtctcgatctcctgacctcatgatccgccctcctcggcctcccaaagtgctgggattacaggtataagccaccatgcccggcctaatgaagactttttaaagttgaagtttccagttcacttagtagtactgagggttaaaggtgttaaatattaatgtttccaacaggattggaacacagcttagggaagtcaagtaaacttgcttatccagtgaggtcgcctgtcttcatgttgcattcactcttctaagaaggatttcatccctttttttttttttttttttttttgcatgagaattgaagcagaagcttgtgctgtattgaaagtatattgaatatgggctccgtttattgatgaagctttcaagcactcaccagttaggaggcatagaggaaagagaatgaatgttcactattatataagttatgggcatggtaggtgacttcacaggagttatcacattttgtcttttgaagttaccagggatcttaaatatgtgatgtatgaaatcgccataacctgagtgacctaatctttggtttggggaaaactgctcctgtcttcattttagtatccttgggaataccagatttggggagctacctagtatgtattcaagaaagctgtccatatttagagtgcgcacgagtgagactgccattcgtggaaaagaaagacatagagcttcagggcacagaaagttagtcttttaaaaaa

SEQ ID NO: 718815 - DNA, 668 bp, Homo sapiens
ttttttgktttttttttttgagacagagtcttgctctgtctcccaggctggagtgcaatggcacaatctcggctcactgcagcctctgcctcccaggtttaagtgattctcctgtctcagccccccaagtagctgggattacaggcacggccaccatgcccagctaatttttgtatttttagtagagacagggttttcccatgttggccaggctggtctcaaactcctggccttaagtgatccgcccaccttggcctcccaatgtgctgggattacaggcgtgagctactgtgcccagcccacatatccttttatctaatttttaaaattaggctgtaaagtagtgcaactgagccccatttaacaattaaaaaaagaagcttctgtgtaaaactgaaggtcatatttgtagattcctagattcctaggatgggaaaaaatctcaaatcccaggactgaagggtagttgtttctttttctcactctttcattgctcgaccctatcacagagtctgacattttgtggacactcaatatgtatttattgcatgagtaaaaatgccatctggttaagctctcaacatgtgacatctatatgtctttcagagcatacccaggctgttctctgtcacttctgagttattgatgattccaagcaacatgacacc

SEQ ID NO: 718816 - DNA, 1059 bp, Homo sapiens
attccacatctgtattcattctgaaattgcttgtccacaaaacatggtatgtaactgtgataaaatatccttctgaaagtgaaaataatctccttcgtattgtaaattttcagttaaacccaaatgctggtcaatgtgaacttatttttattaaaaaaattttaaacagctttattgaggagtaagtgacacccaagctgcacatattagaagtgtaaagtttgatgttytgacataggtatccacccataaagctatcaccactgaagataatagacatatttgtcaccccgacagtttcctcttacccttcagtactgtctccctcctgcctctgatccacagccagtcactgataaggtttttataactgtagattagtttgcattttctaatttatatattatataaatagaatcatgcggtgggtaatcttcttttattctggcttctttcactcaacataattattttgagatttatccatgctgtttgtgtgtcagtagttcatttttttaattcattaagtaatatcctattgtatggatataccagattcatttttggagtcataatgaggttagactaccttctttttcccttcagcaggtcttctgatttgctggcattatttgtaaccacctgtgagtctagaaaatttgagacaggtctcagttaatttagaaagcttattttgccaaggttgaggatgcatgcccctgatacagcctcaggaagtcccgacgacatgtgcccagggtggctgggacacagcttagttttatacattttagggagacgtgagacatcagtcaacatatgtaagaagtacattggttgggtccggaaaggcaggacaacttgaagcaaacacaggaagacttgaagctgggaaggaacttctaggtcacagataggtgagagaggaatggttgcattctctgagtttttgattaacctttccaaaggaggcagtcagatatgcatctatcttagtgaatagaggggtgactttgaatagaaggagaggcaggttggccttaagcagttcccagcttg

SEQ ID NO: 718817 - DNA, 1059 bp, Homo sapiens
attccacatctgtattcattctgaaattgcttgtccacaaaacatggtatgtaactgtgataaaatatccttctgaaagtgaaaataatctccttcgtattgtaaattttcagttaaacccaaatgctggtcaatgtgaacttatttttattaaaaaaattttaaacagctttattgaggagtaagtgacacccaagctgcacatattagaagtgtaaagtttgatgttttgacataggtatccacccataaagctrtcaccactgaagataatagacatatttgtcaccccgacagtttcctcttacccttcagtactgtctccctcctgcctctgatccacagccagtcactgataaggtttttataactgtagattagtttgcattttctaatttatatattatataaatagaatcatgcggtgggtaatcttcttttattctggcttctttcactcaacataattattttgagatttatccatgctgtttgtgtgtcagtagttcatttttttaattcattaagtaatatcctattgtatggatataccagattcatttttggagtcataatgaggttagactaccttctttttcccttcagcaggtcttctgatttgctggcattatttgtaaccacctgtgagtctagaaaatttgagacaggtctcagttaatttagaaagcttattttgccaaggttgaggatgcatgcccctgatacagcctcaggaagtcccgacgacatgtgcccagggtggctgggacacagcttagttttatacattttagggagacgtgagacatcagtcaacatatgtaagaagtacattggttgggtccggaaaggcaggacaacttgaagcaaacacaggaagacttgaagctgggaaggaacttctaggtcacagataggtgagagaggaatggttgcattctctgagtttttgattaacctttccaaaggaggcagtcagatatgcatctatcttagtgaatagaggggtgactttgaatagaaggagaggcaggttggccttaagcagttcccagcttg

SEQ ID NO: 718818 - DNA, 1059 bp, Homo sapiens
attccacatctgtattcattctgaaattgcttgtccacaaaacatggtatgtaactgtgataaaatatccttctgaaagtgaaaataatctccttcgtattgtaaattttcagttaaacccaaatgctggtcaatgtgaacttatttttattaaaaaaattttaaacagctttattgaggagtaagtgacacccaagctgcacatattagaagtgtaaagtttgatgttttgacataggtatccacccataaagctatcaccactgaagataatagacatatttgtcaccccgacagtttcctcttacccttcagtactgtctccctcctgcctctgmtccacagccagtcactgataaggtttttataactgtagattagtttgcattttctaatttatatattatataaatagaatcatgcggtgggtaatcttcttttattctggcttctttcactcaacataattattttgagatttatccatgctgtttgtgtgtcagtagttcatttttttaattcattaagtaatatcctattgtatggatataccagattcatttttggagtcataatgaggttagactaccttctttttcccttcagcaggtcttctgatttgctggcattatttgtaaccacctgtgagtctagaaaatttgagacaggtctcagttaatttagaaagcttattttgccaaggttgaggatgcatgcccctgatacagcctcaggaagtcccgacgacatgtgcccagggtggctgggacacagcttagttttatacattttagggagacgtgagacatcagtcaacatatgtaagaagtacattggttgggtccggaaaggcaggacaacttgaagcaaacacaggaagacttgaagctgggaaggaacttctaggtcacagataggtgagagaggaatggttgcattctctgagtttttgattaacctttccaaaggaggcagtcagatatgcatctatcttagtgaatagaggggtgactttgaatagaaggagaggcaggttggccttaagcagttcccagcttg

SEQ ID NO: 718819 - DNA, 1059 bp, Homo sapiens
attccacatctgtattcattctgaaattgcttgtccacaaaacatggtatgtaactgtgataaaatatccttctgaaagtgaaaataatctccttcgtattgtaaattttcagttaaacccaaatgctggtcaatgtgaacttatttttattaaaaaaattttaaacagctttattgaggagtaagtgacacccaagctgcacatattagaagtgtaaagtttgatgttttgacataggtatccacccataaagctatcaccactgaagataatagacatatttgtcaccccgacagtttcctcttacccttcagtactgtctccctcctgcctctgatccacagccagtcactgataaggtttttataactgtagattagtttgcattttctaatttatatattatataaatagaatcatgcggtgggtaatcttcttttattctggcttctttcactcaacataattattttgagatttatccatgctgtttgtgtgtcartagttcatttttttaattcattaagtaatatcctattgtatggatataccagattcatttttggagtcataatgaggttagactaccttctttttcccttcagcaggtcttctgatttgctggcattatttgtaaccacctgtgagtctagaaaatttgagacaggtctcagttaatttagaaagcttattttgccaaggttgaggatgcatgcccctgatacagcctcaggaagtcccgacgacatgtgcccagggtggctgggacacagcttagttttatacattttagggagacgtgagacatcagtcaacatatgtaagaagtacattggttgggtccggaaaggcaggacaacttgaagcaaacacaggaagacttgaagctgggaaggaacttctaggtcacagataggtgagagaggaatggttgcattctctgagtttttgattaacctttccaaaggaggcagtcagatatgcatctatcttagtgaatagaggggtgactttgaatagaaggagaggcaggttggccttaagcagttcccagcttg

SEQ ID NO: 718820 - DNA, 1059 bp, Homo sapiens
attccacatctgtattcattctgaaattgcttgtccacaaaacatggtatgtaactgtgataaaatatccttctgaaagtgaaaataatctccttcgtattgtaaattttcagttaaacccaaatgctggtcaatgtgaacttatttttattaaaaaaattttaaacagctttattgaggagtaagtgacacccaagctgcacatattagaagtgtaaagtttgatgttttgacataggtatccacccataaagctatcaccactgaagataatagacatatttgtcaccccgacagtttcctcttacccttcagtactgtctccctcctgcctctgatccacagccagtcactgataaggtttttataactgtagattagtttgcattttctaatttatatattatataaatagaatcatgcggtgggtaatcttcttttattctggcttctttcactcaacataattattttgagatttatccatgctgtttgtgtgtcagtagttcatttttttaattcattaagtaatatcctattgtatggatataccagattcatttttggagtcataatgaggttagactaccttctttttcccttcagcaggtcttctgatttgctggcattatttgtaaccacctgtgagtctagaaaatttgagacaggtctcagttaatttagaaagcttattttgccaaggttgaggatgcatgcccctgatacagcctcaggaagtcccgacgacatgtgcccagggtggctgggacacagcttagttttatacattttagggagacgtgagacatcagtcaacayatgtaagaagtacattggttgggtccggaaaggcaggacaacttgaagcaaacacaggaagacttgaagctgggaaggaacttctaggtcacagataggtgagagaggaatggttgcattctctgagtttttgattaacctttccaaaggaggcagtcagatatgcatctatcttagtgaatagaggggtgactttgaatagaaggagaggcaggttggccttaagcagttcccagcttg

SEQ ID NO: 718821 - DNA, 1059 bp, Homo sapiens
attccacatctgtattcattctgaaattgcttgtccacaaaacatggtatgtaactgtgataaaatatccttctgaaagtgaaaataatctccttcgtattgtaaattttcagttaaacccaaatgctggtcaatgtgaacttatttttattaaaaaaattttaaacagctttattgaggagtaagtgacacccaagctgcacatattagaagtgtaaagtttgatgttttgacataggtatccacccataaagctatcaccactgaagataatagacatatttgtcaccccgacagtttcctcttacccttcagtactgtctccctcctgcctctgatccacagccagtcactgataaggtttttataactgtagattagtttgcattttctaatttatatattatataaatagaatcatgcggtgggtaatcttcttttattctggcttctttcactcaacataattattttgagatttatccatgctgtttgtgtgtcagtagttcatttttttaattcattaagtaatatcctattgtatggatataccagattcatttttggagtcataatgaggttagactaccttctttttcccttcagcaggtcttctgatttgctggcattatttgtaaccacctgtgagtctagaaaatttgagacaggtctcagttaatttagaaagcttattttgccaaggttgaggatgcatgcccctgatacagcctcaggaagtcccgacgacatgtgcccagggtggctgggacacagcttagttttatacattttagggagacgtgagacatcagtcaacatatgtaagaagtacattggttgggtccggaaaggcaggacaacttgaagcaaacacaggaagacttgaagctgggaaggaacttctaggtcacagataggtgagagaggaatggttgcattctctgagtttttgattarcctttccaaaggaggcagtcagatatgcatctatcttagtgaatagaggggtgactttgaatagaaggagaggcaggttggccttaagcagttcccagcttg

SEQ ID NO: 718822 - DNA, 655 bp, Homo sapiens
tacccacatatgtaactgggatatttcagatcaccagagatcgttttttaatcctttagggaatttggtgcttgttggtattataaatttgataacaaaatataagcttactgaataagaatcattttaattgtattaatatcatgttaataatcatgttaatcgttttgattagcaattgtgttaatgcaaaattaatattattttaggaaaaattaatcatatatacttcttatttctagttacacaaagaactggtcctcaggacaaaagggtgtctaagttcaacacaagagttcaacaagaatcataaaatgatggctgcatagcaagcataaaaagcagattcatatggaagaatcagtagaattttttacagtttggatgctcttaggcatcttaatgattatttaacgattagaaaaaggggcaaagagaagaaatcatggatagggaagtgggaaacagcattaagctattttgarcaattgatgaagtgtgagaaaatataatctgttagatctcaatgcttaagacattctctgagtgatattgataaaaggcttttgtgatagatagatagattgaactggcctgattgtgcagaatgtaaacataatattaaaattaatattaatatttaaaatattaaaag

SEQ ID NO: 718823 - DNA, 1754 bp, Homo sapiens
tttatccatttctttcccctggaaacgttcttttggttggcatttcaggatttcaaaactgttaagtgatcctaagtttactctaaggacacatttatttctccagactcttttgtgaaatgagatcaccacagccatataactggatttgctttatcactcaatcaatactcctttcacagagaggtggctggagaaatctcagggaaagcagtgactgtaagcgaaaatgagtttgaatagaaatggaggcacaagggcatagagaattctctctacagtaatctagagaaataaagaaatatagtatgagaatcattgcacctacaaaagttatctcttctctattttttaacatctttctttttgtactctgtgtatgtttatttatgattcttacatctatccagtgctgtcccatttatctccttttctactttattttgctgttgtactgaagagatcaccaactccaatttgtctctctgccttagttacacttttctttttaggtaaactcttaaaagttaacagaagctagaaattaaatttaaaatgtttaatataaatatatttacacaagacttccaaatacatgcatgtttttatataattttacaactctgatagctgtgaaagcattattaatcgtattaataattctatattataaataagaaaacatagatgttgagaaaattacgtttcattcaaacaacttgaataaaaaaaggtaagttatagattaaaaccccttagtatagtttagggattttgattaatttctccaaaatttatggtattcttgtgttttattctaaagcacaaacaaataaaaaataaaactaattaataatcttatggcaaacaaaaagtgttagtttctcactatatctatttcaatgtcttccaaacaatttaaaacatcaaaaagtataggagcattttcttcaaaagcaggtaaccrtactctcttattattattttttttttcacaactttgacagtagccttctacactgaactttgaaccatagacatgtatagatgtacaattttaggtgaattctttgaaactaaaatgatgtaaacaaggaccacaacaaaagtttagaaattaacaaaataaaagagccattttctcagtactttgagtgagtttggaattttgactactttgtgtttgaatatttgtttgaaatgtaaaattttggggttatacacagtttaaaattcagctaattcatttataattttaattaatattttgttacagcaaaagcaaattcaatttacaataatttcattgctttttttattattccatattttaaggttagccaatcatgccttctgctataaactaattatgtaacctctaatggaagtcggaatgagcatgcatttgaaacaaagactattgtgatggttaaatttatgtgtcaacttgactgggttaagggatgcctaggtagctgacaaaacattatttgtatgtctctgaaggtgtttttgggaaaaaaaatgacaactgaatcagtagattgagtaaacaaattctgccctcaccaatgtaggtattatccatacatatgcattgtgtatgtgtgtgtgtattctatgtttagttttcacttttcccagagagaacaaaatcaagtcctgaatagaattctaaaagatacgtatctacagatattcctgaatattccatttaatcatgaaaaatatttaatgtcccaagaaagtctagg

SEQ ID NO: 718824 - DNA, 633 bp, Homo sapiens
atcttattttttttttcattctctggctttttgttcttagctttttattaaaaggaaccagtttcacttccaaattaacttattgatctattaatgcaggaatccatgaataaattaatccatttatgagggcagacccctcatgatcaaatcactttttaaagaccatgttggggattacattaccaatggatatgagggtggtctggctatgacatcgtcacctgatcaatcatcatgattgaattggccaatgtggctggctaggcaggtgtcccttccctcactcactgctccatgttcattcctccagaagctgtgcgctcagttaaagaggatgaccttccctgatagaagatgaccttccttgatagaggaggaccttctttggtcaagggtatataaacagctgtactcccctgctacaacctccaarcaaactctcaaggtccataagtttccaacacatgaaatctggggatattaaaaccacagcatccaccaactatccaagctgtccaagtcagatccttctgtgtcatctccaattattttctctcagaactacttggctctctgaccttgcctctccaccatcacccccaggatcattacacctgtcaattcttatag

SEQ ID NO: 718825 - DNA, 1406 bp, Homo sapiens
ggaaagcttcagagcctgaaaacatctaaaattatacccaggactgacaactggcctagactcaatgtctttggaatttgctctactaaatttgctaccgtttgaatgtgttccctccaaaactcagctgtttctaatgtgaatatgatgcaaaaagtgaaaaccttatacatctttacagcagcctagaagtaaagatgaagcaatcctttttttttttttttttaaagaatctacagttactacaactaactgaaaaagtgggaaatctggagaccaacacatagaagaagaaaaatggcagtcaaagactcactctccaaattggacatttatttaaaccagggtttctcagcctcagcgatgtgtatatactgggccagacaatttgtggagggttctcctgtgtgttgtaggacgtttagtaacaccccctctacccaagagatgccaatagcacctcccatcatgaccagttgtgacaaccgaaaatgtctccagattatttccaaacatcccatggggggcaaaaatctccttcagttgaaaattactgtgtaaactagagctacatcctagatcttagaaaaacatgtaagcttcccaagtcagccctgcataccattggtacggaaatgaaataagagcctagaaggaaggaaacaaaactataatcttatttaatataaaagtaaaaatgcaaaaataaaacactaccgtatgcattctaacagtgtttattatagaaatacaaggatgattcaaaattaggaaaatttcatcaggtaattcacagattatatttctacatagaattgaaggcacaatcatgaaaaacaaagtagctctttatgctttaagtccatggtctattctgtgaaaaacacaggttgcaggtgtcttacagaaggaaaactgaacactgaacacgtatttctcccatctgctctttttcctgaggctccatgggaattacagtgaagaataaagattgtataaacacacacaattacmaaaaaaaagggatggggttaccaagagaagagaattcacctccaatagacaatgacagtaaatgggaaatggttaattaatgaagcaaagcaaacaaaggtggaggttagggggataccgataacaaggaggctaatttgtcccacagtaccctgcagaggcactagactccgacaccaggtaccccggagagtgggactgataggcaagactgaaaacagattaaccaaaagcctacatacagaacacattttccaggccctgaaacacattgttctcccacatttccttaagcagaaccccagcaaacatgtatctacctcaggcaagagaacgtagatttcacctccagaggaatggagtagttcctgccatcatttatgattgcgcaa

SEQ ID NO: 718826 - DNA, 893 bp, Homo sapiens
aaaaatacaaaaaaattagctgggcatggtggcgggtgcctgtagtcccagctactcgggaggctgaggcaggagaatggcgtgaatccgggaggcggagcttgcagtgagccgagatcgcgccactgcactccagcctgggtgacagagcaagactccatctcaaaaaaaaaaaagaatagaaatagcaaaattcagcaataaagcatctctcctgacaacttgtaatggaggatctattacaagaccagaaaaagactgaaagtagacaaaaagagccaactccrcagccccacaaacactgctgcacacaccatgggtcagcaaagtgagaggctcaggaactctcacacacatttgccgtttatcaaaatgaacaaaacaacactgacttgaaaagacaaccttaatttttttttaatgagccctacgttctctctgttgcttttaattgcagtggctctacagaagaggggaaagagggatgaaggctctgattggctggaaaacgccacagaacataaggaagcattctcggggcaaaacaaaacagctgagatgactgtgtcagtttgcttgtctcattcaactccaaacacagacatctgatattaaatcatacttttcatgtatgattttcattcttccttcacccaagaagaaaagaaaggaaggttttggtagttttattttctcctacaagcgctgaacatgcagtctgtggggtcacaggcatagatacagaggggatggcagaaccctgacccgcctgacatgcctcagtgcctgggcacagctgctgcctggcacactatgggaattgactttattatttaatgacttctttgagtctcaattttcttcaactggaaaatgtagataatattggacga

SEQ ID NO: 718827 - DNA, 515 bp, Homo sapiens
tgccaagctccttggagctggccatttgcacatgattagagactttctgacttcaatttctcctctctagtaaagataagcaaacttgatggcttgaccactcttaccccagaattccttttgcttatttaaaacaccagccctgagcaggcctggctttcagtggggtctagagctcacccagcaggtttaagccattttgccaatggatttgtcattaaagattacaaagtctaggggattagtgggatttgtctaagcacactcaatgtcaggaagaagagggactggtctcctgggaccraaaactccaaatctggtctaagctcatttcatttacctccagaaactgggtttgtgttcttactcataaaatacaaacagtagtaatatctgcttcatagagttgttgtaaagtaaaagaaatggtgcatatagagcattttgcacggtacctagtgtgtgataagtgcctgatggtggtgggacttctgaatcttattttatatatatat

SEQ ID NO: 718828 - DNA, 515 bp, Homo sapiens
tgccaagctccttggagctggccatttgcacatgattagagactttctgacttcaatttctcctctctagtaaagataagcaaacttgatggcttgaccactcttaccccagaattccttttgcttatttaaaacaccagccctgagcaggcctggctttcagtggggtctagagctcacccagcaggtttaagccattttgccaatggatttgtcattaaagattacaaagtctaggggattagtgggatttgtctaagcacactcaatgtcaggaagaagagggactggtctcctgggaccaaaaactccaaatctggtctaagctcatttcatttacctccagaaactgggtttgtgttcttactcataaaatacaaacagtagtaatatctgcttcatagagttgttgtaaagtaaaagaaatggtgcatatagagcattttgcacggtacctagtgtgtgataagtgcctgatggtggtgggacttctgaatcttattwtatatatatat

SEQ ID NO: 718829 - DNA, 970 bp, Homo sapiens
tcattcttttattcaaaagtataaggcttcacctgtttacagagtaacaagcacagctgtacattactatattgcaggtttttccctcctagatgactagccaaactctccaaaagagactctgtaattttatttaaataaatctccatcttcatggaactatttttatattattacaacacagcagactggtgatttatgtttcaataatttacacaacttcaggcacttttgagaattgtcccatcacatgtctaacataacttctccttctgggaggttgagattgtaactcggtcacctccaccacacacccacccctgcccacgtacacaacattcctagcaccagactccttaaatcggaccactgaaccacatttattcttatgccttaaaaaaaacacaggataaacatgattcatctccccagaatgtattttatttagtgggaagtaattctaaatgttattcatcaaaatcagacatggataggtcgtgacatagaagtcaatacaaacccacattttctctgctggctacttgggcctatgccccaatctcatgaggattaggaatgcagggtgagtatatatttgcctctaacacccagggtatttttgcagtgggaaaatttgagaagcactgggaaaattactggcctaaaaagtagacagcagggacctagtttttagttctgatatatactacctatgtgagcttgagcaaacaacttctctcctgtaggtcttcacatcattcacaaaaataactgatattaggacaagttctaaaatgaggagattctttcattcttctgtattgagactggtatttccatgacaccattcaatgtgaactgacagtgaacgaattaggagatttagtgttccacattccagagcaggtgaggaggaagaggcagaggatttttytgaagttcaaaacagcccagtttaacacatgtatag

SEQ ID NO: 718830 - DNA, 623 bp, Homo sapiens
ggcatgagccaccgtgcctggacaatctcatttttaaaatgcctttgcattgacatctagacaggggtttggccaaacagctgggtaccacagacttgcccagttgacacataaaattaatgccattaaaggtgttctttggaaatactgcatgtaggtgaaaactaggggaacagctagcagaggtgagagtgggtgcttccaggaggtggggtgggtgttgcggagggtgggcccacagcattgaccctgtgctgtaggtgcagagggctgggggctgagtgggcacagatgagccagtgaggccctgggctcaggaagtgcagggtggggctgagattcctctgtacgcccagcccccgctggrtgtgatgccccagatgccagcaggaggaaaagggtttgaagagcgggagccatagtgtggaaggggagtagggggtcccatcctgagggaaactggaaggcatgactgaaggccgcgggccgagcctgagcccacggcaatgggaatggtgcagcagccaccatctgggatgcaggcagctggggatgccagggagggggtctggccagcaacagaccccaggggatggtggaatctcctcccccaaattcaagca

SEQ ID NO: 718831 - DNA, 580 bp, Homo sapiens
tgggcaggcgggcatcaggcaggggcaggcagaggagtatccggcagagggaaccgctggacaaaggccggggatcaggaaaggaccctggtgctgagggactgagggaagaccagggaggccctagaggcgggcaaggctaaggttcggggttttgtcccaggccgtcagaagccccatcggaagctctgcaggggtttggggaagggcaggagtgtctaagtgtcactcagcggctgctgggtaaattgatctcrggtgctcccagggtgggcatggggtggggcggcagcaggaggaccgtgagccgaccgggttggggaatatcctggaggtagaagtgcggggcttggctgagtgactctccaagaagcctcacagattctccgacggggtatgcctcatgtggcctgatcagcgacctcacatcactctatgaactttgtttctcttgtgtctggaagccccagacctattcaggccaagatgcgtcaggatgtggtaccgtggggggctgcgtgtgacgtctaccccacattcaggtgcgtcaggatgtggtaccatgcggggctgcgtgtga

SEQ ID NO: 718832 - DNA, 1426 bp, Homo sapiens
ttgggccccccttctgtttccaggtggaaggagagccttctgggcacagccctcctgccagggccctctccagaaacctctcacagtcttccccaggaccccagatgcaatcagagatgggagcccagggacaagcgagatgggaaggggagaggcaggaaaaggatgccagtcaggacagtgccaactccagagctgctgtccaggacctacctgcagggaaggcgggcaccagccagccccagccagcctttgttgacttaacaggtggctctgaggtgggagaagaggaggaggagaacacaccactggaagactggttcccattggtccctgtcatgcttaaaaaaaggcccagagaggcagtcttgacaccctagatcccaagatctccaaggatttggtggcatacccactccagcacacagaagcatgaggttcatgactctcctcttcctgacagctctggcaggagccctggtctgtgcctgtgagtatggctcttccccgacacccaaccatatagtcccctgaagactgggccctgccttcatttccccttcccctcctcgccagaggcagttcacccaagtctgtctctgtagcccactcctgcctcccactaggttctccacacagggactctatggtcagaggaagccaggagccctgtggccccagcctggctctccattgcctctcctctcagtctgtgattggcccactctgctccaaccactctggcattctttttcccctcaatgaaccaagccatttcccactgccaagacttttgcacatcctcttgtcttttcccctgcccattatttcacccacccacgtcaacctccttcctactcaatttccaagtgtccgccctgctagctctctgtgtccatgtatttcctcacagcaggcttgctgaagccccagaatcattttggcccctattttgcattttcttgcctcctgtatttttccttcctagcactatcacaaatgtaattaaataattgtttatgtaattatgttaattcctccaaatcccccattgactgtcagcttccccgagcaattacactrtctgtcttcctcacagctgtatctctagcctctaacaccatgtctggtgcataatgcgtgcttcattcatgcttttggaagaataaagaaatggagggaaggtccttctgaggtcattctatcaggtgacaatcagaacaactcctgccctgtcactagagcaggtgctgtggtcatgccctcgtggtcatgccccttcaactttcattatgaaacttggacatctaagacatagaagagagtcagagaatgattccatttccatagggatgttctgagtagcctaggtctagggaggataacagagagagggatttggttgagataccaaaaagcatttcta

SEQ ID NO: 718833 - DNA, 633 bp, Homo sapiens
aagggcacccatgcgagggctggccgaccctcgccacctatgtcttggtttcccccactgtaatactgggaaccccacttctcccaggcctgctgcgaagatgaagccagcaaatgcacgccctctcttagctctggaccgggcaggtgaaaagcagggaggtgttcataaaagcagtccccaccgctgaagggtcctcaactcggggttctagtcccagctctgccctggcctagcaaccccttcccgctgcagggaccaaggcggtgggcaggtccctcacccgtgctgagaccgggacaggaatgcgcacctctccccaccctcggacgccccggcggcgccgctgcagaagtcgggaggtcggacaaacgcgaggagtaaggaaaaagaggaggaagggaaggaaggaggaagaacgaagtgaggaaagaggatgtcagggaagaaagggagtaaaggaagaaggaagggagagggggacagaaaggaggaggacggaaggaggaagggaaggaagaaagacggaaggsaagggagaggaaaaaggggaggaaagaagaaagggaagggggaggaaggaaagggggaggaaggaaggaggaggaaggtgaggaaggtaaggaaggaagg

SEQ ID NO: 718834 - DNA, 633 bp, Homo sapiens
aagggcacccatgcgagggctggccgaccctcgccacctatgtcttggtttcccccactgtaatactgggaaccccacttctcccaggcctgctgcgaagatgaagccagcaaatgcacgccctctcttagctctggaccgggcaggtgaaaagcagggaggtgttcataaaagcagtccccaccgctgaagggtcctcaactcggggttctagtcccagctctgccctggcctagcaaccccttcccgctgcagggaccaaggcggtgggcaggtccctcacccgtgctgagaccgggacaggaatgcgcacctctccccaccctcggacgccccggcggcgccgctgcagaagtcgggaggtcggacaaacgcgaggagtaaggaaaaagaggaggaagggaaggaaggaggaagaacgaagtgaggaaagaggatgtcagggaagaaagggagtaaaggaagaaggaagggagagggggacagaaaggaggaggacggaaggaggaagggaaggaagaaagacggaagggaagggagaggaaaaaggggaggaaagaagaaagggaaggggraggaaggaaagggggaggaaggaaggaggaggaaggtgaggaaggtaaggaaggaagg

SEQ ID NO: 718835 - DNA, 633 bp, Homo sapiens
aagggcacccatgcgagggctggccgaccctcgccacctatgtcttggtttcccccactgtaatactgggaaccccacttctcccaggcctgctgcgaagatgaagccagcaaatgcacgccctctcttagctctggaccgggcaggtgaaaagcagggaggtgttcataaaagcagtccccaccgctgaagggtcctcaactcggggttctagtcccagctctgccctggcctagcaaccccttcccgctgcagggaccaaggcggtgggcaggtccctcacccgtgctgagaccgggacaggaatgcgcacctctccccaccctcggacgccccggcggcgccgctgcagaagtcgggaggtcggacaaacgcgaggagtaaggaaaaagaggaggaagggaaggaaggaggaagaacgaagtgaggaaagaggatgtcagggaagaaagggagtaaaggaagaaggaagggagagggggacagaaaggaggaggacggaaggaggaagggaaggaagaaagacggaagggaagggagaggaaaaaggggaggaaagaagaaagggaagggggaggaaggaaagggggaggaaggaaggaggaggaaggtgaggaaggtaaggraggaagg

SEQ ID NO: 718836 - DNA, 633 bp, Homo sapiens
aagggcacccatgcgagggctggccgaccctcgccacctatgtcttggtttcccccactgtaatactgggaaccccacttctcccaggcctgctgcgaagatgaagccagcaaatgcacgccctctcttagctctggaccgggcaggtgaaaagcagggaggtgttcataaaagcagtccccaccgctgaagggtcctcaactcggggttctagtcccagctctgccctggcctagcaaccccttcccgctgcagggaccaaggcggtgggcaggtccctcacccgtgctgagaccgggacaggaatgcgcacctctccccaccctcggacgccccggcggcgccgctgcagaagtcgggaggtcggacaaacgcgaggagtaaggaaaaagaggaggaagggaaggaaggaggaagaacgaagtgaggaaagaggatgtcagggaagaaagggagtaaaggaagaaggaagggagagggggacagaaaggaggaggacggaaggaggaagggaaggaagaaagacggaagggaagggagaggaaaaaggggaggaaagaagaaagggaagggggaggaaggaaagggggaggaaggaaggaggaggaaggtgaggaaggtaaggaaggmagg

SEQ ID NO: 718837 - DNA, 846 bp, Homo sapiens
ccttttgggttcttggtcatgaaatccttgcctaagccaatgtctagaagggtttttccaatgttatcttctagaatttttatagttttaggtcctaggttgaaatccttaatccatcttgaattgatttttgtataaggtgagagatgaggatccagtttcactctcctacatgtggctagccaattatcccagcaccatttgttgaaaagggtgycctttccccactttatgtttttgttatgttcagttagctgtaagtattttggtttatttctgggttctctattctgttccattggtctatgtccctatttttttttatagcccaaaggtcttttttttttttttttttaacacctattatgccatgaattcacagggaataggttccagcagctcaggctccttcccattggctctcacaaagtgtgcttctctgggtggagcaggctggcgcttgagttgaacccaggtacctttctcttccgcttctttctttttctgatcattttccttcatgcatttcaggaagctatctcggctctcagagtgcttaatgtgctcaatatgcacattaattctctcggcaagaatcttgcccttaacttgtttgtttacaacaatgccaacagcatgctgggtaacattgtagactcttccagttttgccatggtaacacttacggggcattcctttttgaacagtacccattcccttgatgtctacgatatcacctttcttatagattcacatatacatggccaaaggaacaactccatgttttctaaaaggcctagagaacatatatcgggtgcctctcctctttccctttgtgttcgtcat

SEQ ID NO: 718838 - DNA, 846 bp, Homo sapiens
ccttttgggttcttggtcatgaaatccttgcctaagccaatgtctagaagggtttttccaatgttatcttctagaatttttatagttttaggtcctaggttgaaatccttaatccatcttgaattgatttttgtataaggtgagagatgaggatccagtttcactctcctacatgtggctagccaattatcccagcaccatttgttgaaaagggtgtcctttccccactttatgtttttgttatgttcagttagctgtaagtattttggtttatttctgggttctctattctgttccattggtctatgtccctatttttttttatagcccaaaggtcttttwtttttttttttttaacacctattatgccatgaattcacagggaataggttccagcagctcaggctccttcccattggctctcacaaagtgtgcttctctgggtggagcaggctggcgcttgagttgaacccaggtacctttctcttccgcttctttctttttctgatcattttccttcatgcatttcaggaagctatctcggctctcagagtgcttaatgtgctcaatatgcacattaattctctcggcaagaatcttgcccttaacttgtttgtttacaacaatgccaacagcatgctgggtaacattgtagactcttccagttttgccatggtaacacttacggggcattcctttttgaacagtacccattcccttgatgtctacgatatcacctttcttatagattcacatatacatggccaaaggaacaactccatgttttctaaaaggcctagagaacatatatcgggtgcctctcctctttccctttgtgttcgtcat

SEQ ID NO: 718839 - DNA, 846 bp, Homo sapiens
ccttttgggttcttggtcatgaaatccttgcctaagccaatgtctagaagggtttttccaatgttatcttctagaatttttatagttttaggtcctaggttgaaatccttaatccatcttgaattgatttttgtataaggtgagagatgaggatccagtttcactctcctacatgtggctagccaattatcccagcaccatttgttgaaaagggtgtcctttccccactttatgtttttgttatgttcagttagctgtaagtattttggtttatttctgggttctctattctgttccattggtctatgtccctatttttttttatagcccaaaggtcttttttttttttttttttaacacctattatgccatgaattcayagggaataggttccagcagctcaggctccttcccattggctctcacaaagtgtgcttctctgggtggagcaggctggcgcttgagttgaacccaggtacctttctcttccgcttctttctttttctgatcattttccttcatgcatttcaggaagctatctcggctctcagagtgcttaatgtgctcaatatgcacattaattctctcggcaagaatcttgcccttaacttgtttgtttacaacaatgccaacagcatgctgggtaacattgtagactcttccagttttgccatggtaacacttacggggcattcctttttgaacagtacccattcccttgatgtctacgatatcacctttcttatagattcacatatacatggccaaaggaacaactccatgttttctaaaaggcctagagaacatatatcgggtgcctctcctctttccctttgtgttcgtcat

SEQ ID NO: 718840 - DNA, 594 bp, Homo sapiens
tgagttgctctgggtccaaatgccatctttgacacttagaagatgtgtgatttcacatcacttatcttgggttttttaaatcactgagcctcagttttcttctctgtaaaatgggagtaacagtacctactttataggattgtcatgaggctaaattttaaaatctgagattactcttggaactcccatttatatgtgtaatttaattatgtatacacatatgcaaacattaatattagaacatgagcaatgaaaaaattagactaatgaattttctttatattgatcaaagctcttatgataggtcattttcaagagcatccttgcgctatgagrtggtgctatttccttctctctatgcccgcatcccacgccacccccatttgggcacttactgtcccttgtctgcagaagcctcctttctgccccaccgccccccaccgcctgtttctcttttctctactgccagtctagttcttcttgagtaacttttttaaagcacatatttggctatacagtctcttgattaaaagccttcaatgagtcctgtggcttataggataaggcagtagaatctggtctcaatctactatg

SEQ ID NO: 718841 - DNA, 1608 bp, Homo sapiens
  misc_feature 1508, 1509, 1510, 1511, 1512, 1513, 1514, 1515, 1516, 1517,1518, 1519, 1520, 1521, 1522, 1523, 1524, 1525, 1526, 1527,1528, 1529, 1530, 1531, 1532, 1533, 1534, 1535, 1536, 1537,1538, 1539, 1540, 1541, 1542, 1543, 1544, 1545, 1546: n = A,T,C or G
  misc_feature 1547, 1548, 1549, 1550, 1551, 1552, 1553, 1554, 1555, 1556,1557, 1558, 1559, 1560, 1561, 1562, 1563, 1564, 1565, 1566,1567, 1568, 1569, 1570, 1571, 1572, 1573, 1574, 1575, 1576,1577, 1578, 1579, 1580, 1581, 1582, 1583, 1584, 1585: n = A,T,C or G
  misc_feature 1586, 1587, 1588, 1589, 1590, 1591, 1592, 1593, 1594, 1595,1596, 1597, 1598, 1599, 1600, 1601, 1602, 1603, 1604, 1605,1606, 1607: n = A,T,C or G
caagtgtgtgcgtgcgcgtcgagcttgaagcatttactggctagctccccacagtccttagagaccgcattggcggcttcggcctccaagactgcgcccccacctgtctccaggcactgcaaacagagctgtgtaagacggagccagtcaccgcctccaaggaaagacatcgtgcagtcttgggggtggggtgatgatgagagcacctttctcacaaacccacgtgagacagcgccttgtctagcaaccgcaaaaataatcgagcaggacgtggtcaatcaagctctttataaaacctcatgttaagtaaaatcattcaagatccaactcaatggccaccttaaacccatgttttaaaagcatgagacagagcacacaattcatgctcaaaggagaacgaggtagcatgcatgctggcaagacgcgcattcaggtttgctcccggtatcaagatgagacgtaaagacgatttatgcactgtcatagaacttgtagttcctcacacaaaacacagaacttcctgggaaagtgcctagaaacttctttatctgtatttccccaggctgcaaagtgcacacatttttaaagttcaactcttaaaaaaaaaaaaaagtcagcagaggcaagatttcaacagacgccggtccaaatgttagcaattctagagtggtcaggggtttgccgctcccaaaagtaagggggaaattagaagaaggaaagaagtcgttttcgaagacgaaaaccaaagcaaggaggtatttttggtatcattttaatcacaaaatagcacgaatgcggtctgtgcctgtgcgctacccaaacgtcgatttgaataccactgaacgctagtttgaaaatttccatttttgtaatttgctttcttttgttaagccaagacttgagagaaacctggcagccgtctctaagtctggcacgatttcacctcagacgcactcggttggtttggatgttgagggagaccgcacatgagagagggagaaggaggaaaagagagctggagagcaaacctaccgctcggcggccgccgcagagagcaggcccagggcttctcagccgggggatctggctccacctacaggaatcagaaggcaaacctagtagacgcctcggcgtctgcaggaacccggtgggggctgggggaactttgataattgcctagagaatttcctagccagtaggaatgggggtcggtagaagtggtaaggattgggaagcagggatttccatgaccagattacccacagtcatatcagattcagcgattcttatttggaggagaaaaggtatcaygtcacctcctatgacctaggaattttaactggttccaggtaaaccccatttgaaagcaaaggcagcacctggtcccaggacaggcccagcacatagcatgctcaggcaataacatttgaatgaatgaatgaatgaatgaatgaactgaataatccaatctatcaaataacagaaacctaatatgataaaaagaaaannnnnnnnnnnnnnnnnnnnnnnnnnnnnnnnnnnnnnnnnnnnnnnnnnnnnnnnnnnnnnnnnnnnnnnnnnnnnnnnnnnnnnnnnnnnnnnnnnnng

SEQ ID NO: 718842 - DNA, 1049 bp, Homo sapiens
ttttaaagttcatgaacaatatgaaacatttttaaagacttggctttcataagctttgatttttttttttttttaaaagtatgctttacaatttgtctaaccttttgaagtaagagatgtggccatgtgactaggttttctccaaagaaataygagcagaagtgtctgtgatctcatagagatcatgcagatgaggacaatacctaagggatggtatgccaaaaagatggaagaaaactgagtccacaaataactatggagcacagctgcccaccagtctggataccttacctcagggctgttatatggaagataaataaagtattatttaagccactgtgctttgggtcctctttttttttttaaggcagtttagcctgcactgtaactgatcttcacaatttccatgaagaggatgcatgtgatcctagttgactccttttgaattaaactttttcaaagtctacccaaagagagcttcacgttgaagtatctatcacacattagatcttcaataaatgtacagcctgttagacaagttcaatggctggtagaatgactttgagttagaggtcaaaagacctcttctcttactttacacagcatttgaagaaaactttgtattgaataaccaactcattaaaaatcttttctttgaaaaataatacatgtttactaaggaaattctaaaaatataattaaacaagaaaaactaaaatcacctacaattatatccccagatataaacaccattaatattgtggtttaggctgggtgcggtggctcacgcctgtaatcccagcactttgggagactgaggtgggtggatcatgaggtcaggagtttgagaccagcctggccaacatggtgaaaccccatctctaccaaaaatacaaaaagtagctgggcgtggtggcgggcacctgtagtcccagctactcaggaggctgaggcaggagaatcgattgaacccaggaagcagaggctgcagtgagccaagatcatgccactgcactccagcctgggcgacagagtgagactctgtctca

SEQ ID NO: 718843 - DNA, 1049 bp, Homo sapiens
ttttaaagttcatgaacaatatgaaacatttttaaagacttggctttcataagctttgatttttttttttttttaaaagtatgctttacaatttgtctaaccttttgaagtaagagatgtggccatgtgactaggttttctccaaagaaatatgagcagaagtgtctgtgatctcatagagatcatgcagatgaggacaatacctaagggatggtatgccaaaaagatggaagaaaactgagtccacaaataactatggagcacagctgcccaccagtctggataccttacctcagggctgttatatggaagataaataaagtattatttaagccactgtgctttgggtcctctttttttttttaaggcagtttagcctgcactgtaactgatcttcacaatttccatgaagaggatgcatgtgatcctagttgactccttttgaattaaactttttcaaagtctacccaaagagagcttcacgttgaagtatctatcacacattagatcttcaataaatgtacagcctgttagacaagttcaatggctggtagaatgactttgagttagaggtcaaaagacctcttctcttactttacacagcatttgaagaaaactttgtattgaataaccaactcattaaaaatcttttctttgaaaaataatacatgtttactaaggaaattctaaaaatataattaaacaagaaaaactaaaatcacctacaattatatccccagatataaacaccattaatattgtggtttaggctgggtgcggtggctcacgcctgtaatcccagcactttgggagactgaggtgggtggatcatgaggtcaggagtttgagaccagcctggccaacatggtgaaaccccatctctaccaaaaatacaaaaagtagctgggcgtggtggcgggcacctgtagtcccagctactcaggaggctgaggcaggagaatcgattgaacccaggaagcagaggctgcagtgagccaagatcatgccactgcactccagcctgggcracagagtgagactctgtctca

SEQ ID NO: 718844 - DNA, 788 bp, Homo sapiens
tccaataaacttatcgttagtcttcttactcttactctttccagttcacacatccctgattttttcttacaagtcatggttaggaatccctcaccacgttgactgatatcctttggacacttggcagtttgccagtgtcttacaatgtgttagctagaattgaatccagttctcaacatgtagktgaccagggcagcagattacttggttgggagcatatattcccgtgaatcccattgatgcagcctcaaactgaatctccctcttgctctcactcttctctttaacagcactttacactgtggctagtacctggttggtgtttaaagaccaaagaataaatggctcactttgagatggaagtcaactataatccagttaacttttggggatggaacttcacatctctctgtcttaaatatcatcttgttagtgtgagtttatatctcacaatgtcattgtttctcccaacctctgctctttattaaatttaataagcatatcatctctgtattattattattgatgttgatattagctaacccttagtgcttcttatatgccagtccttattctaagcattttaaattcaatattcagaataaaattatgagatgaatattatgactattctcattttgaggatgaaggaattgagatacaacaaggtaaagtagattgcctaaggtcacaaagataataagtagcagagtcaggtttcagtgcagacactcttgctccagaattcgtcttcttaaccaccttgctattcctattcaattaattga

SEQ ID NO: 718845 - DNA, 369 bp, Homo sapiens
  misc_feature 269, 270, 271, 272, 273, 274, 275, 276, 277, 278, 279, 280,281, 282, 283, 284, 285, 286, 287, 288, 289, 290, 291, 292,293, 294, 295, 296, 297, 298, 299, 300, 301, 302, 303, 304,305, 306, 307, 308, 309, 310, 311, 312, 313, 314, 315: n = A,T,C or G
  misc_feature 316, 317, 318, 319, 320, 321, 322, 323, 324, 325, 326, 327,328, 329, 330, 331, 332, 333, 334, 335, 336, 337, 338, 339,340, 341, 342, 343, 344, 345, 346, 347, 348, 349, 350, 351,352, 353, 354, 355, 356, 357, 358, 359, 360, 361, 362: n = A,T,C or G
  misc_feature 363, 364, 365, 366, 367, 368: n = A,T,C or G
tctcttctatgttctttctgagtatgaccttcagctgttaccttgtctcactattgctcaggagctcatctaatctcctgtgctgccctgttcctgtaaaacacaaacttcctttcaatttaaaacccaaatcttttcatggatttctgctaccaagggctctactactcagttacagtatctggcctgaaagctaagtctcatcccttcccaactcgttctgtaagtttctacctattttattatgatgyattatgacagctccttcnnnnnnnnnnnnnnnnnnnnnnnnnnnnnnnnnnnnnnnnnnnnnnnnnnnnnnnnnnnnnnnnnnnnnnnnnnnnnnnnnnnnnnnnnnnnnnnnnnnna

SEQ ID NO: 718846 - DNA, 1222 bp, Homo sapiens
gcacagatttgacggaaaaaaatactttgagttttgagatatgtaaagcttgaggtacctgctgctgggcattatatatgtaccgctttattcagctttataaattatagttaaattatattgcttcagtgctcagaagaacattgtgaagctcaagagaaattcagaactggagggatatgatgctttagtgtgaagacgtgagagagaagtctcattgcaatatataaatacaagatacttctcggaccagatgcggtggctcacgcctgtaatcccagcactttgggaggccgaggcaggcagaacacgaggtcaagagatcgaggccatcctggccaacatgatgaaaccccgtctctactaaaaatacaaaaatcagctgggtgtggtggtgcatgcctgtaatcccaggtacttgggaggctgaggcaggagaatcgcttgaaccagggagttggaggttgcagtgagtgagccgagatygcaccactgcactccagcctggtgacaaagcgagactccatctaaaaaaaaaaaaaaaattacaagatacttctcttggctttgagaatcttgctatatacttgcagaggacacatatcaagcaacatcctcaatggatagatgatgtagagcaataaaaaaaagacatcatcacaagtgaaaagcaatgaggtattgagtccatgtgcgccagagaaatacagtagacaaaattcctcttagaagatatcctgtagttagccttttgagtaaagttaatagtgtgcactagtagcacttgtatgtctcttacatatgaatagaaaaagcgaagtccctcttctataaagacattatttctgcaatatgtagtttctgcaatgataataacttctctacccagctactctacatgactggtattataatgtatgaataatattttatacttgtaaataatgccaaaagtaacaaataaaattttgccatgacaaatattttccccatgtttctacaccacacatggagaagtagcacagtgcagtagctgagcgcctgggttctggaagcaaactacctggctcaaatcctggttctgtgaccttatactagtttctgaactctgtgtgaatcattatcctcatttgaaaaatatagttacactaactacctcataaaaatattatgtgtgttaagtgaattaatacttacaaaactcttagaacagtgcctagca

SEQ ID NO: 718847 - DNA, 626 bp, Homo sapiens
agcattttttattcttttttatagattccaattttccattaaattttccatttttaccctattttaaattttttctatatattttaacaaatttatattyattatctaaaaagtcattgcctaagtcagctgtggggtggctttcattattgattttttgcttgattacatgttatgttttccttcctcttttaatttcctgtcattattttgttggaccttgcttttttcttttatatatttttacagttttcttgaggtgcaatttgcttacaatacgattcaaccacaaattatacaattcagcattttttagtacattcataaaattgtgcaaccatcaaaacaacaaattttagaacaattttagcactccagaaagaaatcctgtactctttagctgtgaccagctcagtcccctcattcccccaatccccaatccaaagcaacaactaatctgtctgcttcttgtctctatacatttgccaattctggacctttaattcaaatggaaaaatagaccatgtggcctttgtgtctggctttttacttagcataaattttcaatgttcttccacattatagcatgaattagtacttaattcttttttacagtcaaataatat

SEQ ID NO: 718848 - DNA, 626 bp, Homo sapiens
agcattttttattcttttttatagattccaattttccattaaattttccatttttaccctattttaaattttttctatatattttaacaaatttatatttattatctaaaaagtcattgcctaagtcagctgtggggtggctttcattattgattttttgcttgattacatgttatgttttccttcctcttttaatttcctgtcattattttgttggaccttgcttttttcttttatatatttttacagttttcttgaggtgcaatttgcttacaatacgattcaaccacaaattatacaattcagcattttttagtacattcataaaattgtgcaaccatcaaaacaacaaattttagaacaattttagcactccagaaagaaatcctgtactctttagctgtgaccagctcagwcccctcattcccccaatccccaatccaaagcaacaactaatctgtctgcttcttgtctctatacatttgccaattctggacctttaattcaaatggaaaaatagaccatgtggcctttgtgtctggctttttacttagcataaattttcaatgttcttccacattatagcatgaattagtacttaattcttttttacagtcaaataatat

SEQ ID NO: 718849 - DNA, 577 bp, Homo sapiens
gttgaacatgtcagagcagtaaaaggcagtgaaattatggaacgcagccaaatgccaggaaatacatagattataacatagagattaataatgccctttctcaaattaactttttttcctttcctgttctgatatttcaggtttggtattatgttttgatataactgttcatggattaaatcaagtacgatttttctgtttttatcttttttttaagttcacaacctgatatgaaagtcctccagcatgaaaagcatgcactcagactgtggagacatgcctgactgtctatttcaacacaactcgtgctcagggctgtatgtaagcacagagcagaacccaagcagggaacatggacagaggaaattggccacatgctattattaccccatccacattgatggctctaataagtccacagaatgttttaataaatcgtttagaaatatacttgcatcatgtcttctgtttccttctctcaaagaagaaaaaaatatgatgrtattgctagcaaaattggggagttctgagataaacccagcacttttccttttttttttttttttttttttttttt

SEQ ID NO: 718850 - DNA, 1314 bp, Homo sapiens
tgggtattggttcaatatgaactggaggaagactaccttctactgaatcaattactgcatgaacacaaaacaacattccagttgccagtttagactgatagaaataatttgatcaaaattaataaatagttcttgcagagaaccgtactttttttttttttttcaaatcttcttgcagatttaataccaagattctcaggtgcgctcagactgacattgccagtcatgttgtggtatactgcaactgcttttctctacaatttctacaccaccaaaaaactgtaaaactgatcatttatactgttacttatatattgagaatgctactttggtttcctgaagtaattaaattacacttaaaattatgtgcatgagaacaggttcattaaccccagggggttatcttttataaagaaaataattcaaacagcaagagatacaaaacatactatttcccccacaatagaatttcattgtgttattttttaccatttattaataagaacaattaattcattaactagaagttaaaaataaaataataccaatgaaaatttgccaatattgataaaaacatatcatgtttaattatttcccttatattagaaatgttactattatataatccaaatattggtatttttggtgaattctttacattaaatatctacaagtgaggttggaattgctgtattaaatagtttgttttattgattgcttttaatttacatttcaaattgtaattcataaaattcatgcatccaattgcagtgtagtgcccattttgcaatattggcccagcaaatgattatatattttcaaagaatactattatttttacaaaattgttttctattatgccagtcaaaaatgtaattgtctttaataatactttccttataagtggggattaaaattattttacataattatttgtggttctttcataaactttggctaatgttttttgctaygttctggttttctaccccattatatattttgttgcatttttcttattatgaaagttcatctcaaaatacaagcaaaacacacaaaaagagagaacaaacttcacaatggtatatacatcttctgtggaaactttgttttatgtttttaaacatacatatgcacatgcacatacattaaattaaatcaatgaatacacacaaatatattaacatttgcatacaaagacatatgcttctataacattattattaatagttgcataacattttatggcctgattctaacagaattcctatttcctgttgtaaaatatgttcatttcttcactatttaaaacaa

SEQ ID NO: 718851 - DNA, 1237 bp, Homo sapiens
gttatttaaataaatgaatgaattaacacatttagataatgcctcattaatttaaaagttgagtcaaatacttaatttaaggtacctatgatttacctttaaaaactaatgctaatatacttgttctgactgaaaacttgcttcttcttctaaagagctaagaacttcaattggaaaacaggcataaggcatattgcactggatgtctaagcagctgtttaagccagttaattagtgatttcacatgtctgaaaaaatatgcttaagtaatgttttgtttatagagtgttgagaatctctgcaagtttgtggaaaaatgcctggaaatgcagttatttaagggactgctttatagttttcatttaacaccttataacaatctttgctctccattaggacatactaatattagcacagggaggggaaagtagcacccaggagtattagaaaagagctgtttttcccctctttgaaaatagccagattctctgtaaaaactaaactaatctcaattctaatacttgtattctgtccccattataagaaataagggttttttactagaatttggcattgaagttcaagaaaaatgtttattgtttcttatagaatgagaaattgacaggtataacgctttgcttagagttcttttttaatgttagtcatgaaaggcagatgtcttaaacctgtatttttctttttataatatacatgtgggtccatatttacatttatcattgaaaaatgatttgaacattttctttttcgttatttgtattcattattggtggaatcagtatattggatacaattgttaaaaatgcatgttacaatttgcaagtcagtttaatatcttgtgacaagatattatgtgaacagtccatatagcagtacaataattttaaaaagaaaatttacaaactgcccatcgtctgatttttatttatattttcagaccaattaaaacaacctcatttagtgattactaccagacatggtccagaatagctacatcaaaagccacagaatactacagaactccatgtaaggtgaactatccttatcctatgtccttttggtatatgttaatctgttaacatttatcttggtttcaaagactaaytgacacacatctgctatgtaagagtgataaacttctctgtaggctctatatactattcattcaacaactattactttagttctttttttcaaaaaaaaataattttaacttttt

SEQ ID NO: 718852 - DNA, 1010 bp, Homo sapiens
aagaatacaaagttcttttgtatagagccctggactgaagtctgattaaaagccagaaagaaagatagtcaattggaggaataacagaaaagttcccaatcttatgaggtttactttacttcctttaccccagagaaaagctttcacaccagagagaacctttttatttctcctctaagccacaagaaatattaggtagaaattcaacaagaaaacataagaacatagggctgttcaattatatcaatctaaaaggaaaaatcatctgttaccatcatacatcaggagctaaaaagacagattgagagagctggacaactttccggttccatttaactggatctttagagtactatttcattatctggatgaaagtaggttgtccagtctgcatacacttactgaaatacgactttgcttcagccatccttctaaaatggtgcattctgcagtagcagagacttctgaattcccagatgcagtgattacgttttagtcctcttcttacttgcactctcattagctgtgctctccttgatttacatgataccatacatccatggcttttcatctcccttcctaagcacactgctgcctcttcccttggcaatatcttcttcattcagtcctctctacttactctctctgaaagacctcttccactaccatggttttcatttgcttacagtccagcgattcctaaagctgcatctctagccagatccctcttctgaattttccatgcatatttataactgtgcaggggacatctcacytatgtgtattataggcatctcatattcaagatatctcaaagtgaattcatcatcttgcccccaaatctatctttcttcctttattccctctcttggttagtggtagatcactaattttacattttcttaccaaagccagaatcttagatgtttcctacatctctttatctctctcattaagccttgttgatttttatctgctgcaacattatgaatgcttccactctactacac

SEQ ID NO: 718853 - DNA, 2264 bp, Homo sapiens
gattctatggctatctgccattctttggtttgatttttcttttattcttatcagtcttaaagaaaagtgtgcttgaatgtgccatctttgctagcgagacttaggggacaacttctgccttggcccacttttgggcttcagcatcaaagagccagcaacacctcatgtggtcaatgtggtggtacagtgatattagtagaacctcaaagggaaggagatcagccaccaacagtggccagcatcctctccctctgtgaagagttttcttccgttacttgtcttggatggccattgtattaaggaatcagaggggtcttataattggtgattagtagtatcttggttggaacagcccatggcccatggctagagacttcaatatccaacaggaggtggacaagagatcagagctttagcaaatggtttaagagccagtacaggacttccgttctaggaggcagccagaatacaaaccataaattccagagaaaaggcacagttcattgggagtggcaggtaaggggagggcaagtttgcaactcaacagctttgttcagaacactctagaaaataatttatcaattctagacttcgtcttctacagggaacaagttccctccatagtcagtggaaactgcatgagtttcctcctcctgtctcttagtggtctgagaagctaccttccacaggtgtcttgggaaagtagtttctaaactgtgggccatggaacccctggaatttgtgggaatagctcagggaccaataggtgaaaatgggaagagaaatgggcaggcctcaggcattcatcaccttgaccccaggaagttccactttcctctgtttcgatcagtgcctagtagagagtctggcacaaaacaggcactcaataaatgaattaatgttttagacatttcagttccttgtaagttttcatttgattaaaggattccaccactaaaaatgtatgaaagctactgcattagaacatttttagaagacatccatccatacgagaagaactagagcaaacactcatctgaagtctcctcacttggcttcaaaaaccatcttggtctcttgattaagaaaaagatcatcagaggagtttacacattttaatcccctcccatgcctgcaccagaccttgatgacagagaagtgaatttatcagagtgacattcttgaggattttttttttttcatttttggagaaacatattcctttgattcttatatggtaatatactttatttccatgaagaacaagaataaaataacaacattcatgatactgtgagccaggtgtttgcacacattatgtcatataatttttactagaatcttctcagatggatatgatcctcttttttttttttttttttttttgagacagagtctcactctgttgcccaggctggagtgcagtggtgccatctcagctcactacaacttctgcctcccaggttcaagtgattctcctgtctcagccttccaagcagctgggattacaggcacccaccatcacgcccagctaatttttgtatttttagtagagatggggatttgccatgttggccaggctggtcttgaactcctgatctcaagtgatctgcccacctcaggctcccaaagtgctgggattacaggtatgagccactgtgcccaggcctttttttttctttaaatgaggcaatcgaggcacagacacagaaagataaagtaacttgcccaggatcacacagagaggtaaacccagtatttgcactcacgtctgcctgactctagcagatatgcacttttcatcctggctcttattgcagcagcaagagtgattttgggtatttatgagagttaactcatttctaaggactgcagagaactgagaactattactaaagctggatacatgattcctcgctctaatactctttcattaaataggctggatacttacctgcttaaagtgcttaaaggtgaagcaggaggggagatgcaagtacggattgctcatttttggccacacctatccattggcaattttgtggcagtgcacctggatcggcacccttgagaaaaaaatcagagttgggaggcaggaaaacamgtggaacagaaaggtgagagcttagagaagcagggcactctctttgtcaggcagaaccaggcagcagagggaaatgctggccttgaagcagacagggagagggttgttcctctcccctcagagacccttggattttcctattggtttaacacctgggaca

SEQ ID NO: 718854 - DNA, 3287 bp, Homo sapiens
aataaaaaccctggactccaaggctcaggtgagcttctctggtagacatatttcacacatgtggtaacaactccttgttagtggaatgaagcctattctgtgtgactccataagaaaataactccaagaagcttgagcctggtttcctctaaacttcatgtgttttttccctttgcagattctgctttatgcctttttgttgtaataaatcacagcaatgaatatgactatatgctgagtcctgtgagtcttcctagtgaatcattaaatctagggtgattctgaggactcctgacaccatattttgatatataaaattaccttctacagggttccaagtatttcaagttcactgttatttatatattaacaacctgcaactgacagctttgagatggaaaagcttaatgtaaatcctgcatcattttcattcacaaaactattattttctggactattagagacatgatattcagaaaataatataacattttctaaaatttcaaatttgcaatttcaactgtaaatatgcttaatttgaaattttattaactggttgttagatactatttctataagtgtaaatatttttaattccctaaaaacagaaggaaacccatccttatcctaaaaatcaaacaaacaaatcagaatgcaaactcaaacaaaacagtttactgtacgttacaattaggtggtatttaaaattgatgcattcttaccatgtggagtgattgtctgtactggtttagcaggggaccttacattccatatagtcaaggtgccatctgaatgactgcaaataaattgttttccttcatgatgccaagcaacagagtggatagcctatagaaggatgaaaaataccatttaaaaaatctatttaaacagtaaactatttgtaaatgatctcatctattaattttcatttttaacttttctttatttcctaaggttaacatgtgaacttaacatttccataataatttggccctcttgtaatacaaatgagattttatttcttcatattaacactgttttaattctctgtacttactttactccttaaatcagcataaagaaggcatgatagtgacatctacggacaagttcagtgaaacaaaatgttttcttacattatttttagcataaacaatacctaaacataaattaccaaattattacaaccagtgtcccaatagaaaaactagttgcaatgacaagattagaataaaatgtgttaattgaccatgatcctaagagccaaaatgtagatttggaattaagatcaatacaaatgtttcaggttgagctataagacatgttcctcatctctcacagtaattactgaggcaatttttaatctcaggggacactgttctgataagaaatttattttgtacttctgggtcgcttaaaaactatctggaaaatatttttatatcaccaaagtatgatacccctcatttttttgctttaatattatttcaattttggtatgtaaaaaaaactttttaaatcactctcccatgcgtcctttgaattatttcttttcaactcaagttgatacaattttagttcttaatggtcaactgacttaaagccaccctactggaatgcaagaattgcagagtatagcacaaaaatcgtataactgaaactcaaaacttctgtcacatataaagccaacattttctatcatgtcatctatttatttgagttctttctatacttataaatttaagctaaatattataaaatatcttggtatgaaatcagatggatacagataatcagctatacttctaaatgacaatatttaatacaatgttttttattcaaagtacagatgctcctcaatttacgatgaagtcataccctgataaactcatcataagtcaaaaatatcataagtcaaaaatgcatttaatgctaccaacacagcagatgatcccttacttacgatggttcaatatgcaatttgtcagctttaagatagtacaaaagcactatacattcagtagaaaccataatcgattctaattcctaaggagctcctttacttattacgtcttggtaaaccaattgtaaagtcaaaaaaatcataagttgaagaaatattgtaagtcagggaccatctgcatctcttacaaaattctaaataaaatcttaaagcaataataaactgacatatacatatgacattttgaaaactcaattttaaaataagcaatcccttagtagcctttacaagtaaacttatttctgcaaaaacatgagcagtgctaaaaagctatttaaatgttttttaaaaaattcataagkgaaaatacaaaagaggtctatagtgctatctggaacctatagataaaaacatcttaatagtatcatgtataaatgtatatcatgtatataaatatgtatcatatgtagagaaatacttctactttgctaaagaaaacaatgtgtatctttgtttaaaagtgactcctatttataaaatattattaaattattaggcattccaaaaacaaatactacctaattactggaaccagtggttcacaattattttggacaacagaaacaaataacagaaaacaccccacaaaaaagcaaagaaataaccaaatatggacatgcaacaaacatgcagtatttacttatacaattttctatatgcaaatccaacttaatacaagacgtgttttctaatactaagtatatatgtagtgcatagtattacaagtatttaaaaatatgtatacagtatctaccatgcataaaacatacaatttatactttttctttagtattcttgagaaaatgacagagaaatttacgtaaacaaagtgagaaaatcaaaactcaccagcaaatctgacacatgctcaaaatcagaagcaaggtgggttaggagcaaatctgaataattcatgggagaagatatgagatataatgtaggaaacataaattggggttgataaattttgtgtgtgaattggcttatctgtttttccaaggagaagatataaaatttccaggtgattaagaatatttacttgtttatggccaggcacggtggctcaggcctgtaatcccagcactttgggaggccaaggcgggtggatcatgaggtcaggagatcaagaccatcctggctaacacggtgaaaccccgtctctaccaaaaaatacaaaaaattagccaggcgtgtggtgggtacctgtagtcccaggtactcgggaggctgaggcaggagaatggcgtgaacccgggaggtggag

SEQ ID NO: 718855 - DNA, 1207 bp, Homo sapiens
attagctagtcatggtggctcatgcttgtaatcccagctactcaggaggctgaggcaggagaatcgcttaaacccaggaggtggaggtcgcagtgtgccaagatcacgccactatactccagcctgggcaacagagttagaccctgtctcaaaaaaaaaaaaaaagatttttgttcttttcctggtctaatgagaggccrtagatgctcaccctccagttagccacagaatcatatgggtcaacaacgaatattcgataatgagctgtgttgccaggtgatttttgcccaactgtaggctcatagaagtgttctgatcatgtttaagttaggctaggcgaaattatgatgcttcacagatcaggtgtattaactgcatttttgatttacaatattttctatgtatgatgggtctgttggggcatcaccccatcataagttgagcagcatctgtatgataagttctggttccatgcccaacatagtctttatggataaaatttctccactcgacctttcagttgcatgcaagccttgttgggaatacgctaactacaagctcacttcgctcacttcacgttatctctttttaatagtacttggctagaaaccacaaaagttattagaacagagtttatcctgcatcttaaaaattacctacagcataataaacaggtatcctagagacacatacatatgtatacacatatattatttgaattacatattcttgattctaggaatctagataaagaataactttatagagttggcaccctatttaaaaaatactaatagaaagcatcattcatatagacacttaactcgcataattctgcaagataggtactttcttaattaaaagtaaccaagataaatgaagttttcgttgtcctcattcgtatcatcctctttgatcactcaatttaattatccgcaccatactgaaatagatctcacactgtttcatgccctgttgacctacttcctagattcagggttgataagtagttgaaattcagggtgcgaattatagcatctttattatctgtttatataactcaagatatttgttcctatttgagaagcagtatacaacaatgattacaagcaaatatttgaatcccaaccccttgacttactactggcatgactttgagcaagtaaactaatgtcactttatttcaggattaccacatgtaaaatgg

SEQ ID NO: 718856 - DNA, 1207 bp, Homo sapiens
attagctagtcatggtggctcatgcttgtaatcccagctactcaggaggctgaggcaggagaatcgcttaaacccaggaggtggaggtcgcagtgtgccaagatcacgccactatactccagcctgggcaacagagttagaccctgtctcaaaaaaaaaaaaaaagatttttgttcttttcctggtctaatgagaggccgtagatgctcaccctccagttagccacagaatcatatgggtcaacaacgaatattcgataatgagctgtgttgccaggtgatttttgcccaactgtaggctcatagaagtgttctgatcatgtttaagttaggctaggcgaaattatgatgcttcacagatcaggtgtattaactgcatttttgatttacaatattttctatgtatgatgggtctgttggggcatcaccccatcataagttgagcagyatctgtatgataagttctggttccatgcccaacatagtctttatggataaaatttctccactcgacctttcagttgcatgcaagccttgttgggaatacgctaactacaagctcacttcgctcacttcacgttatctctttttaatagtacttggctagaaaccacaaaagttattagaacagagtttatcctgcatcttaaaaattacctacagcataataaacaggtatcctagagacacatacatatgtatacacatatattatttgaattacatattcttgattctaggaatctagataaagaataactttatagagttggcaccctatttaaaaaatactaatagaaagcatcattcatatagacacttaactcgcataattctgcaagataggtactttcttaattaaaagtaaccaagataaatgaagttttcgttgtcctcattcgtatcatcctctttgatcactcaatttaattatccgcaccatactgaaatagatctcacactgtttcatgccctgttgacctacttcctagattcagggttgataagtagttgaaattcagggtgcgaattatagcatctttattatctgtttatataactcaagatatttgttcctatttgagaagcagtatacaacaatgattacaagcaaatatttgaatcccaaccccttgacttactactggcatgactttgagcaagtaaactaatgtcactttatttcaggattaccacatgtaaaatgg

SEQ ID NO: 718857 - DNA, 1384 bp, Homo sapiens
ttttttttctttaggggaaggataaggaacttctgaatgaagcttaaaactcaagcagccaactgtcaacctatgacacagagaagacatgaatcaaaatctctccgggtcagagcatagcggtggcatttcagggaactaagtttcagtagttccctcacccccccaacmaatttgcatgatttttgttgtgtgccaggccttgtaccatgaattggggatgtaaagataacccagacaagcccctgttccccaagctactaagggagaccaatgcacacacacaaatattagctattgtgctcagggccattaaagaaggatgataggggcctgggatgcccagaagaaggagggatagaatgaaatgatcttggacacacgcaaaagctataaactcacttcatgtgagtacaaaatgggatgcccagccaggtgtggtggctcacacctgtaatcccagcactttgagaggccgagggtgggtggttcacctgaggtcaggagtttgagaccagcctggccaacatgctgaaaccccatctctactaaaaatacaaaaaattagccaggcttggtggcaggcacctgtaatcccaactacttgagaggctgagacaggagaattgcttgaacctgggagacggaggttgcagtgagccaagattgcaccatttcactccagcatgggcaacagagcaagactctgtctcaaaaaaaaaaaaaaaaaaaagaaagaaagaaaaaaaaaaaggggggatgcctttattttttttcccccttagaaaattgtgaacagaaatgctttgtgtttacttttttctttaaatgttttatttattattattatactttaagttttagggtacatgtgcacattgtgcaggttagttacatatgtatacatgtgccatgctggtgtgctgcacccactaactcataagcaaataaagtaaaaaatgccaaatgcagctttaaatcctaagggatttttttctgaggaattttaaaagggattcttctgaggttgtgctgataaagacagggaagggaggaccaatggctgggagcatttaccaggtgttggcacttacaggaagcattttctttaatcctcacaacagcctgggatgcgtcgctggggaggaaaatgcagctaagggagtttgggtaattttctcaagctacgtataacaaagctgggatgcaaaccccaattctgcagtcttcaaagctcacacttcttctaccagccccttatctcccatttccaacagaaccattttctttttttaggggaaaaattccagggccttctgcaaagaaggacactgttttctttctcaaatctatgtcttatgtgggtgcttaggaggccagacag

SEQ ID NO: 718858 - DNA, 1384 bp, Homo sapiens
ttttttttctttaggggaaggataaggaacttctgaatgaagcttaaaactcaagcagccaactgtcaacctatgacacagagaagacatgaatcaaaatctctccgggtcagagcatagcggtggcatttcagggaactaagtttcagtagttccctcacccccccaacaaatttgcatgatttttgttgtgtgccaggccttgtaccatgaattggggatgtaaagataacccagacaagcccctgttccccaagctactaagggagaccaatgcacacacacaaatattagctattgtgctcagggccatyaaagaaggatgataggggcctgggatgcccagaagaaggagggatagaatgaaatgatcttggacacacgcaaaagctataaactcacttcatgtgagtacaaaatgggatgcccagccaggtgtggtggctcacacctgtaatcccagcactttgagaggccgagggtgggtggttcacctgaggtcaggagtttgagaccagcctggccaacatgctgaaaccccatctctactaaaaatacaaaaaattagccaggcttggtggcaggcacctgtaatcccaactacttgagaggctgagacaggagaattgcttgaacctgggagacggaggttgcagtgagccaagattgcaccatttcactccagcatgggcaacagagcaagactctgtctcaaaaaaaaaaaaaaaaaaaagaaagaaagaaaaaaaaaaaggggggatgcctttattttttttcccccttagaaaattgtgaacagaaatgctttgtgtttacttttttctttaaatgttttatttattattattatactttaagttttagggtacatgtgcacattgtgcaggttagttacatatgtatacatgtgccatgctggtgtgctgcacccactaactcataagcaaataaagtaaaaaatgccaaatgcagctttaaatcctaagggatttttttctgaggaattttaaaagggattcttctgaggttgtgctgataaagacagggaagggaggaccaatggctgggagcatttaccaggtgttggcacttacaggaagcattttctttaatcctcacaacagcctgggatgcgtcgctggggaggaaaatgcagctaagggagtttgggtaattttctcaagctacgtataacaaagctgggatgcaaaccccaattctgcagtcttcaaagctcacacttcttctaccagccccttatctcccatttccaacagaaccattttctttttttaggggaaaaattccagggccttctgcaaagaaggacactgttttctttctcaaatctatgtcttatgtgggtgcttaggaggccagacag

SEQ ID NO: 718859 - DNA, 1384 bp, Homo sapiens
ttttttttctttaggggaaggataaggaacttctgaatgaagcttaaaactcaagcagccaactgtcaacctatgacacagagaagacatgaatcaaaatctctccgggtcagagcatagcggtggcatttcagggaactaagtttcagtagttccctcacccccccaacaaatttgcatgatttttgttgtgtgccaggccttgtaccatgaattggggatgtaaagataacccagacaagcccctgttccccaagctactaagggagaccaatgcacacacacaaatattagctattgtgctcagggccattaaagaaggatgataggggcctgggatgcccagaagaaggagggatagaatgaaatgatcttggacacacgcaaaagctataaactcacttcatgtgagtacaaaatgggatgcccagccaggtgtggtggctcacacctgtaatcccagcactttgagaggccgagggtgggtggttcacctgaggtcaggagtttgagaccagcctggccaacatgctgaaaccccatctctactaaaaatacaaaaaattagccaggcttggtggcaggcacctgtaatcccaactacttgagaggctgagacaggagaattgcttgaacctgggagacggaggttgcagtgagccaagattgcaccatttcactccagcatgggcaacagagcaagactctgtctcaaaaaaaaaaaaaaaaaaaagaaagaaagaaaaaaaaaaaggggggatgcctttattttttttcccccttagaaaattgtgaacagaaatgctttgtgtttacttttttctttaaatgttttatttattattattatactttaagttttagggtacatgtgcacattgtkcaggttagttacatatgtatacatgtgccatgctggtgtgctgcacccactaactcataagcaaataaagtaaaaaatgccaaatgcagctttaaatcctaagggatttttttctgaggaattttaaaagggattcttctgaggttgtgctgataaagacagggaagggaggaccaatggctgggagcatttaccaggtgttggcacttacaggaagcattttctttaatcctcacaacagcctgggatgcgtcgctggggaggaaaatgcagctaagggagtttgggtaattttctcaagctacgtataacaaagctgggatgcaaaccccaattctgcagtcttcaaagctcacacttcttctaccagccccttatctcccatttccaacagaaccattttctttttttaggggaaaaattccagggccttctgcaaagaaggacactgttttctttctcaaatctatgtcttatgtgggtgcttaggaggccagacag

SEQ ID NO: 718860 - DNA, 1384 bp, Homo sapiens
ttttttttctttaggggaaggataaggaacttctgaatgaagcttaaaactcaagcagccaactgtcaacctatgacacagagaagacatgaatcaaaatctctccgggtcagagcatagcggtggcatttcagggaactaagtttcagtagttccctcacccccccaacaaatttgcatgatttttgttgtgtgccaggccttgtaccatgaattggggatgtaaagataacccagacaagcccctgttccccaagctactaagggagaccaatgcacacacacaaatattagctattgtgctcagggccattaaagaaggatgataggggcctgggatgcccagaagaaggagggatagaatgaaatgatcttggacacacgcaaaagctataaactcacttcatgtgagtacaaaatgggatgcccagccaggtgtggtggctcacacctgtaatcccagcactttgagaggccgagggtgggtggttcacctgaggtcaggagtttgagaccagcctggccaacatgctgaaaccccatctctactaaaaatacaaaaaattagccaggcttggtggcaggcacctgtaatcccaactacttgagaggctgagacaggagaattgcttgaacctgggagacggaggttgcagtgagccaagattgcaccatttcactccagcatgggcaacagagcaagactctgtctcaaaaaaaaaaaaaaaaaaaagaaagaaagaaaaaaaaaaaggggggatgcctttattttttttcccccttagaaaattgtgaacagaaatgctttgtgtttacttttttctttaaatgttttatttattattattatactttaagttttagggtacatgtgcacattgtgcaggttagttacatatgtatacatgtgccatgctggtgtgctgcacccactaactcrtaagcaaataaagtaaaaaatgccaaatgcagctttaaatcctaagggatttttttctgaggaattttaaaagggattcttctgaggttgtgctgataaagacagggaagggaggaccaatggctgggagcatttaccaggtgttggcacttacaggaagcattttctttaatcctcacaacagcctgggatgcgtcgctggggaggaaaatgcagctaagggagtttgggtaattttctcaagctacgtataacaaagctgggatgcaaaccccaattctgcagtcttcaaagctcacacttcttctaccagccccttatctcccatttccaacagaaccattttctttttttaggggaaaaattccagggccttctgcaaagaaggacactgttttctttctcaaatctatgtcttatgtgggtgcttaggaggccagacag

SEQ ID NO: 718861 - DNA, 1048 bp, Homo sapiens
ttttttgttagatcaggctgaatatagaatttttacactgactcattcacctaacactgtattgtgaacattcttcatgttattaaacattgtttgacattacaagtcaacggtcctctgatattccatcactgggacacatactcatctaggcaagtcctttgagttgaacattcagaaggttataaatagtttcctttcagagataatggtgcaattaatgattgcaatgctaatttggatattcttctactcttctaaagattgctatttttaagacatagcagtatctttgggccctgtgtatgaaatttatccaccattgtggctctgctataagccttccctcctttgaccttccccctgtgtctgataacctcacttgagcctcgctgcagaccctcttaagcactcaggatctacaactgccttcacaccacccccacatactccaaaacgtaagtgctgatgtggaccaggcctgaggaggctttggaggaagtctctgaagtcgtggaaggggagatttgaaacctggagcacggctactactctaggtaaagagggagagaattcaaacttgctaacaacctagaacccccactcagaagtggttttcctgaaagctcaactcagaaaaggaaaccctgcaggaaggcacagaagcccagtgggagagctacctgagtgtctgcggtgaggaggactgacattccaaaaggcaacagagccagtgtcagctgctcacttaaattagaatgatagtggccaggtgcagtggctcaggcctgtaatcccagcactttgggaggcygaggtgggtggatcacctgaggtcaggagttcgagaccagcctggccaacatggtgaaaccccgtctctattaaaaatacaaaaattagccaagtgtggtggcacgtgcctgtaattccagctacttgggaggctggggtgggagaatcgcttgaacccaggaggcagaggtttcagtgagccaagattgtaccactgcactccagcctgggtctcaaaaaaaaaaaaaataga

SEQ ID NO: 718862 - DNA, 620 bp, Homo sapiens
agctggtggtacaaaccagcccaagtgcaaaggcccaagaactaagagcaccattgtcagagagcaggaaaagacagatgtcccagctcaaaaagagagagcaaattcaccttccttccaccattttattccrtcctgttccattcctcaacaggttggatgatgagggagatctttatccatctcaagttttttgtgcaaatatggaatacaaatgaaaaatacttaaagcacatcatcattgatttccaacttagactagtttaacttccctttttcttctattctgtcagttccttgagggatcctctctccttgttcatctctgcatctctagtaattagcacagtgccaggcacatggtaatatggctaaaacagtggattattggtctccaacataattaagcccatccaaaagaaaaaccaacctcataaatctgctttgcaaagttcataaacaatggatatgctatgtctcaaaggtgctggccaaaaaaatttaagaacttgggaattatgtgttattttgtttgtttttttcaccaagcctacttttctgtcacaagagcccatatcaacaacacacccatgtatgtccttctttttatctacttttct

SEQ ID NO: 718863 - DNA, 1473 bp, Homo sapiens
tctcacatgtcattaacaaactctctctccttagttctgagtgacaaatcttgggaacagaggttggctggccagtctttttcacgccaccggggcaagttcgctgcaggtcatttagatcagacatgatcaatggagacctaaccctgtgtgttattgttgttctcagagaggagaagggatagtcaaacagttgtcccaattagtatccactacactgtcattttgccaacatatctcaaaaccaagaatcactaaaaccaccaaatatttttcacaaatgtatctactgagccatgtctcccccaggctttccatatatatgtayagttagcttttgggtacatattgcaagatgctacacttatttgtcttatgtttaatttgttagtgacaactaatctctcaagcttctattcaaatgcacttttcccaaggcctgatcaagaaaccccagttcccaatgtgctgacaagaggaaatacattacattaaaataacaacaaattgtcaagctaatgaatatatagagaaaagcattttgtaaaagattctatgtaaaatacataattatgaggtcatacattgtcagtaatattttgcatgctgtgttttatgatagaatgaattgactccgtagaaagaggtaatttaacttaataagcatcaaaaatatgtctcagccagcaagacaattcaagtcaatgacataagaaaaagaaagagacacttttaatatttttctagcacttagaatgttatatatgagatagattttgaaggaagtgtgtgcagaggatactgactgaggcttttaagagaatggttacagcaataaacaaaagataatttttttttttttgagacagagtcttgctctgccacccaggctggagtgcagtggtgcgattttggctcactgcaacctctgccaaccagattcaagcaattctcctgcctcagcctcccgagtagctgggattacaggcgtgtgccaccatgcctggcttcattttgtctttttagtagaaggagtgtttcaccatgttggccaggctggtctcgaactcctgacctcataatctgcccacctcagcctcccaaagtggattttaattgatgagaatttcttgggcatgatgcctgccagttgcctcttttacacatatggacatgaccagaataagtaagccaaatgtttgtgaatctttattggttttcttgtgctactacccagctttcatgcaggataaatgccatggattgtttatgacaaaacttgccttccaaatagttttcgtgagtattttggatttccagaaataacgcaagcctgaaactttagtaactctcattattccttactgaagttgaggaagatagagcccacctagaaaagtgtaggatagagaatacaaataagctaaaaatatgacactgctttaagccaaaattctttgtaaaattgttcaa

SEQ ID NO: 718864 - DNA, 1473 bp, Homo sapiens
tctcacatgtcattaacaaactctctctccttagttctgagtgacaaatcttgggaacagaggttggctggccagtctttttcacgccaccggggcaagttcgctgcaggtcatttagatcagacatgatcaatggagacctaaccctgtgtgttattgttgttctcagagaggagaagggatagtcaaacagttgtcccaattagtatccactacactgtcattttgccaacatatctcaaaaccaagaatcactaaaaccaccaaatatttttcacaaatgtatctactgagccatgtctcccccaggctttccatatatatgtatagttagcttttgggtacatattgcaagatgctacacttatttgtcttatgtttaatttgttagtgacaactaatctctcaagcttctattcaaatgcacttttcccaaggcctgatcaagaaaccccagttcccaatgtgctgacaagaggaaatacattacattaaaataacaacaaattgtcaagctaatgaatatatagagaaaagcattttgtaaaagattctatgtaaaatacataattatgaggtcatacattgtcagtaatattttgcatgctgtgttttatgatagaatgaattgactccgtagaaagaggtaatttaacttaataagcatcaaaaatatgtctcagccagcaagacaattcaagtcaatgacataagaaaaagaaagagacacttttaatatttttctagcacttagaatgttatatatgagatagattttgaaggaagtgtgtgcagaggatactgactgaggcttttaagagaatggttacagcaataaacaaaagataatttttttttttttgagacagagtcttgctctgccacccaggctggagtgcagtggtgcgattttggctcactgcaacctctgccaaccagattcaagcaattctcctgcctcagcctcccgagtagctgggattacaggcgtgtgccaccatgcctggcttcattttgtctttttagtagaaggagtgtttcaccatgttggccaggctggtctcgaactcctgacctcataatctgcccacctcagcctcccaaagtggattttaattgatgagaatttcttgggcatgatgcctgccagttgcctcttttacacatatggacatgaccagaataagtaagccaaatgtttgtgaatctttattggttttcttgtgctactacccagctttcatgcaggataaatgccatggattgtttatgacaaaacttgccttccaaatagttttcgtgagtattttggatttccagaaataacgcaagcctgaaactttagtaactctcattattccttactgaagttgaggaagatagagcccacctagaaaagkgtaggatagagaatacaaataagctaaaaatatgacactgctttaagccaaaattctttgtaaaattgttcaa

SEQ ID NO: 718865 - DNA, 2636 bp, Homo sapiens
taattttaggaatataagtcttaaatgttccaatatttaatgaatatattagactgttgatagcttctgtatattaaaaagctgtccttgtcgacaatttttttttttttcttgagatggaatctccttctgttgcccaggcaggagtgcagtggcacgatctcagttcactgcaatctctgcctcctgggttcaagtgattctcctgcctcagccttctaagtagctgggattacaggagcatgccaccacccccggctaatttttgtatttttagtagagacgagtttcaccatgttggccaggctggtcttgaacttctgacctcaggatgatctgcccgcctcagcctcccaaagtgctgggattacaggcgtgagccactgtgcccagctggcagtcttaaaattggattttttttttcagaaattttagtaaattagaaacagaaaagactatacataaattgacaccctaaaataaagtctaggacactggatatgccatattgcttctggaactaatatttaggggatactcaacataaacctgtaatttttcttcttggatgtcactattatggacattgaaaatgataagcagaggagagtgagaattaaattgtttagcatggcctcttgcggacatctgactctgatattttgtcatgtccaaaagatacataatacaatattttatgctgtgaattgaaaaatgatttataagaaatctcaggaatgaccttctattttctcctattacctttctaaagtctttccctgtcagtaattacactaatagctctgtccagatgcaggaattaaatttctctcttttctcaacaacacagtgctcatttcctatattctgagcatacgttttgagtttttctttttatccaatgatcagttgaaatgacagaagaaatgacgtaggaaatatactagcctgggttttaaattagagatcgattccattgacagaactacaatgctaaaattcttatgcttgaagtgcagagtgggcttactgatcagtcatcattcactacatagacaagggaagcccaacttaaataaccaaaaagtatctgtcattttctctgatgaaatctgtctcaactattaatataatgggactccctctgaaagcctgggaacaaatagacacattttccaaacaggtcggtagttctaatctaataacttctagatttccacatctagttaggatgtagacratatgaaatacctttactcccattgaaacaacaagaaattattgcttaaatatctgtatatgcagaaagacagattgataaatagatatagatgtacatgtagatattcatatacatattttctttaaagcgatctgggcataaagatacctaaaacctaaaggcattgaactcagaggatgggctctttggcaatgaagatggaaaagatagaggaaattttcacactgaagatccactggtgaagttggggatgtgggagaaggtgggggcaagcagtgaactaggcttctggagaacaaaatcttggttttacttcagaggaaacagtcaaacttgtgacaaacctgtgggctaatgtgtcaggttttaatctggaggaagctgaaactcaaagataatgctctctgcaaaataattagtttttaaaaatttgctgaataatcagaggctagggacaagattggaaagcagaaagagctctctgtcttcacagtatcacaattttgatacctggagatgtcaaagtctcttgtttgatcttctcgctgtcactaagtctctcagtccttgactccttaattacaaaggctgttgtcttgcagtctcatagtaacaagatctcacagtctcacagccttccggtcttgaaatcccacaccttgtaatatggaaatctcagcctgttaaacagatggtctcagaatctcaggatctcacaagttcaaggtctaacaggctcaaggtcaagcagttttgagatctagcaatatcatagtgtctggttctaggactctcctgaaggaagagcctaaattcactatcataatgctttgggagctattgtgaccaaatcctgacacaatccaacttacgatatagtcaaaaccatcagccctctggcagcatagaaaatggagactgggctgacaaatacaatgtcttaggcagctactatgaaacatatttcacagaatagcaggaaaatcagtaaacttaaatataggttaatagaagtcaaaactgtagtatagaaagaaaaaaaaggaaaaataatgaaattaggacaggcaaagatttcttaaatgggacacagaaaacagtaatcataaaagaaagaaacagaaaaataggttagacctcatcaaaattagaaaatgttctcaaactacactgttaagaaaatgagttaagccacaaaatgaaaatatttgcgaaacatttatctgtcaactgactcatatccaaatatatataacaattatatgagaaaagcaatccaacaaaaatgggcaaaacattcaagaacaaacttcacaaaaagtagatatgtgaatggccagtaagccaatcataagtaaaaaaaaaatgacagtaccaagtactgaaaaataca

SEQ ID NO: 718866 - DNA, 2636 bp, Homo sapiens
taattttaggaatataagtcttaaatgttccaatatttaatgaatatattagactgttgatagcttctgtatattaaaaagctgtccttgtcgacaatttttttttttttcttgagatggaatctccttctgttgcccaggcaggagtgcagtggcacgatctcagttcactgcaatctctgcctcctgggttcaagtgattctcctgcctcagccttctaagtagctgggattacaggagcatgccaccacccccggctaatttttgtatttttagtagagacgagtttcaccatgttggccaggctggtcttgaacttctgacctcaggatgatctgcccgcctcagcctcccaaagtgctgggattacaggcgtgagccactgtgcccagctggcagtcttaaaattggattttttttttcagaaattttagtaaattagaaacagaaaagactatacataaattgacaccctaaaataaagtctaggacactggatatgccatattgcttctggaactaatatttaggggatactcaacataaacctgtaatttttcttcttggatgtcactattatggacattgaaaatgataagcagaggagagtgagaattaaattgtttagcatggcctcttgcggacatctgactctgatattttgtcatgtccaaaagatacataatacaatattttatgctgtgaattgaaaaatgatttataagaaatctcaggaatgaccttctattttctcctattacctttctaaagtctttccctgtcagtaattacactaatagctctgtccagatgcaggaattaaatttctctcttttctcaacaacacagtgctcatttcctatattctgagcatacgttttgagtttttctttttatccaatgatcagttgaaatgacagaagaaatgacgtaggaaatatactagcctgggttttaaattagagatcgattccattgacagaactacaatgctaaaattcttatgcttgaagtgcagagtgggcttactgatcagtcatcattcactacatagacaagggaagcccaacttaaataaccaaaaagtatctgtcattttctctgatgaaatctgtctcaactattaatataatgggactccctctgaaagcctgggaacaaatagacacattttccaaacaggtcggtagttctaatctaataacttctagatttccacatctagttaggatgtagacaatatgaaatacctttactcccattgaaacaacaagaaattattgcttaaatatctgtatatgcagaaagacagattgataaatagatatagatgtacatgtagatattcatatacatattttctttaaagcgatctgggcataaagatacctaaaacctaaaggcattgaactcagaggatgggctctttggcaatgaagatggaaaagatagaggaaattttcacactgaagatccactggtgaagttggggatgtgggagaaggtgggggcaagcagtgaactaggcttctggagaacaaaatcttggttttacttcagaggaaacagtcaaacttgtgacaaacctgtgggctaatgtgtcaggttttaatctggaggaagctgaaactcaaagataatgctctctgcaaaataattagtttttaaaaatttgctgaataatcagaggctagggacaagattggaaagcagaaagagctctctgtcttcacagtatcacaattttgatacctggagatgtcaaagtctcttgtttgatcttctcgctgtcactaagtctctcagtccttgactccttaattacawaggctgttgtcttgcagtctcatagtaacaagatctcacagtctcacagccttccggtcttgaaatcccacaccttgtaatatggaaatctcagcctgttaaacagatggtctcagaatctcaggatctcacaagttcaaggtctaacaggctcaaggtcaagcagttttgagatctagcaatatcatagtgtctggttctaggactctcctgaaggaagagcctaaattcactatcataatgctttgggagctattgtgaccaaatcctgacacaatccaacttacgatatagtcaaaaccatcagccctctggcagcatagaaaatggagactgggctgacaaatacaatgtcttaggcagctactatgaaacatatttcacagaatagcaggaaaatcagtaaacttaaatataggttaatagaagtcaaaactgtagtatagaaagaaaaaaaaggaaaaataatgaaattaggacaggcaaagatttcttaaatgggacacagaaaacagtaatcataaaagaaagaaacagaaaaataggttagacctcatcaaaattagaaaatgttctcaaactacactgttaagaaaatgagttaagccacaaaatgaaaatatttgcgaaacatttatctgtcaactgactcatatccaaatatatataacaattatatgagaaaagcaatccaacaaaaatgggcaaaacattcaagaacaaacttcacaaaaagtagatatgtgaatggccagtaagccaatcataagtaaaaaaaaaatgacagtaccaagtactgaaaaataca

SEQ ID NO: 718867 - DNA, 2636 bp, Homo sapiens
taattttaggaatataagtcttaaatgttccaatatttaatgaatatattagactgttgatagcttctgtatattaaaaagctgtccttgtcgacaatttttttttttttcttgagatggaatctccttctgttgcccaggcaggagtgcagtggcacgatctcagttcactgcaatctctgcctcctgggttcaagtgattctcctgcctcagccttctaagtagctgggattacaggagcatgccaccacccccggctaatttttgtatttttagtagagacgagtttcaccatgttggccaggctggtcttgaacttctgacctcaggatgatctgcccgcctcagcctcccaaagtgctgggattacaggcgtgagccactgtgcccagctggcagtcttaaaattggattttttttttcagaaattttagtaaattagaaacagaaaagactatacataaattgacaccctaaaataaagtctaggacactggatatgccatattgcttctggaactaatatttaggggatactcaacataaacctgtaatttttcttcttggatgtcactattatggacattgaaaatgataagcagaggagagtgagaattaaattgtttagcatggcctcttgcggacatctgactctgatattttgtcatgtccaaaagatacataatacaatattttatgctgtgaattgaaaaatgatttataagaaatctcaggaatgaccttctattttctcctattacctttctaaagtctttccctgtcagtaattacactaatagctctgtccagatgcaggaattaaatttctctcttttctcaacaacacagtgctcatttcctatattctgagcatacgttttgagtttttctttttatccaatgatcagttgaaatgacagaagaaatgacgtaggaaatatactagcctgggttttaaattagagatcgattccattgacagaactacaatgctaaaattcttatgcttgaagtgcagagtgggcttactgatcagtcatcattcactacatagacaagggaagcccaacttaaataaccaaaaagtatctgtcattttctctgatgaaatctgtctcaactattaatataatgggactccctctgaaagcctgggaacaaatagacacattttccaaacaggtcggtagttctaatctaataacttctagatttccacatctagttaggatgtagacaatatgaaatacctttactcccattgaaacaacaagaaattattgcttaaatatctgtatatgcagaaagacagattgataaatagatatagatgtacatgtagatattcatatacatattttctttaaagcgatctgggcataaagatacctaaaacctaaaggcattgaactcagaggatgggctctttggcaatgaagatggaaaagatagaggaaattttcacactgaagatccactggtgaagttggggatgtgggagaaggtgggggcaagcagtgaactaggcttctggagaacaaaatcttggttttacttcagaggaaacagtcaaacttgtgacaaacctgtgggctaatgtgtcaggttttaatctggaggaagctgaaactcaaagataatgctctctgcaaaataattagtttttaaaaatttgctgaataatcagaggctagggacaagattggaaagcagaaagagctctctgtcttcacagtatcacaattttgatacctggagatgtcaaagtctcttgtttgatcttctcgctgtcactaagtctctcagtccttgactccttaattacaaaggctgttgtcttgcagtctcatagtaacaagatctcacagtctcrcagccttccggtcttgaaatcccacaccttgtaatatggaaatctcagcctgttaaacagatggtctcagaatctcaggatctcacaagttcaaggtctaacaggctcaaggtcaagcagttttgagatctagcaatatcatagtgtctggttctaggactctcctgaaggaagagcctaaattcactatcataatgctttgggagctattgtgaccaaatcctgacacaatccaacttacgatatagtcaaaaccatcagccctctggcagcatagaaaatggagactgggctgacaaatacaatgtcttaggcagctactatgaaacatatttcacagaatagcaggaaaatcagtaaacttaaatataggttaatagaagtcaaaactgtagtatagaaagaaaaaaaaggaaaaataatgaaattaggacaggcaaagatttcttaaatgggacacagaaaacagtaatcataaaagaaagaaacagaaaaataggttagacctcatcaaaattagaaaatgttctcaaactacactgttaagaaaatgagttaagccacaaaatgaaaatatttgcgaaacatttatctgtcaactgactcatatccaaatatatataacaattatatgagaaaagcaatccaacaaaaatgggcaaaacattcaagaacaaacttcacaaaaagtagatatgtgaatggccagtaagccaatcataagtaaaaaaaaaatgacagtaccaagtactgaaaaataca

SEQ ID NO: 718868 - DNA, 813 bp, Homo sapiens
tggccctagatccaaagagtttggaagatgtgttgggaatgatagcttatacagtaaaaccagtgttagactggaggtagggggcaggagtggcattaagaggatgctgataaatctctccttttccatttgaggaaggtagaatttgatagttttcaaattatgttatttgtagtcctaaggttcagaaaattttctggagtttgcttaagggacaatttggaaaatgaactagaccaccctatcctcacagccaaagcagcataagaaaatgtaagatttagaatgttgtcagagggtgtccaagcagaaattgcagtggacaaagttaaacaggcaagaatgactttatgcagcctgctgcaataagagagagggacaactcaattccaccaaaacaaaagttagaggggttttaagcacagggtgagctagtggaaaagtactgagggataaccattgccctcttctaacctattagcaggggggttgatcaatgggatgtgttgagtacattgagttattcctaaattcgctaatgtttttctctgtgattaggccatctgtgtttgctaattgcygctcattgaagttaggcttccaccctcccatggagactcgggagataggggtgtaatgtccgttcatgtttacatttcaaagagatggttcccaggtctttcaaaaaagacattcctgggttgtaaaagtggcaagaggctatttaaaagatttatatctcaaagggacagaaagaatttacaatcacaaagttttctaaagtaaatgctctataaaaatggaggtcaggac

SEQ ID NO: 718869 - DNA, 1500 bp, Homo sapiens
ttagtagctgggattacaggcacctgccaccacacccagctaatttttgtatttttagtggagatggggtttcaccatgttggccaggatggtctccatctcttgacctcgtgatcttcctgcctcggccttccaaagtgctgggattataggtgtaagccaccgagcccggccaaaattagtggttttgagggtgaggaattgaatgaaaaagagctggtggtgaaaatattttgtatcttgattcgggtgggagttataggttatatacatttgtcaaagctcactggactgttcactcacttaaaatatgtacatcatatcatacataaggtacattcaataaagctgatttaaaataaacaagagaagaggaccagtttaagtaatcagaatggatgtgaaaaactttataaagatgcttataatttctaytctataaaatattaattataaccgccgtttgttgtatattcactaatagtcaaagattgtatataattgtcttatacatgctatttcattcaaaacatcacaataaaactataagtttacattaacttgaactatcttgatataacattttttagtcagtccaatgaaaaatatgacatgtataaaattttcatccctaaaatgttctaccatttagctaatagtgttttatctttgcctcatggaatatgtccttcacatttgctgctatgtgattcttatgttaactagcttatgtcttgaaacatttatttcatcaggttggttgctttcagcagaaacactcttaccatattttccattttgttggctatcatatggccttggcctccagagctgactggatcagcactgctgctcgactgtgcagccaatgtctcctctaactctcaataaagctaaatcaaaggataccacctgtgagggaaacagctatgaatacaagactggatgttttgttttgtcttctcctaccgtttatggcaaagtgactaaggatagtgttgaataattttgtttcctctgtttccattctgtaatccactcttctggaagcagaggggagtcgtattgtttttccagtgtctcaatgttccaaaaggattctctttgtcctcaaaccaatatacctttaaaccctgaattttaaatcacacattagcctagaagagttaccatatgctactatcacttttcttgaatgccatatttgaaggtgacttttcatcatgaatatcccacacgaaatggtagcatttgcctttcttttcttcctgtttattaatcacataataaacaaaattagagctatcaaatttctgtgagcaatgaagcaatagcttgacaaataaaaaaacagaataaaacaaatacgtaacaaataaaacaaaaatctgctttcagcacactgataaaatcttaagctctcagccccccaccatttactgtattgatgtaattcatatacatgtggctttataacgaaaagtgtgttagaaatgattg

SEQ ID NO: 718870 - DNA, 633 bp, Homo sapiens
tagcattcatgcttatacatgctacaatatggatgaagcttgaaaccattatgctaagtaaaagaaaacagttacaaaagactgcatatgatgtgtatcatttatatgagatggtcacaacaggcaactatgtagaagtggaaagtagattagcggtagtgtgaattgggatgttgacatggaaagaggagtaactactaatgagtatggaatttatttctgtaataattaaaatgttctgatatagtggttttgattcygcaactctgtaaatatactaaaacccatcaaattgtacactttaatcagatgaaatttgttgtttggaagtcgaatcctgatagagctgtttaaaagagataggtaggatatagaaacatgattttgactctgtaatcaatattatcaaatatacttgcccttaactaaagaatcctatgtgacctgtctcctacatacctcgtctatgaaaacatccctgtgtttattttgcttactttgttccagtcatgttggcctgtataacaataagcttcatcctaacttaagggctttgtgttagattttcactagaactttgtaaaatttagggcttagttctgagctttaacctcagaaagtctgccttttact

SEQ ID NO: 718871 - DNA, 612 bp, Homo sapiens
tttgatgtggaataaggtgtttgcaactaacaggctttgttcctgggagatttttttttttttttttttttttttggkggtggagcggctatgctcagctcactgctcggaggcttcatactcttaggaacctgtattgagctccagctgtcttctctggctccttgatatttagagtccaccactctttgtgactaatgtgtcacagcttcagaagagtgttagtggatatggggtttctgcctgtctttgggcattcacctcagtgacaggaacaaagcagctaagaggggagtaggctgtatctgctggagactgtgtgtgctgttgcactaaagtcttatttgtggcccctcatgaagttctaattgttcagagtgtgggaggatacactgctcaccacacagtgttagcagaaaagcaggggtgaggctttctggttctctacccaccagagctttatctacagtagaagttgctgagggtggcagaggcatactgcattcccacttgctggtggggcaagcaaagccaaacccacctttgcagacatatgccaggaaagtaatatggagagttgccgtggtatcaggggaagctgcagtatgagga

SEQ ID NO: 718872 - DNA, 1459 bp, Homo sapiens
tgaataaatgaatccagtgcaaactagaaaagccaattagctgaacccagctcacatttctaaccaacagaattttaaggtaaataaatggttacttcttaaaccactatgttttggggtgatgtgttatacagcaaatctaactaatacaccattccaagaagagatgtttgaaaaacaagcttcaacatccaacatggatgatcctgggtgtgggaagaggatttctgggtgaaggatgattactgagattagagcaaagaaactctgaaggtrgggtgcggctcatcacttcatgagcctctacatagcattttgcttcagttgtagtaatcagcagaaggggctaaatttctatggtttccttacatttgttaaatagctacaatgaacaacttattgtgattttaccaagagataaaggccaaattctgtgatctccagcaaaatggtttcttccagttcaacaatgtttcacatgtgttagaacttgcccaaagacaaacctgactgaaggcctctgagtctctcatattgagactactttccctgttttttagatttaatggcaacaatttctgggaaatatctgagggcctagaattgcctttgggaactggtctaaaaagactcaactgcattcatctttacttaaatcttcttctgtggattcccccaagagaatgaaatttagtttgacaagagtgtgcttcacaaggccatttgttaaagcaatttatttcagtcatttaagttacaatttaaaaagaaccatcataagccttcacaaccttttataggtgacagaccacacaaattatagcacattgtccctgtttctttaaaaagcaaattactctggacccatagagaatgctaggtttaatgttcagtaacaggacttgggcataaactagaccagctgacatctgcaaagcaggcaccggttaggctgggaggaaagagaagaaattcacttacacttagaagtcttccttgtggtggggagaaaggaaagtttggggtaaagttttaaatgtagcaaacgctcaagagaagatgcttagggtggacaaaaagaacataagaacatgtaggatgaggtataattattggaacaaaagtcagttcagacagaagctctgggttgacatttactcctctataagattaatgagaggaaaaaatgggtagctagacgaagaggtaaaactcttactcttttagtcctcaataaagggtgctaaatccccttacccatggcagtgtttagggctttgcccccctctctctgatgcttacttttcaaaggcaataaactgacaaaagctgccatttccaagtacctgtaactgcccagccctctctaatcctggccctttcaggacaggaagagctggggctaatggctcttgtataaaagcagtttgatggaaggaaagaaacaacaagggagctc

SEQ ID NO: 718873 - DNA, 598 bp, Homo sapiens
aaacagtacagtagagattccatttgggataatttttcctgaaacctacttgtttttcatgctgattctacagttaaggggcctggtcttaacatgtgttgaagcaaaagagtgagaagagctgagggagacatcagagactttccaaatgacagaattgcaaatcttctgggcagtcctcccctgaggaaggggtagcttatactttgaatgcatcttgaggagtattctccacacctgaggaataaattaaggctaatacggttggctcagctcttgacaaattgaattccatgctgggactgaggcagcagagggctttttacatctacctccaccaccaccaccctgcctaagtcatctcggagaatcctctttctatctcagtattgggcctacattcttatacttcagcccttttccataatgacccctccagattgccacactctagaaccactacatagaaggcggcgctactgctgtgtggacacttcatctcaaagtgaggggtcggctcacatgatcgcaggsctcctctctctggccttctaaaacattctccgggttgaggctaaaactgctcccccaaagcccc

SEQ ID NO: 718874 - DNA, 1101 bp, Homo sapiens
ggtgacaatattctgattctggtatagattgttcttacatagttatgagtgtccttaaggcaagagaccttcaaatcagtaaatacttctaaaaacatttttgtagctggagaggttagaaaagtgacactggcagcaagatggtggactgaaatttcaggcrtgcattcccccacagagacacagagataacaacactatatggaccagactacctttctgagaactccagtgaccaattgagaagctaccacacccaggccaacacagcgccaataagggagtccagagaaaggggcactgccacttctatcttgatgtcttgggctaagggaaactcagccactatattgtcaggacactcaagcagacctgtggaggggtttaggtggaaaggaactgagaccctctaccaatagacatgtgactgggacatcttgaaaggacatcctccaacccagttaagccttcaagtgacttcagccctgactgatatctgattgcaaactcaggagagttcttaagccagaaccatacagccaagttgctctcgaatttctgacccacagaaaccatgagagataatacaattatttatccaagctactaaattatagggtaatttgttatacagcatgagataacagttgtggctccacccttattatctaatcacctcccagatactccaccttcaaatgccatcacattgggtattcaatttcaatgtctgaattcaggaggggaacaaacattcagccaatagcaccgtataatcagcacaggcaatgtgcttaatataaaaacattaagaaaaaaagagattttctgtgttttgtgattcactcattgatttaacaaaatatgttaagtgaaagtgtacataaataccacaataaaagttaagatgaatattttataatgctttataaaataaatatatagcttagtaaaacttttatatttccttacaaattgcctccacatatttattttcactaattctcatcacatttaaaaaagaattgtattaattgcttaatctgattatggtctaacagttgttcaaaaccaattcattttattttgtgtttgtattta

SEQ ID NO: 718875 - DNA, 1101 bp, Homo sapiens
ggtgacaatattctgattctggtatagattgttcttacatagttatgagtgtccttaaggcaagagaccttcaaatcagtaaatacttctaaaaacatttttgtagctggagaggttagaaaagtgacactggcagcaagatggtggactgaaatttcaggcgtgcattcccccacagagacacagagataacaacactatatggaccagactacctttctgagaactccagtgaccaattgagaagctaccacacccaggccaacacagcgccaataagggagtccagagaaaggggcactgccacttctatcttgatgtcttgggctaagggaaactcagccactatattgtcaggacactcaagcagacctgtggaggggtttaggtggaaaggaactgagaccctctaccaatagacatgtgactgggacatcttgaaaggacatcctccaacccagttaagccttcaagtgacttcagccctgactgatatctgattgcaaactcaggagagttcttaagccagaaccatacagccaagttgctctcgaatttctgacccacagaaaccatgagagataatacaattatttatccaagctactaaattatagggtaatttgttatacagcatgagataacagttgtggctccacccttattatctaatcacctcccagatactccaccttcaaatgccatcacattgggtattcaatttcaatgtctgaattcaggaggggaacaaacattcagccaatagcaccgtataatcagcacaggcaatgtgcttaatataaaaacattaagaaaaaaagagattttctgtgttttgtgattcactcattgatttaacaaaatatgttaagtgaaagtgtacataaataccacaataaaagttaagatgaatattttataatgctttataaaataaatatatagcttartaaaacttttatatttccttacaaattgcctccacatatttattttcactaattctcatcacatttaaaaaagaattgtattaattgcttaatctgattatggtctaacagttgttcaaaaccaattcattttattttgtgtttgtattta

SEQ ID NO: 718876 - DNA, 1487 bp, Homo sapiens
aaccaagaggggatgagaatttcagtagagccagacctcataacatgtccaggtggctcagtcattgcagtcctgatttaaagactaccatccaatatattaataattcaagttagacatctaatgtagacatttttttttctgccaggatgaaaatttggcaaggtcatgaaataaaatgggtgaagtttctgttagaactttctaaaatactactattgaccaagaaaaatgtaaaacaaacaaaaagactaaaaccaattattttaattttgaaatattgtcaacagaaataaatgaccaaaaatgtttttaattaatcaaattatacactaggcagattattattatagctttagatttttatcatattaaattataatacatgtataacctttacaagttagtgtggaagaaggcataggaaataaaataatttttcaaacctaaggtttttctctattaactttaagtctgaagtgctgaaatacagatttaaatacacttaatcagatataacatagtagtatttgaaatataaaaataagaaagaaaagcactggataatgaatactccataaaaaatttattcttttgagattggttcctttgtttcaatgtttgctatcgaaaggcatgtttgcaaatattggtaataaagtagaaaactcaatgcataaagttctgctcttgtgcagttcactgtttagtgaggaacagtgctaaataaaaaagcaaaaagataaccaaaggcatgcattgtaaatcagatgatagttaccagagtggatactggagcaaggcccaggamcacagtcagagcaaaatccctgaggtgggagatgataatgtcataggagaacacaaacaaataaacacacaaacaaaatctcccactgtgaagaatatttggaaactgctagattaaacactaagtttgttcctttgttgtaggatctcttgcaacttttgagattctaatatatattttaacgcttcatcagaagagaggcatagagtaatgtactcacttctcataatgatcagtttttcttgatcatcttacaaggcacattttcttcttaggaggagaatcttcctagtggctctcagctagtaattggtctctcgccaaagaaagggaggcgaatgagtttctcatgtagaggaggcaaagagtggattataaaatgcaggtgaaattacatggaactgagtttaagtcacagattgtacaataggaagtgattaaaaaagaaaaaagaaaaaatattaattctgctctcacaggtactggataagaggctagactgtttaatatttattacatgggtagtaggacaaattcaataacaatgaaaataaaaaattctaacttgttatattcttggtactaggagctataggttgataaaaattgcaccttttcttcccctcttgtgtacagaaataattgagagataagtcacagaagtcagaaagcatgg

SEQ ID NO: 718877 - DNA, 772 bp, Homo sapiens
tgcacacttaaataaaattgtttctactgaaagatgtttaaaataaattattccacgaacaatgtaaaaatacgttagatgtctggattatgcaaacatatatttccagttaaaggtcaaagcatcttggataagatgctgagggctttagaaaatttagtttttataaattatttcctcagagttaaaaacaaaacaaaacaaacaaagcaactcagtgctagacactagctttttgcatttcctttttatcagcctgccatcatcttcaagtgtcaacgtggtgaggattgacatgttttgtttcaattgccagtgggtcaagaaagtgaagtcagctattgtgtcaagaaaatctacacacagaatctgcactcctacaaagttatttttgaaatggctgcgttattacgattttagaaacaagattacatgtgtttaaaaagactaacccaccatcagtttattcagtgatccctgaacctcccatggcttggtctcctcrtagaaaccaggggaatgggctagttcctttatcttctcctcctctgaccccacatggcactgatccacttgcatgggactgagaactgggccactgatcctcagcactttattggactgcctaatggacagactgtacctcaccatttcagcttaaggctctgggcattactctccctagtttcaattatttagccagattgattggttggttggttggtttgtttatttatttatttatgtctgttcacctcaatattgttggtca

SEQ ID NO: 718878 - DNA, 772 bp, Homo sapiens
tgcacacttaaataaaattgtttctactgaaagatgtttaaaataaattattccacgaacaatgtaaaaatacgttagatgtctggattatgcaaacatatatttccagttaaaggtcaaagcatcttggataagatgctgagggctttagaaaatttagtttttataaattatttcctcagagttaaaaacaaaacaaaacaaacaaagcaactcagtgctagacactagctttttgcatttcctttttatcagcctgccatcatcttcaagtgtcaacgtggtgaggattgacatgttttgtttcaattgccagtgggtcaagaaagtgaagtcagctattgtgtcaagaaaatctacacacagaatctgcactcctacaaagttatttttgaaatggctgcgttattacgattttagaaacaagattacatgtgtttaaaaagactaacccaccatcagtttattcagtgatccctgaacctcccatggcttggtctcctcatagaaaccaggggaatgggctagttcctttatcttctcctcctctgaccccacatggcactgatccacttgcatgggactgagaactgggccactgatcctcagcactttattggactgcctaatggacagactgtacctcaccatttcagcttaaggctctgggcattaytctccctagtttcaattatttagccagattgattggttggttggttggtttgtttatttatttatttatgtctgttcacctcaatattgttggtca

SEQ ID NO: 718879 - DNA, 588 bp, Homo sapiens
gtctcacttgtgcttctatagtcagttggcagatctactggaggctggactcatctgggacagtcgggatgacagggactctttctataccatagtctatagacttgggattcttcgagcttagagggcttacagaaaaattgtatgagggcaaatctaaatgtactatattggccaatgttctagagtcaatgtggaagtggaattcatggaataayggataaagggaggcaatttcattgggaataattagtaaaattggaaaaaaacctgccagccacgcgataccgggatttaaatatttcacatgagtatatgattaatgagacaaattgcaataattttacattgatatggtatttataattaaaatctaatatcacactcagcagaatggaaaatagttgtatattttgaaaaatttagagtaagccaattacccttcttatattagctaacataactttttgatcttcaagtattcactttctgaaaataatggcaagatgaattgttttaataattcttaaaaacttatttatttattttccagctttattggggtacaggtggtatataaacattgca

SEQ ID NO: 718880 - DNA, 1751 bp, Homo sapiens
cctagtatatgctaggaactattctaagctctttatctcttgctgtccaatacattccctatccagaatctagtcatctttttaatgtgaagttttttgtgtgtgtttttgttttgttttgtttttgagacacagctttgctctattgcccagactggagtgcagctgtgcaaccttggctcactgcaacctccacctcccgcactcaagcaattctcatgcctcagcctcccaagtagcttggattacaggtgtgtgccaccacacccagctaatttttgtattttttagtatagatggggttttgccatgttggccaagctggtctcaaactcctggtctcaagtgagccacctgccgcagcctcccaaactgctgggattacaagcatgagctactgtgccctgccagaagccagtcatctttttaaaaaatctgtggaatacaacatgacagataaagttcctgctgccattcagcttaacatcctaatgcagtgagcagacaagacacaagaatgaatgcaaaaaatcatttcagatagtaagaaggactatggaaaagacaaaaacaaaaaaaaactaagaggggaaatgtaatagagtatctagaagaggaaacaacattacatgggatgatcagggaaggcttttctagagaggtggccattcaagctgaaatctaaattatacacacacaaaaagccattctgtaaaaaattgggataagagcttttgggcagtggaacttaaaaaaaagaaatagccatagtttttgcatacttgaggaatagaaagctttgcatgagcttaacatatttgtagaaaggggccagtgtgactgaatagagatcaaagggaacatagtaggagttgaagtcagagtgatagtcaagggccagatcatgtaaggtcatataggccacgctaaggagtttggattttattgtggatattatgtatatccatgattagagggttttaggcatggaagtggcattatctgatttacattttttaaagattactggttctgggtagagaatgtattggacagcaagagatgaagttgagggatgaattctaggaggctattgcagtaatccaggctagggagaatggtggttagattaaagtgatagaaatgtagatcaagagaagtggaccagtttaagatatattttggagatagagccaacagaacttctgatggattgaatatagaagggacagaagaatcaaaaacgattcataggtttttgaccttagtaactgaccgtggtgaacaatggagaaaaactattctgaacatgttaaacttgaaatgcctattagatattcagggggaaatttcagtaggcaattcaatacagaygatatacatctatagcttgcatggggggaaaggtagataagagatagagacatgaatttggaaatttttatcatataaatgggatttaaagtcataggattgatgaattacctcggagaaaagtattcagagggaagaaaagacccagaataaatccttggtggtacttcaatatttataggtcaaacagagtaggagaacccagcaaagactgagctgaattggtaaaggcagtaggaaattctagagaaaaaataaataaaatggcagcaagataatatgcacaaatattttctcagctcttgtgtatgtaaataattctattggtaatacaagagaagtacttgatatcaagaaccttatgattttggaaggga

SEQ ID NO: 718881 - DNA, 591 bp, Homo sapiens
agctggagtagggtcagcttcagattatgtagggaaagaatggacacctgaaataaaatcagggtatgatttagaagaggaaaatacatgctgaggagatagctaacaatttccgctacagcctgcttgatactttagttactgtattccaatacagtcataaccaaacattttcatttcccctccaatgtcttctaaatttcaaagtatttatccattccaaaaaagcacttcattctttccatccaacaagtatccatgatggggcaactcataaattttatcatttggttggtggaaagtgtacatcttatcaccctaatctttacttatgtttaaattttgatcttatgtgataggaactttagaactcagcccatttatttatttatttttttgagacagggtctcattcggtcacccaggctggagtgcagtgatgcaatcacagctcactgcattctctatctcttgggctcaagtgactctcccgcctcamctcctgagttgctagaaccacaggcatgcaccaccactcctggctaatttttttatttttgtagagacaaggtctcgccatgttgcccaggc

SEQ ID NO: 718882 - DNA, 2248 bp, Homo sapiens
gtataacacctagttattggggcactaccccaaaagcaaacttatatttctgtggcaaaatgatagactgtttacactagtaggatagggttacaattcaggtagtattgccaccaaataagtttgctccaagattaccaaaaaaaaaaaaacagaaaacaaaacttgttttttaaggcatttagatttcagaatctcagataaggggtcgtagacttgtatatcagtttggaatgctttcattgcacgtaacaaaaaacacatcccagtgccttaaacataagggcttttagtgtttactaaaccagttgtcaaaggtctcaaatttgataggtccttgtcgtcaaacctatgattttatataattccgtcctcccttccttaatgtgcagcctttcttcatcatgtctgtcaccttatagtcacaagatggctgcagcatctccagcttctcattattacatcggtcttataaagagggaggaaagagaaaggataaaaaggctttctcttagagaagccctgtcttatattgagaaggaagctctccatcatgcttccccttatgtataattgtccaaaacagggatacctgggtttctcagcctcagtactattgatgttttgggctggataattctttgttgtggggaactgtcccttccattatagaatgttttaacagcatcccgggcctctacccactaaatgccgatagcgttcctccaattgtgataaccaaacatgacttcatccccagttgagaaccactaccttaggccagaggaaaagattatctggactggtgtagatcaatcatgattcatcccccgggcctggggaaggggggaagggaactttccttcctaaactcaaaagattttcacaggctacaaaatctggattctgttagcaggatgttaccaacccaaatggctgttgggtaatccaccagtatcagtcacacgaagaaaacagctcggatcaataaaaccaaaggtggtagaggccaggcatggtggctctcacctataatcccaacactttgggagatcaaagtgggaggattgtttgagcccaggaggtcaaggctgcagtgagctgtgttcatgccagtgtactccatcctgggcaacacagtgagatcctgtctgaaaaaaataaaaattaatataaataaataaaaacaaaggtggctctttgtgggagaagtaggggcagggactaataaagtagatgagataagtctcaagcaagaactgaacaagaaaataaaaaggggaaaaaagtgacacacaaaaaaattaaggattaaaagagagatttaattacaaatgcaatatagatatttaaaatcataagaagcttctaatccgttttagtgtctgatcttaggatttataacttatttcttgtgactaaagaaaacttcttgaaaagtgctaatttagtattgttttcactccaccttgttgcaatgttttcttttaggctgattccattaaaaatggtgtccagcttctttccagagcctatactattgatcctagcaaccctatggtattgaaccatttggcaaatcactttttcttcaaaaaggtagaagtcatttatttttaaattctgatttttgtttttctgtactgcaattgatattttatttcttttttaaacttggaaagaaatttgaaaatgtcagattttttcccccctccaaattatagagtttgttgtattagttacctgggggtacctacatttgtttattcatttatttgcttaatatttattgacccctatatactgtacccaacactgtggtagtgatgtgaagattagtaaaacatggtgtctgtactcaaggagttcaatttcatagaaaragcagccatgtaaacaaatgtaagtgtaaaaataaaggtatctactcatttatggtagagaaatgaggaagtggtcagatggcttaggtgaattttcaccaaggctgcagagcttttgaactaggtttttaggaagaggtcactagagagttgaaaagggaaagacacacaaatctatgaaatagtgtataatatacttatggtaggcaatgctttggattcagatagtggagcatttttgtaataccagaatttggacatgctatgtagggaacaaggagtcactgacatttttattttgcatgttaatcatgttgtattttttaagttgccactaattctgtagaagcagtggtattttaggt

SEQ ID NO: 718883 - DNA, 657 bp, Homo sapiens
cactcgatgtgacaaaatgcttcacttttcagcctcagtatccctatctataaaataaggttgtttatgatccttttaacattctgggggctttctagattattttattcatttatttatttatgtatttatttttgagacggagtcttgctctgatgcccaggctggagttgagtggtatgagcttggctcactgcaacctccacctaactgggttcaagccattctcctgcctcagcctcccgagtagctgggattacaggcgctggtcaccatacctggctaatttctgtatttttagtagagacagggtttctccatgcaggccaggccggttttgaactcctgacctcaggcgatccgcccagctcggcctcacaaagtgccgggattgcagacgtgagccaccgtgcccagccmaaatgattttaaatacagtgtctctacctcaactgcatttttaacttgaggtgtttctagtaattgaaaatcttgtctgctattttaagcctaatttcttatagatacagatatatttgcttacgaaatatatttatttgggccaggtgtggtggctcgtgccagtaatcctagcactttgggaggctgaggtaggaggattactcgaggccaggggttcaagaccagcctgggcaa

SEQ ID NO: 718884 - DNA, 606 bp, Homo sapiens
aagcactatagtccagttggtaaagctgtttctcatggggaagtgttaatagctctgaaactatagatgtgcactggggttgaacaaatgaatggacgatgggtggcaagacataggttcctcactgctgcaggggagcttacagatcagcacgaggtgagagggtgtgggggtggaatggcccatacagaccatatcagagttgtagacatgagtgtgaacttacatttggctcgacacagrtagtaatggctggatatagaaataatttcagatattgggccgggcgcggtggctcacacctgtaatcccagccctttgggaggccgaggcgggtggatcatgaggtcaggatatcaagaacatcctggctaacatggtgaaaccccgtctctactaaaaaatacaaaaaaaattagccgggcatagtggcgggcacctgtagtcccagctactcaggagggtgaggcaggagaatggggtgaacccaggaggtgaagcttgcagtgagccgagatcgtgccactgcactccagtctgggcgacagagcgagactctgtcacaaaaaaataaaaagaaaaaacaaaaaaaaaaaagaaaagaaa

SEQ ID NO: 718885 - DNA, 606 bp, Homo sapiens
aagcactatagtccagttggtaaagctgtttctcatggggaagtgttaatagctctgaaactatagatgtgcactggggttgaacaaatgaatggacgatgggtggcaagacataggttcctcactgctgcaggggagcttacagatcagcacgaggtgagagggtgtgggggtggaatggcccatacagaccatatcagagttgtagacatgagtgtgaacttacatttggctcgacacagatagtaatggctggatatagaaataatttcagatattgggccgggcgyggtggctcacacctgtaatcccagccctttgggaggccgaggcgggtggatcatgaggtcaggatatcaagaacatcctggctaacatggtgaaaccccgtctctactaaaaaatacaaaaaaaattagccgggcatagtggcgggcacctgtagtcccagctactcaggagggtgaggcaggagaatggggtgaacccaggaggtgaagcttgcagtgagccgagatcgtgccactgcactccagtctgggcgacagagcgagactctgtcacaaaaaaataaaaagaaaaaacaaaaaaaaaaaagaaaagaaa

SEQ ID NO: 718886 - DNA, 606 bp, Homo sapiens
aagcactatagtccagttggtaaagctgtttctcatggggaagtgttaatagctctgaaactatagatgtgcactggggttgaacaaatgaatggacgatgggtggcaagacataggttcctcactgctgcaggggagcttacagatcagcacgaggtgagagggtgtgggggtggaatggcccatacagaccatatcagagttgtagacatgagtgtgaacttacatttggctcgacacagatagtaatggctggatatagaaataatttcagatattgggccgggcgcggtggctcacacctgtaatcccagccctttgggaggccgaggcrggtggatcatgaggtcaggatatcaagaacatcctggctaacatggtgaaaccccgtctctactaaaaaatacaaaaaaaattagccgggcatagtggcgggcacctgtagtcccagctactcaggagggtgaggcaggagaatggggtgaacccaggaggtgaagcttgcagtgagccgagatcgtgccactgcactccagtctgggcgacagagcgagactctgtcacaaaaaaataaaaagaaaaaacaaaaaaaaaaaagaaaagaaa

SEQ ID NO: 718887 - DNA, 616 bp, Homo sapiens
tgaaagaacaaatgaacgaatgaaagaaagagaaaggaaagaaagaaagaaagaaagaaagaagaaagaaaagaaaaaacagagagacagagaaagaaagaaagtgtcaccaaatcaccatttattttatgcaaaaggctggtaatttttgtagccagtgttcacgagtggcttccagctccagttccacttcaacatcagaaacccgcatttgcaagtgcaggtgagtcttgtatctggctctgtcaacgaaagccagaagsctttgctgacactgtcattggaaagaaatccaaactctacaggtttcctcagtggctcacttctgagcttccacctgggtgcatttgattagctgagtctagatagtgtgcttgtgacctgacagcaagggacaatggaaaattcgggagtggtttatgttgtgaggcaaacgcattatgggggaatctttccaaatttaggatttctgtttaaaagatcaatcccactataagctccatttcttcctaggcagcatgatgtcctgcctcactcaattgctaaacttctactttggtgactacaaagtgacactaacccctccctacagcctttttctaaatttcaggcccac

SEQ ID NO: 718888 - DNA, 616 bp, Homo sapiens
tgaaagaacaaatgaacgaatgaaagaaagagaaaggaaagaaagaaagaaagaaagaaagaagaaagaaaagaaaaaacagagagacagagaaagaaagaaagtgtcaccaaatcaccatttattttatgcaaaaggctggtaatttttgtagccagtgttcacgagtggcttccagctccagttccacttcaacatcagaaacccgcatttgcaagtgcaggtgagtcttgtatctggctctgtcaacgaaagccagaagccttkgctgacactgtcattggaaagaaatccaaactctacaggtttcctcagtggctcacttctgagcttccacctgggtgcatttgattagctgagtctagatagtgtgcttgtgacctgacagcaagggacaatggaaaattcgggagtggtttatgttgtgaggcaaacgcattatgggggaatctttccaaatttaggatttctgtttaaaagatcaatcccactataagctccatttcttcctaggcagcatgatgtcctgcctcactcaattgctaaacttctactttggtgactacaaagtgacactaacccctccctacagcctttttctaaatttcaggcccac

SEQ ID NO: 718889 - DNA, 1302 bp, Homo sapiens
gtgcttagtttgccactcttatctaatctttttaacatccttttttgttgttaagaacaaaaaagcttttctagtgactaaatttcacatgcaaaaatctttgtttgcaaaataaattacactaaaaattctgtaacaaaatattcctaggaccttcatggttcattctctaataacttgaaataatggcttgatgccccattgtatgcagaatttttcattcctaaacaattgatactctctccattcattttttaatatagcattctacctctggcaattgtcagtgtcactcaaatctttctttcttcttttctctagtcttgtttctctgcctctcattacccagtttaaaacaaaacaaaacaaaaaacccacagctctcatccattgatttcctgaacaatactcacacaagaccattttgtgtaaaatacgattactcaagatgtgagggtaatagataagaggatattatgctatattaagcacagctaaaagcctaacattaactattacaactctgtatttacaaattatttatctctttgcaaaagctttgcttagtttctggctacatctgtgtgcctttcccactccaaacctccaccctcccattttgcctgacaacctactgttgaggaccctttcttaaactaactactaattttgtcatttaaaaaattcctactacaagtcatttttggacaaatgaagtgaacttttattactgaagctaatatttgaagtgagtaatcatttctggtctttcatggtgctggcaaaactacattttccatcttgttctttaagatgttttaattataatagggtatctagtataatattacttttttaaatgtggttttcccttagtttctggctctaaccctgcttctctggagtgctgttgacctgatataaggcatagaagtcagctaccctaattgagaaggtagttgtgaataagtaatttgggaataagagaaaaatcaaaggaagaaactgagtcatccttcaaaaagtaaacacctaaccttaaaggagaggacaaaaacaaagtctcaaaaactagcaagaggtagtcagtcacaaagcggtaaaaatattccagcagaactgaaagtcaatctcctttgaaaagaaaagtttgcaaatgaaagttcaaagatgcacagaagcttgaggcaagtctattttcagaggtttctaactttcatgcaaagtcaaagggaggaaaaattttatctacatgaatacatttatgtatagatgtccataaaccactakgtataaagtata

SEQ ID NO: 718890 - DNA, 1010 bp, Homo sapiens
accgckcccggcctgaaaaaaatgttataagtgtttcaatgtatgaagcttttttccctctctgtgcctaaaattatttctttaggttagttccttagtttgtcaggagtagaattacggggtaaaagaatattgtgtattagtccattctcatactgctataaggacatacccgagactggataatttataaaggaaagaggtttaattgacttacagttccgcagggctggggaggcttcaggaaacttacagtcatggaaggggaaaaaaacaagtccttcttcacagggcagcaggagagagaagaatgagagctgagcaaagggggaagccccttataaaatcatcagatctcgtgagaacttactatcacgagaatagcatgggggaaactgcccccacgattaaatcacctcccaccaggtccctctcaccacatgcggggattatgggacctacaattcaagatgagatttgggtggggacacagcaaaaccattatcaattgtaaagcttttttttttttttttttttttgagacagggtcttgctttgtctcccgggctagaatgcagtggtgtgatctcagctcactgcagcctcaactgcctggactcaagtgatcctcccacctcagcctcctgagtagctgggactacagtcatgtgccaccatgcccagctaatttttatagagacgaggtctcactatgttgcccaggctggtcttgaactcctggactcaagagtttctgcctccttgacctcacaaggtgctagggttataggcatgagccaccactcctggatagcattttaaagctcttgataagctacactctaaattccttaaggaaatggcctgtggtttcctgagaacatatctctcttcctgctgtagaatggcttcttctgctcagctagaaactcctctgccaccagaaagaagctgcaccttcctccctctctctggctggaaatttttaaataacgggggagggatctgat

SEQ ID NO: 718891 - DNA, 1010 bp, Homo sapiens
accgctcccggcctgaaaaaaatgttataagtgtttcaatgtatgaagcttttttccctctctgtgcctaaaattatttctttaggttagttccttagtttgtcaggagtagaattacrgggtaaaagaatattgtgtattagtccattctcatactgctataaggacatacccgagactggataatttataaaggaaagaggtttaattgacttacagttccgcagggctggggaggcttcaggaaacttacagtcatggaaggggaaaaaaacaagtccttcttcacagggcagcaggagagagaagaatgagagctgagcaaagggggaagccccttataaaatcatcagatctcgtgagaacttactatcacgagaatagcatgggggaaactgcccccacgattaaatcacctcccaccaggtccctctcaccacatgcggggattatgggacctacaattcaagatgagatttgggtggggacacagcaaaaccattatcaattgtaaagcttttttttttttttttttttttgagacagggtcttgctttgtctcccgggctagaatgcagtggtgtgatctcagctcactgcagcctcaactgcctggactcaagtgatcctcccacctcagcctcctgagtagctgggactacagtcatgtgccaccatgcccagctaatttttatagagacgaggtctcactatgttgcccaggctggtcttgaactcctggactcaagagtttctgcctccttgacctcacaaggtgctagggttataggcatgagccaccactcctggatagcattttaaagctcttgataagctacactctaaattccttaaggaaatggcctgtggtttcctgagaacatatctctcttcctgctgtagaatggcttcttctgctcagctagaaactcctctgccaccagaaagaagctgcaccttcctccctctctctggctggaaatttttaaataacgggggagggatctgat

SEQ ID NO: 718892 - DNA, 3340 bp, Homo sapiens
cgtgctcgaggtgtgcgacgactacgaccgcgagcgcaacgagtacttcttcgaccggcactcggaggccttcggcttcatcctgctctacgtgcgcggccacggcaagctgcgcttcgcgccgcggatgtgcgagctctccttctacaacgagatgatctactggggcctggagggcgcgcacctcgagtactgctgccagcgccgcctcgacgaccgcatgtccgacacctacaccttctactcggccgacgagccgggcgtgctgggccgcgacgaggcgcgccccggcgcgcgaggcggctccctccaggcgctggctggagcgcatgcggcggaccttcgaggagcccacgtcgtcgctggccgcgcagatcctggctagcgtgtcggtggtgttcgtgatcgtgtccatggtggtgctgtgcgccagcacgttgcccgactggcgcaacgcagccgccgacaaccgcagcctggatgaccggagcaggtactccgccggccctgggagggagccctccgggtaggacgcactgcttctctacccgtcccgtccgtcctgtcgcgtctgtccgtcccgtccatacgtcccgtctccgtcctgtccgcctccgggcgaccgagccagcggggtgcgcgcccagcgaggcccaggcgcggccaactacgggaccggtcggtccccactcctaccccgttgtccggggcaccagcggggtctggcccttacactagacgcacctcttgagggcgaaatcctcaggcatggggaggggcgtgtagagatagacaaatgtcccctctttgtagtttacttttgcgcagagagcaacctgctaattacatttttctgaacttttattgttagggttcaacaattaagccttgaactaagcgcagtttgaattatttgccaatttttggtagtgtttggaaagatggattcttgttatggtgaaatgtgcactctccacacattctatacactctgcccccggcatactatgtgctgtaatggaatcgttatattataaagcaggttaatttatcgatagactctaaataatggatgtctgtgcccttttcttcccccttttcctacaaagtatggagttagcaaacctcttgtccaccgtttggtagcaaagattcacactgcgactttcagagggtctatgatatgggaagggaaaaaaccattaccttgagaacaaagaaaaatctaaactgtcctaaatccagaaaacagtatttgggtaaatttttttttctactttactaggatgaatgggaaaatattgcagtcttttcttagactgtcttaccttgaagtggtgatagcactttcctgtttttagtacaagtgagcatattcagtgggaggaataagcagactaaggatggactttcaaagaagacagccttttggggcacaaaacccaaactgcatattatagtttatctgtttgacactgtcttaagatcctccttccattcattttttaaatttaaggttgtgccctgtcatgttttactgataggcatgtacatgttcggaacggcggccttgctattgcagtggattacttctacataatattyttcctgtagggagtaaggatttttatataaatctaagaagtaaataaaattgtctagtgccacggagtctattatttcttcttggcttgaaatcgaagatacatgctttgaaaggaaattcattaggaaactcattttgtttagtgaattaggttctaacagttttgaatttacagataagagttacttatttggttctccaacaatacaatgaaattaatttatttacctaaatacataaatgccttttttttttaaggagggctttaggaaaatggacttggaattttgattctccagtaactgtagaattctaaggttagtgaaggtttgagctacattagcaaaggaaacaggagaattgaattattattagtgcagataatgagggagttgactgaaccagtatatgagcaaaaccagtaaaatacctcaaatataatcttagggggagggagggtgttttgggagagggaaagggccatatggagatcattaatgtaaagcatttgtaaagaaatgagagaaatgcatagtaattttagggagagaaacacaagaaacaaaaaagggaagacagagatggaaaagagggagactgcaaaagaagtgaagggagaaaagtaatgcttatttgtgtatatgtattttatgtatgtgtataattattcaagtcagagctgtttcctagatacttagatatttcaggcaaaagcatgtttttcttagcttaatggcccagttttagcttcactgtctgagtgtaggtatatgaaaaccaatatctgcaatcccaaacagataaactgcaggatggccgaatgaggatgctgctcattacagaggaagctcccctctgcccttcaacagagagggcccttaacctgtcactttaagtatagtcgttaaaaccctgcttgcttgtggttgctgaaattagtctttctaaaacatcattctcattatttgaccatattttgcatctgccaaataaagccaaaacttctttcttggccttcaaggctctttacagtttgatgacaacctgccgatcttgacttactccatcatagtttgcaaacatcttttgaatatctgttatgttcaaggcactgctggtgttccaaatattgtaactttctgttgtaaagaaaagttggtgtcaagttggtggtgtaggaatcagaggcacaattgatctctgagagttccgttgttcagagaaggccttcagggtggtggaggatggaaacaaaccatggttggaaggttgcagaggttgtgcactgcccaaactagcagggagtgtcatttattttattttattttattttttgcatttttagtagagatggggtttctccatgttggtcagactggtctcgaactcctgacctcaggtgatccacccgtgtcggccttccaaagtgctaggactacaggcgtgagccaccgcgcctggccagggagtgtcatttatataaattctagttaatgcaacctgtacaaccatatgtgccctgcctgggaacaaaataaaagagattttttaagataaaaggaacatcgtgggcaagaaacttgtatatgaagtttatggaagcgtgagtccagtgatggagtgagaggtggatagagagcagatgacagaaggccttgaattccagggagaataattttattttgcaggcagtggctagccattagccagttttgtgtttagggtaaatgggtt

SEQ ID NO: 718893 - DNA, 1565 bp, Homo sapiens
gccaactggctccataggtcacacctcccagtctcatataaataaagaatgagatactggaaagcataccagctgaaccaaactgagtgccaaaaacatgcatattaatgaggcactataatagatacttgactctttggaagtgcctatattggtttccagctacagagggaaagaaagttcacaatgtacctttaaacacaccatactgtgcaccataaaatacagctctttctatgaaatatggaatcaamttatactgatgtgatttcagattcagtcattaactccataacatcctctgacactccatcaacattgaaacattctggaaagatccccaccccctgctcccatgtgcctttgcaagtctcaacttggtaactagggagaggaagtccttcaacagtgccgttcttttatgtgttctgtttagaccttggatcaggatgaatggtagctcagatgaatgcatttgtgccatttttcttggccccagactatgtttcctcactaccatgacatctgaacagaaggagaaaacatctcccttttgtagcaggctaatttaatttgtaccttccacctaggggtaaatatgtttgtctgtctgtctgagctttttgcccactttcttttctcacgggaaacccttctgagtagaaagcaggaaattgcttactgctctaactttattttaaagtaatttaattttaagccttctcacatccaccctaaagtgaagcaactgttggaaccccctcgggatacccttaatgacttctgcatgtctcctgtgtcacagatgtcaaaggcttgttgtttccaaggtgttttatcttttggtataggtggtttaaaagacactgctttgggctgttttacccgcagaagatgtgcatttgttttaaaataatgaagaaaaaaattcttgcagcttttacattgacccacatcctttcaaatccacatttcaagtcattgatctttactagatttttagttgatcttgggcattatttgtggcttgaccttgtttgatgtggagaatttgtcaaagatctaaataagcaaccaacaaacacatctttccctaagtaaaatagcagtaaaaatgtctaagtatttgatgtaagtattgttactatgtcttaaggtatacaagatatggtgaacctcaaattaaaattatggctagtagcaaaataatctacttattcataaagtttaaatagggccaaatttcttatttacattaaatggatttatcaaaatgcattctgtttctcttaattcttgtaatagtttttaaagcattttaagggaaaaattgcttcttttttcttatgtttgtgagtacacatttaaattgaattcccttttatggtacttatatctctctaataaatattaaacttcttttaatattcagttcacaattaataattacacattacaagaaataagacttatgcttgacattgcattataagcacaattatttgtttagaagagaaaaataatttttctaaagttattttattaatttctatttaatataaaag

SEQ ID NO: 718894 - DNA, 767 bp, Homo sapiens
tatggggcaacctctctttattgctatagattataatggcaggaataatcatgttggccaatatatcagcagttccttaaaggcagggtgataaagagcatgatgacattagcaatgataataacagccacaatagctatccktaaagattactttgcaaaattttattttttaaattattttattataaatgaatgtcatctcatttaatgcccacaagcacttcagaattaaattctactgttattattctcagcttccagactaggaaattgcagcagagaaagtttatttagccaaaggggcatagcttataaatagaggaggctagattaaactaaggttcaagttccaagcccaacacgtgacactgggctgcacgtgagacaacaccagtaatttttaaaagtctggccaactgaccaatctttttagtacttaatagaaaaaattcagttgccttcaaagacggaacgagtcctcagaattactgctggcacatagaggtccctctaggaaatacgaatggaccaatttgcaaaaggcattccattccttctggctgtgtgtcctcacgcacccctgcctcactggaatggagtagcatctttatttctttgttctcacatgtagagcatatgcttaaggaataactttattaaattcacggagtcaacaaatcctcttccatatagctttgctaaagatacaaagtcaataacagagaaaatataaagagaattatagacaagtgaagtggctatttt

SEQ ID NO: 718895 - DNA, 2131 bp, Homo sapiens
tcccctctggaccagactatagctctaatgggtgcatcacagatgtccctgaccccagcccgtggcctttctatgactctctcatgtggcttttcttaattcttccgtgagttttcccactcactggccttatcctctgcttgcctgtgcctggctcacgggttcaaggccaaatccaagcatcacctccttcacaaagttctttcccttctgaatttcaacacaaattatgtgcatcacccatttggyttttagcacgttattcatattttcttttaaaaatgtgtttagggctggacgcagtggcccacgcctgtaatcctagcactttgggaggctgaagcaggtgatcacctgaggtcaggagttcaagaccagcctggccaacatggcaaaaccctgtctctactaaaaatacaaaaattagctggatgtggtggcagacgcctgtaatcccagctactcaggaggctgagggaggagaattacttgaaccctggaggtggaggttgcagtgagccgagatcacaccattgccctccagcctgggtgacagagcgagactccgtctcaaaaaaaaaaaaaaatgtgtttagggccaggaatagcaagctcatgcctgtaatcccgatactttgtgaggctgaggagggaggattgcttgagcccaggggtgtgagaccagcctgggcaacgtagggaaacactgtctctacaaaaaaattaaaagaaaagcaactagccaggcataatgttgtatgcctgtggtcccagctacttgggggacctgatgtgggaagatcacttgagcatgggatgtcaaggctgcagtgagccatgattgctccactgcactccaacctgggcaaaagagtgggaccttctctttaaaaaaaaagtgtttatgttcctccactatcccctgaacccttgctgacagggccgcaaagacagaaacagtgtcaggccctgggggctgaatgtgtggggagttttatgaggcagggtaaagacagaaggggcctttaggggagaataacaaagaggacgactccactcacttcacgggagctcagggatggctctgcacaccatcccatttgtgctaaattccacccagagtggtatttatgagtcccattcccaagggactcatatcatctggttcgtatatttaggccattttctctggtgtatgaactgtccagagagagtaggagatggtggagcaggaagccctttggataactggccacctgtccttgttttcccgcaggccctgttctgttgtcagccaggttctgaggctaaacagaggcaaacccattgctgcagagctcatccctggccagtgctctgggtttataaaatgcctgaactgctgtcgttcattggttccagtggtcagaccagcctactggtaaatggatatagtttatttttcagtgcctgaacaaaagtgtcttccctgtggacctctccagggcctggaattattttattagtctcttctttgagtcaaattaagtattaagagtatgtatgccatcattagaggtgatcgacatcttggtccaattcagtttattgcattaaccagcaggcaaggttggagtgaccctccctccctttaccctttctccttctccttcctccccctctcctttctcctcttgcagcatctgttcacaggcacactttggtaaggttggggaagtggtgctgcagaggtgtggatctgcttcagggagccttctggaagttcaggcccagagtggagagcagtgagggaagtgctggagtggcctggggctgcaggaagacactgggcttcttggctgagcacaaactttcacaacagctcctatggtagcctgagtgatggccaccgaagacatgcatgcttgaatccctggaacttgtgaatgttaccttatgtggcaagggggactctgcagatacaactaagttaaggaccttgggatggagagattttcctggtgggcctcaaatgtggttgtcagtgtctttataagagggaggcagatggagctttaacacagatgaggagacaaaatgaccacagaggcagagatgggagtaatgaggtcatgagccgaggattcttggc

SEQ ID NO: 718896 - DNA, 2131 bp, Homo sapiens
tcccctctggaccagactatagctctaatgggtgcatcacagatgtccctgaccccagcccgtggcctttctatgactctctcatgtggcttttcttaattcttccgtgagttttcccactcactggccttatcctctgcttgcctgtgcctggctcacgggttcaaggccaaatccaagcatcacctccttcacaaagttctttcccttctgaatttcaacacaaattatgtgcatcacccatttggtttttagcacgttattcatattttcttttaaaaatgtgtttagggctggacgcagtggcccacgcctgtaatcctagcactttgggaggctgaagcaggtgatcacctgaggtcaggagttcaagaccagcctggccaacatggcaaaaccctgtctctactaaaaatacaaaaattagctggatgtggtggcagacgcctgtaatcccagctactcaggaggctgagggaggagaattacttgaaccctggaggtggaggttgcagtgagccgagatcacaccattgccctccagcctgggtgacagagygagactccgtctcaaaaaaaaaaaaaaatgtgtttagggccaggaatagcaagctcatgcctgtaatcccgatactttgtgaggctgaggagggaggattgcttgagcccaggggtgtgagaccagcctgggcaacgtagggaaacactgtctctacaaaaaaattaaaagaaaagcaactagccaggcataatgttgtatgcctgtggtcccagctacttgggggacctgatgtgggaagatcacttgagcatgggatgtcaaggctgcagtgagccatgattgctccactgcactccaacctgggcaaaagagtgggaccttctctttaaaaaaaaagtgtttatgttcctccactatcccctgaacccttgctgacagggccgcaaagacagaaacagtgtcaggccctgggggctgaatgtgtggggagttttatgaggcagggtaaagacagaaggggcctttaggggagaataacaaagaggacgactccactcacttcacgggagctcagggatggctctgcacaccatcccatttgtgctaaattccacccagagtggtatttatgagtcccattcccaagggactcatatcatctggttcgtatatttaggccattttctctggtgtatgaactgtccagagagagtaggagatggtggagcaggaagccctttggataactggccacctgtccttgttttcccgcaggccctgttctgttgtcagccaggttctgaggctaaacagaggcaaacccattgctgcagagctcatccctggccagtgctctgggtttataaaatgcctgaactgctgtcgttcattggttccagtggtcagaccagcctactggtaaatggatatagtttatttttcagtgcctgaacaaaagtgtcttccctgtggacctctccagggcctggaattattttattagtctcttctttgagtcaaattaagtattaagagtatgtatgccatcattagaggtgatcgacatcttggtccaattcagtttattgcattaaccagcaggcaaggttggagtgaccctccctccctttaccctttctccttctccttcctccccctctcctttctcctcttgcagcatctgttcacaggcacactttggtaaggttggggaagtggtgctgcagaggtgtggatctgcttcagggagccttctggaagttcaggcccagagtggagagcagtgagggaagtgctggagtggcctggggctgcaggaagacactgggcttcttggctgagcacaaactttcacaacagctcctatggtagcctgagtgatggccaccgaagacatgcatgcttgaatccctggaacttgtgaatgttaccttatgtggcaagggggactctgcagatacaactaagttaaggaccttgggatggagagattttcctggtgggcctcaaatgtggttgtcagtgtctttataagagggaggcagatggagctttaacacagatgaggagacaaaatgaccacagaggcagagatgggagtaatgaggtcatgagccgaggattcttggc

SEQ ID NO: 718897 - DNA, 1294 bp, Homo sapiens
tgcttcccaccaagacatcaaaaggggctgcccataatattgaagaatggctcagatgctgagctgccaaaaatgaatgacaaatgcttaccatagacagtaacaatgacagtcaagccgctggaagcctagtgtctattctaggaggcgggagacagatgggcctttctgttcactacagtggaggaaccaggtctgattcatcatcgttttctagttctgaggagaaggtaggtgtgcagtaagtttttcctgggtgaatgaatggttagacactgctgatgaagagggatgctgtcctttatgcagggtgctgatgctctccatgccattctgtttcatggatgctgtcactgggagtaggatatcacgtgtcaggctgaagacacccactgtcacatggtcttcaccggcctccattttggggagaagggaattgtttaagccacactggctctgttttctcaatctccaaaaagggtactgaggactggtttttaagtgtattctcttgtaagatgaaaaacaataatttccacattaagaaaaaaatccaatgagactgaaaattcaggacacctggtggaaacttgaagctttttacaagagccactattcaggcccaaaagggtcacacaggaaagcatatgccattctggatttttgtttctggatattttattsttttgctctcttacaccactccagcactgcacactctttaaaaataaaataatttttaagagagctggttgtgtacgtttatagataggagagaggagtttggataagtagccaattctgactgattttgatttcctaagtctgatttccataattagaaaaggggaacgcagtcacagatgatgtcatctgttggaaccactgaagaatgaagacagttgggttgctgcctttgttcattctggcttttgccaagtgtggaagtggaacagcagcttgggatcatggttggcaaggcacctgaatgtcagagcttgttttgcaggaccttgaaggcaattccttttaaaggcaccaggtctctatcctattttgtgtcagttttttttccctccttcctaaatagatcatttctagctgtagatatcacaaatgcaatttacacttcattcagacatctgagacaccgtatgctaactaacaacagaagttggagtaaaaaaagcagggaagtgaaaaacacaagccttctttggctcaccagtacacccactaaatctcatccagcaaaactgttttacattgagaccagcttgcctaatggtgatgc

SEQ ID NO: 718898 - DNA, 655 bp, Homo sapiens
ttatacatttttaagattcttgctggattgacagactttaaaatgttaatttgtgtttctttcactgccagatgtttgcacttttccatgtgtttattggcccccatggctctttcctgagtggcctgaccagccctctcccccagtctcctgggccccatagtagagggagcagaagaggrtgggaaggagccccagctgggaggagacaggaaggaaaaaccagcctttgtttgaacctgaaccctcgtcccaggctggctaccagtcctcctgttccaggtgggcattctgagcacacagctgtctctgatttctattttgtgtctggaattgtggcaggaggtgaggaaaaatgaagaggtagccagagaatagtcaaggtccttttcctttctatggacagagccaaagtgagacttgtgagcacattggaaaggctactcacttggtgatccttcaaagtgatctttttttttttttttttttttttgagacagagtttcaccctgtcatccaggctggagtgcagtggcacaatcgtggctcactgcaacctctgcctcccaggttcaagcagttctcctgtctcagcctcctgagtagctgggattacaggtacacagcaccacacccagctaacttttgtattttt

SEQ ID NO: 718899 - DNA, 608 bp, Homo sapiens
aggagtggtcatcacactgtaytgttaatcagtagaaatggcccgtgtctgctttgtttcatggaatatctgcctcagagcagggcttggcttaggtaatactagtaggatgagtgttcgatttgttgaattccaaggacctaaccaccttctgattttaggatgacattttagtccttgatttccctctggttcttgttccaaaccctgacgttctgcctgcagaccctgcattctcagcctccaggcagctccaccctgctgcctgctctagggaagtctgtatctggagcttcaaagggcttgttctctattagctgggagggcttcagcacattcgtcaaatcagggcggactattacactatccagactcctcaggcaagttttgtttaccctgggatctcctccaagatataagcttatggcttcaaacactttttatggtctccagatttgaacagactcagattttcccccttcatcttccaatccttccctaagattttcccccttcgtttgttcatgcttttttacaaatgcttttccacgtgtgacttccctgcagaaaactggctccatcacttatacctggtgctgagattagtc

SEQ ID NO: 718900 - DNA, 1558 bp, Homo sapiens
cctcccccaaagcaagcaaagaggggtccaagagaacctcgggtttagggagatccttgcaaggagagacaaactctcattttatggacagaagcttgttgagtggtgaaaacatttcagcccgcatagtgctactaccagagttgcgaatgccaaaggtcttgggagagcttgccatgtgtcccctggagtctgggggcatgatgactggcacctggctctcgagagctgtgaaagcaggagccaggtggagccaggaggcagggtaagaagagagagggcagctgggtagcaagatgccatttgaaagtgtcaaaaggcaaattacaacacgtttagtttaaagatctacttggcttttattagtgaatctagaagtgggcaacatctcattcaataaaatacaatgagtgttctgatgagctgagcagaagaggttaactttatggacagaaaagggctgaagagagcagaaatggggaacaaaaagtggattggttagcatcaggttactttcggttactttccttggaaggattaaagcagaggggacttccttgtcatgtcggctaaaactggcctgtttggggatttggctgtaatctctcctggtttctcagaaggtcagataaacagcaacatttggtgatgtggaactttagcgggagtgtttccattttggtctgatctgttggagcctagtaccggagctcagcccaaatcaatggcctcctataagttttacttaacaaaaagttaagggcgagtgggtttccatggcccagtgacagccagaggtattaaagagagatacctgttggggcataagtgtctagcagacaggaactcagagatagagggcataggacccaaggcaagaagtccctgtgctgggagaagatacctcaaagtcccatcaatatgccctaaaaagagttaggcttagagtgcacaggacaccaaacactcaggcaaagccacaaactgcacatggtgctctctgccccttccctctcattcctcctcatctgctcagtcctggggaatcctgaagggtgagaggggaaggggaaggggattaagasggggagagggctgtgagaagattaaatgacagaaggaggctgggcacggtggctcatgcctgtaatttcagcactttgggaggccaaggcaggtggatcacctgaggttgggagttcgagaccagcctggccaacatggagaaaccccatctctactaaaattacaaaattagccaggtgtggtggtgcatgcctgtaatcccaactacttgggaggctgaggcaggagaacccaggaggcagaggttgcggtgagccaagatcatgccattgcactccagcctgggcaacaagagcaaacctccatctcaaaaaaaaaaaaaaaaaaaatgacagaacacgtcacgctgccttctccattgaacatcagactgagctggatagagagaataaacttaaattggatatgagatttaagttgggtttagactggacctttatttatttgttttatttatttatttatttattta

SEQ ID NO: 718901 - DNA, 1558 bp, Homo sapiens
cctcccccaaagcaagcaaagaggggtccaagagaacctcgggtttagggagatccttgcaaggagagacaaactctcattttatggacagaagcttgttgagtggtgaaaacatttcagcccgcatagtgctactaccagagttgcgaatgccaaaggtcttgggagagcttgccatgtgtcccctggagtctgggggcatgatgactggcacctggctctcgagagctgtgaaagcaggagccaggtggagccaggaggcagggtaagaagagagagggcagctgggtagcaagatgccatttgaaagtgtcaaaaggcaaattacaacacgtttagtttaaagatctacttggcttttattagtgaatctagaagtgggcaacatctcattcaataaaatacaatgagtgttctgatgagctgagcagaagaggttaactttatggacagaaaagggctgaagagagcagaaatggggaacaaaaagtggattggttagcatcaggttactttcggttactttccttggaaggattaaagcagaggggacttccttgtcatgtcggctaaaactggcctgtttggggatttggctgtaatctctcctggtttctcagaaggtcagataaacagcaacatttggtgatgtggaactttagcgggagtgtttccattttggtctgatctgttggagcctagtaccggagctcagcccaaatcaatggcctcctataagttttacttaacaaaaagttaagggcgagtgggtttccatggcccagtgacagccagaggtattaaagagagatacctgttggggcataagtgtctagcagacaggaactcagagatagagggcataggacccaaggcaagaagtccctgtgctgggagaagatacctcaaagtcccatcaatatgccctaaaaagagttaggcttagagtgcacaggacaccaaacactcaggcaaagccacaaactgcacatggtgctctctgccccttccctctcattcctcctcatctgctcagtcctggggaatcctgaagggtgagaggggaaggggaaggggattaagacggggagagggctgtgagaagattaaatgacagaaggaggctgggcacggtggctcaygcctgtaatttcagcactttgggaggccaaggcaggtggatcacctgaggttgggagttcgagaccagcctggccaacatggagaaaccccatctctactaaaattacaaaattagccaggtgtggtggtgcatgcctgtaatcccaactacttgggaggctgaggcaggagaacccaggaggcagaggttgcggtgagccaagatcatgccattgcactccagcctgggcaacaagagcaaacctccatctcaaaaaaaaaaaaaaaaaaaatgacagaacacgtcacgctgccttctccattgaacatcagactgagctggatagagagaataaacttaaattggatatgagatttaagttgggtttagactggacctttatttatttgttttatttatttatttatttattta

SEQ ID NO: 718902 - DNA, 834 bp, Homo sapiens
tccctgcctttgcttccaccctccatcccaaatcaaccctccacttagcagagtagtcttgctaaaaatatgaatgcaattgccatttctctctgtaaaaccctctgataacagcattttacttaaaatgagtccaaatacattaccctagttatattggtgtgaattttttgatatgctggagatacatgaagagaggattaattataactaattgggttttaaatcaatatccaaatgactaaggaggataaactttacaaattagttttccttaagctctttaagttccaattgtagagctgtttatattatcaacgcagctaacaaaataaaaacaatcaccttctgataattattattttattaatattagactagctcaagccttagcttgactaaacttccttaaattatgtatatcatttgcaaatttatttaattaaatttccttgagagtgttagctacatttatacaattagtggtctatattaactaaatatttccaatagctgactgggcaagtgtaagatcatagtractttccaagcattgacaattctgtgcctaatactaggaggagaaaactatggcacccaggtcagacccacctgctgcctgtgtttgtacataaagttttattggaacaccagcacactcaattgtttacatattctctatgactgcttttgtgttacaatgcagagttgagtagttgcaacagaaaccatataaccaaaaagtgtttaatgtctgacccttgagagaaaaagattgctaacctctggtctaagatttaaaaaaaaaaaaaaaaatatatatatatatatata

SEQ ID NO: 718903 - DNA, 629 bp, Homo sapiens
tgccaataaataatatcagtgatggtggactttcttttattctttaatatttaaaggggaattctcctattgttcctgccacatggttccacaaagacatttttggaggtaaattttgttgttgaattaattccttccttagttactgatctgttatcttccatcctgagtcagacactgttctctgttctgcttctgccctcttttcacattccacttcacgctttggggaatagaagcagcccagcctcagagtccctcatacactcaaggacgcttttaactccaagtgcaaacrtctgcctgcaggccactgctccagcctccctcttacagcaccgccagccaggggacactcactgcctggcagtgctgagctttactggtgctaccccgatgtcttcctccccttccacccactccctgtcttggagaccactgcatgtgcacagtcttgttggtgtttgggttggggcagtgatcctgaagtgcatgctttatgctataggtttcaagccactattgaaagttttaaaatgcacagatgaatgagaaaagtagtagttggggagaatacattttcagtggcatgcaggagggtatgtagaaagagatgccagcacaaatgc

SEQ ID NO: 718904 - DNA, 634 bp, Homo sapiens
tacgcaccaccacgcccgactatttttatttcatttgttgtagagatggggatctccctatattaaagaggccagtctagaacccctggcctcaagcgatcctcccaccacagactcccaaagtgctaggactgcaggcatgagccaccaagcctggcctatagaagtaacttgactcctttctagtttaagtgggggaaaagcagaccgggcacagtggctcacatttgtaatcccagcactttgggaggccaaggcgggcagatcgcctgagatcaagagttcgagaccagcctgaccaacatggagaaaccccacctctactaaaaatacaaaattagctgggtgtcgtggtgtgtgcctgtaaccccagcttttcaggaggctgagacaggagaatcatttgaaccccggaggcagaggttgcagtgagctgagatcgtgccattgcactccagcctgggcaacaagattgaaactccatctcaaaaaaaaaaaagkagggaaaaagtaaattgtttgcaaacttaagcactgtagcttttatcagtacaaataaattacagtacatctcagcactgatgaagacataccaacattgtggtggagaatgtccagcctcatggaggagctg

SEQ ID NO: 718905 - DNA, 634 bp, Homo sapiens
tacgcaccaccacgcccgactatttttatttcatttgttgtagagatggggatctccctatattaaagaggccagtctagaacccctggcctcaagcgatcctcccaccacagactcccaaagtgctaggactgcaggcatgagccaccaagcctggcctatagaagtaacttgactcctttctagtttaagtgggggaaaagcagaccgggcacagtggctcacatttgtaatcccagcactttgggaggccaaggcgggcagatcgcctgagatcaagagttcgagaccagcctgaccaacatggagaaaccccacctctactaaaaatacaaaattagctgggtgtcgtggtgtgtgcctgtaaccccagcttttcaggaggctgagacaggagaatcatttgaaccccggaggcagaggttgcagtgagctgagatcgtgccattgcactccagcctgggcaacaagattgaaactccatctcaaaaaaaaaaaaggagggaaaaagtaaattgtttgcaaacttaagcactgtagcttttatcagtacaaataaattacagtacatctcagcactgatgaagacatacsaacattgtggtggagaatgtccagcctcatggaggagctg

SEQ ID NO: 718906 - DNA, 657 bp, Homo sapiens
aaattagccaggcgtggtggcacacacctgtaatcccagctactcaggaggctgaggcaggagaaccgcttgagcctgggagacagaggttacagtgagccgagatcatgccaatgcactccagcctgggccaacagagcgagactctgtctcaaaaaaaagaaaaaaaagaaattaaggaagcttatagggatcatcttgtttttgccccttctctcaaagataagagtcctatgctgactactgtccaatggttgaaaacagttttttttttatatcttttgtccaattttctagttgtttggggccatccaggtctagttctagaaactctctcatggctgtcagtagaaatccatgcctactttttaaagtatttttgtatccgttattggatttcagccttataagaaccccatgaggcaattgcaagtgaagaaatatatagccaatcaaggacacagaataattaggactactataatagtaataataataataactaatatttattgagtatttactacatgacaggcaatatattaagtacattacatacgtaaattcatgtcaccatcacaacagcattgaggtagatattttytgcagaaaaggaaacttaaacacagagaagctgaataacttgcctaatattgc

SEQ ID NO: 718907 - DNA, 643 bp, Homo sapiens
tctttgctatgccccaaaattctttattggtaagaactgctgaaaaccttttatattcaatttccaattccttaagttattctgcagaaaattgattggtccatatatggttttgtagacaaaggaatgatgagcaagtttcacatagcagagcttgtttagaaatattgtgaaacattctgagcgcaaaatacaacaagaatatttcctacctgtactraaacgatattaacttataacctgcaattagacccagtagtgaaggcataacctaattgttttacagcagtagaagcaacaatcaaattagtagagttctcgtctgagctagttttagagaatgaacttttctcgtatgatccacgtgttgtggaaaagtctgattgaactagttaaactcagtatcttttggcaagtagactaacatcttatgaaaactttattttgtcttctaatatctatctaaaacattgcaacttacttacccctgctactcagcttcctctgcaggattcaggtgaagactgcattgtggtgtgtgaatgtgtaatagtatcaaaattagtgaccccctgtcttgatttacaagatactgcattgaagaattgttagttaataccttctgttgatgggttttatgcca

SEQ ID NO: 718908 - DNA, 602 bp, Homo sapiens
tggctctgtatgtcaggtggaaccaggtcaggagtatttgaaactgctcctgggtcattgtgacatatccttcacatctttttgagaaactttataagacaatgggggtgaatgggggctgggcagttggagtctctgagcagaagaggggcaaaatttatttggcaggcagtgtggaggacagattaggagcatataaacccagaggtgtgccccaggagggcttttgcaaaggtcaaaatgagatagaatgagggcctgaaataattcagtaatttggagatggagaagaggaaagacttctctgcwcttgcactgccatcagcctggtctgggccatggtcatctctgacccggaagactgaccccacctcttggctcatcctctgcctcccaacctcctcttcacaaagaagccagagggatacttttaacacataacccagatcacatgacttcgtaacttaaacctcttcactggcttcccaaagacttaaaatgaattctgatgcctttattttattgctttacatgaacagggccctgcgaacctctccagtgtcattccactccatcctcctttcagtgcacgatgctccagc

SEQ ID NO: 718909 - DNA, 602 bp, Homo sapiens
tggctctgtatgtcaggtggaaccaggtcaggagtatttgaaactgctcctgggtcattgtgacatatccttcacatctttttgagaaactttataagacaatgggggtgaatgggggctgggcagttggagtctctgagcagaagaggggcaaaatttatttggcaggcagtgtggaggacagattaggagcatataaacccagaggtgtgccccaggagggcttttgcaaaggtcaaaatgagatagaatgagggcctgaaataattcagtaatttggagatggagaagaggaaagacttctctgcacttgcactgccatcagcctggtctgggccatggtcatctctgacccggaagactgaccccacctcttggctcaycctctgcctcccaacctcctcttcacaaagaagccagagggatacttttaacacataacccagatcacatgacttcgtaacttaaacctcttcactggcttcccaaagacttaaaatgaattctgatgcctttattttattgctttacatgaacagggccctgcgaacctctccagtgtcattccactccatcctcctttcagtgcacgatgctccagc

SEQ ID NO: 718910 - DNA, 602 bp, Homo sapiens
tggctctgtatgtcaggtggaaccaggtcaggagtatttgaaactgctcctgggtcattgtgacatatccttcacatctttttgagaaactttataagacaatgggggtgaatgggggctgggcagttggagtctctgagcagaagaggggcaaaatttatttggcaggcagtgtggaggacagattaggagcatataaacccagaggtgtgccccaggagggcttttgcaaaggtcaaaatgagatagaatgagggcctgaaataattcagtaatttggagatggagaagaggaaagacttctctgcacttgcactgccatcagcctggtctgggccatggtcatctctgacccggaagactgaccccacctcttggctcatcctctgcctcccaacctcctcttcacaaagaagccagagggatacttttaacacayaacccagatcacatgacttcgtaacttaaacctcttcactggcttcccaaagacttaaaatgaattctgatgcctttattttattgctttacatgaacagggccctgcgaacctctccagtgtcattccactccatcctcctttcagtgcacgatgctccagc

SEQ ID NO: 718911 - DNA, 1259 bp, Homo sapiens
attattatttctaacaacagcatattcttcatagtttttatgtattgctggtccatattgttaatggttattaacattcaagagctacattaattaacccatgtaaatggttttaaaaaattgtatgattaggtcgggcgcggtggctcacgcttgtaatcccagcacttgggaggccgaggcaggcagatcacaaggtcaggagatcgagaccgtcctggctaacacggtgaaaccctgtctctactaaaaatacaaaaaaaaagccaggcctggtggcgggcgcctgtagtcccagctactcaggaggctgaggcmggagaatggcgtgaacccaggaggcggaacttgcactgagccgagatcacgccattgcactccagcctgggcgacagagtgagactccatctcaaaaaaaaaaaaaaaaaagtaattggatgattaatacagtaaagggttccttatacaagaagcttgatttatttactgatgatagtgtttcgtgtatatgattaatttttcataagagaccaatccctattatgtgcacttaaaaattttatactgactagaccaaatccctgtaactttttttaaaaagcatttatttcattggagagccttatctttaaggcactttcttatgttctgtatctgagttttagagggttaaaatacattgtacctctttgccccttttgcagccagttgagaaatgcaaaaatcagataaattgaggttgaaataccagcttttttattgagtaaacattgttttgaaggagatgatggtttttgttttggtttgttttttctgcatccttctgcaagaaggagatagttttgatatggaaccatagtgtgcttcttagtacataacctccgaattgacttacccacacaggcagtgcaggactactactggcagctccttaggatgtgtcagaaagcattgatatggaccttctttgcaaatatgcagatacactgagcaaagcacatccatttagttgtctcaaggagcttctccaacgaaatggggagtgatgaagggtagagaaaaaccaagagtgcagttaccctagctgaacttctcctcttcaaaactataagcaaggaaataaaagttcacttctgagtaatgctttagattatattgagactttctttcaatttttactcttaaatgaatctcaacctttaaataaatgtatatatattacatttacatgtctttaaaaatagactctctgtgaagaa

SEQ ID NO: 718912 - DNA, 600 bp, Homo sapiens
tcccaccttggtctcccaaagtgctaggattacaggaccaccacacccagccaagaaaaccctttttaactgtcctgcaaatatagtcagccctccacacaatgggtttgcatccatcgatttgaccaatgggttacatcagagacttgagcattcacagattttggatatgattttggtatccatgggaggttctggaatagatctctcaaagttacccagggacctgtatttgaaagatcttaraagaaccttatcaatatcaatatcaaaacctttgacttaattgcccagccagcagccaggaaaaaggggccttatagattatcccatctcaggcttttgtcccagaagttctgctttcagatggactccaagtgaaagggccaaagaggactagttctaggctaactctgatagaagccacaacagaagctgtgaggctgaggctcccaagtatccagagatttaaaaaaaaaagtaacaaaggctactttcaaccacgataacacaagttttgagataagaatttgtatgcctcacagggttttctgtaaaatcaaaatgaacagattgtggaaaggttttgaaatgtgaaag

SEQ ID NO: 718913 - DNA, 580 bp, Homo sapiens
gatttttgatgagggttccatgaaaagttaacagggaaaatattagtcttctcaaaaaatgttgctgagacactaaatatcaacatacaaagaattatacttggactctttcctcacaagatattaaaaaaaaactcaaagttgatcaaaaactttaagaactaraatgcaaaaattcttagaacaaatcaaaggtggaaatcttcttgacactggagtaggcaatggtttcttaatgtaataccaaaagcagaatcaacaaaagaaaaaaattgataaattggactgcattaaaattcaaaactgctgtgtttcaaagattatccacaaagtgaaaagacaacctatggaataggagaaaatatatgcaaatcatgtatcccagaatacataaagcactagtacaaaatcttcacagcattctctgccccagtaagactgcaggaggcaatggaatgccgcagaggttttggagctcagaggaatgtaatctgatttaggttttagcaagtttactatgaaactctagattaagatcaatactgtcatgtgttgtccacccccccaaaaaaaagggggg

SEQ ID NO: 718914 - DNA, 1005 bp, Homo sapiens
tttcttgcccctccttctgtttctcccatcacttccacctatggctgtcacagaaggactgataaaggaggggacactggagatagaccctgagcattgaaggcggccagcccccccacacctgtgggtatttctcatcaggttggacgagagactgagaaaagaaataagacacagagacaaagtatagagaaagaacagtgggcccaggggactagcgctcagcatacggaggacctgcactgacgccggcctctgagttcactcagtatttattgatcattatttttactatcttagtgaggggagtgtagcagggcaacaggttgggagaaggtcagcacagaaacatgtgagcaaaggaatctgtatcatgaataagttcaaggaaacgtactgtgcccagatgtgcacacaggctagatttatgtttctctttacccaaacatcttagtttagcaaagagtaacagagcagtattgctgccagcatatctcgcttccagccaccgggtggttttctcttatctcaatagaatgaatgggaatggtcagctttacaccaagacattscattcccagggatgagcaggagacagaagccttcctcttatcccaactgcaaagaggcctccctctttcactactcctcctcagcacagaccctttatgggtattgggctgggggacagtcaggtctttcccttcccatgaggccatatctcaggctgtctcagtggggggaaaccttggacaatacccaggctttcttgggcagaggtccctgtggctttccgcagtgcattctgtccctggttaatcgagaatggagaatggtgatgacttttaccaggcatactgcaaacatattgttaacaaggcacatcccacacattcctaaatccattaaaccttgattcaatacagcacatgtttctgtgagcacagggttggggctaaagttacagcttaacgcatctcaaagcagaaacaatttttcttagta

SEQ ID NO: 718915 - DNA, 1666 bp, Homo sapiens
tttctgggctctctattctgttctattggttgatgtgtctgtttttgtaccagtaccatgctgtttcagttactgtagccctgtagtatagtttgaagtcaggtagcatgatgcctccagccttggttggttttttttttttgcctaggattgcctagctattcaggctcatttttgttccatatgaattttaaaatagttttttctagttctgtgaataatgtccttgggaggcctcaggacacttacaatcatggtggaaggggaagcaggcatgtttwacatggtggcaggtgagagagagcgcatgtgaaggagaaactgtcaaacatttataaaatcatcagagcttgagagaactcactcactattataagaacagcatgaggaaaccacccccatgatccagtcacctcccaccaggtccctccctcaacaggtggggattatggggattacaatttgagatgagctttgagtggggacacagccaaaccatatcaaaatataatgtatatattatatacaaatataatttatatttagtttcagttgtgtttcaacatgatcaaagaaagtttccataaacttgctatttcaaaagttcctgctatttttcattgtttattctattttgccttagtcataaagattggattattaagcttgtgtctcttccaaattgtgtacaattttgcttagctttgttttagatcattctctgtatttgaaggaaaatcacttaactgtccttgggatgtataacattaaaatatttttaccttttctgggtgtctcacacagaaatgccacttctgccttttgcctatgcacaaccctatgaacctcctttctccccaacttcttcacctctgtcaagtgtgtcaggtgggctgatcctctgttgggagggtgggagtgtgcctgtttaatttacataacaatgaaaacaccattactgacacttctaaaattccagccctaggacacccttcaattcacaacacagaacatctcccctctgagctcctaattagctactgcccagctcctgtcaaaggcccattgtgactgtcaacagccaatgtgagaaagacagaaggatgcaccaggacatgctcctcctgatcccacaaggttttctaagctgttttcccactgagctaggaggtcaggaagcagcactcctgatgacatgagctcatctccccaaacgtaagccctcactagaccacaggttggtaatatactctcagcttttaagtaaaactaaacagtgcctccctgtgccgagccccgttccttctctttctacatgggcttccctggaatgagtgagaaaagattggcctgggtgagcttccagagcaccagctgggaaagaccccctagggtgatgcagacctgctctactcaaggctcagggcaaatccctcctgctctaactccccaaggctggccctgtctttccaagtggaagccaggagcctggggttcagggtgcctggtgaacatggcctgggtggtcctgggctccttacttggccctgcactctttgggtggtcctggactgtggcacccacctggcctcagtggaggaagcccctaccttgacagactcgttctcatgaattccagttagtagctggggctgaagcatcaggt

SEQ ID NO: 718916 - DNA, 635 bp, Homo sapiens
cactccagcctgggcaacagaacaagaccctatctcaaaaaaaagaagttctttgtcaagtccaatgttcaaacataagaactatattaccgtgtacctgtgtgcagtgtccttgccttcccctgcctgttaataatgttgaggttttgtgtccatccgaatgactcagctcatgtttcttttcttatcaacaggctcaaatagttttggggaaaaaagcaaagaccaattttaaagcaaatattaagtcatgtacatttttaaggtttaggagtaaatcataattttcacaccatgcattttcygatctcttttgttatggggcagagccttaacaagttcatgaattaagtgattgcagcacatcagaactcttataacactttcttcagtgtgagaggaatctggagactctcattcccgtacaggggtactggggacagagttccttctggtttattccattggacgtgactcttcaaagttcaccatttatttatttgttcactcattcactcaacaaccttatgtagaatatatgctaagcatggaaagataagtgcgctgatggacactgaaagagtcctggggaagcatgaagagctgacttagaaatggattttgattctacagta

SEQ ID NO: 718917 - DNA, 635 bp, Homo sapiens
cactccagcctgggcaacagaacaagaccctatctcaaaaaaaagaagttctttgtcaagtccaatgttcaaacataagaactatattaccgtgtacctgtgtgcagtgtccttgccttcccctgcctgttaataatgttgaggttttgtgtccatccgaatgactcagctcatgtttcttttcttatcaacaggctcaaatagttttggggaaaaaagcaaagaccaattttaaagcaaatattaagtcatgtacatttttaaggtttaggagtaaatcataattttcacaccatgcattttccgatctcttttgttatggggcagagccttaacaagttcatgaattaagtgattgcagcacatcagaactcttataacactttcttcagtgtgagaggaayctggagactctcattcccgtacaggggtactggggacagagttccttctggtttattccattggacgtgactcttcaaagttcaccatttatttatttgttcactcattcactcaacaaccttatgtagaatatatgctaagcatggaaagataagtgcgctgatggacactgaaagagtcctggggaagcatgaagagctgacttagaaatggattttgattctacagta

SEQ ID NO: 718918 - DNA, 635 bp, Homo sapiens
cactccagcctgggcaacagaacaagaccctatctcaaaaaaaagaagttctttgtcaagtccaatgttcaaacataagaactatattaccgtgtacctgtgtgcagtgtccttgccttcccctgcctgttaataatgttgaggttttgtgtccatccgaatgactcagctcatgtttcttttcttatcaacaggctcaaatagttttggggaaaaaagcaaagaccaattttaaagcaaatattaagtcatgtacatttttaaggtttaggagtaaatcataattttcacaccatgcattttccgatctcttttgttatggggcagagccttaacaagttcatgaattaagtgattgcagcacatcagaactcttataacactttcttcagtgtgagaggaatctggagactctcattcccgtacaggggtacwggggacagagttccttctggtttattccattggacgtgactcttcaaagttcaccatttatttatttgttcactcattcactcaacaaccttatgtagaatatatgctaagcatggaaagataagtgcgctgatggacactgaaagagtcctggggaagcatgaagagctgacttagaaatggattttgattctacagta

SEQ ID NO: 718919 - DNA, 656 bp, Homo sapiens
ttccataaagaagcggatcccaagctcctccaggctgaaaccagtcctcttggggccataactgaagatccactgacctcaattaatcagagtgatttttttaacaatatcaattgagcacccagacatacagaaaaaaaatccaactgtattaggagagctaaggcagagctggctaacccatatacaatagaaaaagatctgaaggtcagagtaaagccgacagagctctaataaaaataaaaaagaaagaaagaaaaaaaaccatcataaatgagattccctggaagcatggtttatcttgtttcctgagtccttggctccacagctcaaagggagaatcttgagaggagggatggagacttactctctgtgtatcaggtccaaacatagtactgagcacagaacaggtgggttttggacactatggtgttgtgtggtctcctgcttagactcaagccatcaactcctggcatggcaaacgtgacagtagaaagaattctaackgggcagaagcccactgcagactcacttaaacaaaaaaggttgatgtatggaactaaaatgccaaagttagatataaattcaggcatgattagctcagaaagttggttattggatcttggacttcccctctgtgttttggttctttgctc

SEQ ID NO: 718920 - DNA, 1056 bp, Homo sapiens
caacctctctcaacaccccactctgagttcttccaggaacatccttcaggcattcactcactcattcatttcttcagtcagtgataactgagcacctactatgaacttgaggttggaaaaacagcatttaacactgtacaaagtcaagttacctctgtttcccccaacagccttgctcaagcagttccttgtgtctggaatgctcttttctggctaactctcacctaccctcaggtaccatctcccctaggaaggacacctccccaccactatcccccaggtgtggccagtaactgaaagcaaatctgtagtagtttaaccacagacctgtaagcaacaagtaactgctactgtaagctgctaggatttggggggctatttgttacacagcatcatcacagcaaaagctgaccaacacaaacaggcaagttctatcttcaagcttcaggactgtgacattgtgaatcaacacttaaggttttaaccaggttgggccagtgctaagcagatgttctcagaagaagcaaagcctgagattgagggagacctggatgtgaatccttgctttgtcatgaagggatagtgtagagggtagcaattaaaaaacacattctctggaatcaagttgcttgggttcaaatcccagtgctgccacttacaagccatgtaacctgggactagttccttaacttctgggcctcagtttcctcatctgtgaaatggaaatgattctagtaccagcctcacaggggcattatgttgattaaatgagctaacctctgtgatgtgctgttagttgctacttttcagtcattgtgagtgagcttggcttggcaactttacttccagaaccttgccatgtatccagcacactgtttttttggattattagaaaccctagctagcayggtgtagcttgctaggcatcaaagtctttcttgggctgtctccatagcaactgcaagcatagactctggagctggacatactcaagttctaatcttgtgaccttgggcaagtgatttaactctctttgcctcagtttgctcatctgta

SEQ ID NO: 718921 - DNA, 708 bp, Homo sapiens
ctttggagggcaatgtgcagacctttccacacacacctcagaacatgcatacttgtccatctgcccagcaattccacatacaagcaatcatgtcagttcccttttttatacaaagcgattttgtttctcttcctttgctatctctagtcctttcagcatggtgaaaacaagaaacggyggcatacctgagccatctccatgttttttattttttatttttatttatttatttatttgagatggagtctcactctgtcacccaggctggagtgcagtggtgcaatctcggctcactgcaagatctacctcgcagattcaagtgattctcctgccccagcctgccaagtagctgggaccacaggcatgcacaaccatgcccagctaatttttttttttttttttgtatttttagtagagatgagatttcaccatgttggccaggcaggtcttgaaccgctgacctcaggtgatctgcccaccttggcctcccaaagtgctgattacagacatgagccactgcacccagtcttatttatttatttattgtgtttttagtagagacagggtttcaccatgttggccaggccaggctggtcttgaacccccgacctcatgtaataagcccgcctcagcctcccaaagtgctaggattacaggcatgagccaccgcgcctagccgccttatttatttatttatttatttattta

SEQ ID NO: 718922 - DNA, 570 bp, Homo sapiens
ccctccttgatctaacaacatattacagtaagaagttataaaaagagaagacaatatagatttccaattatcatattaatcagttggkcctgcttctaaaaaccaaccagttattcagtttctaaaaccttaacatatattttgagtgagattcagctaagcctagcaccatacaatgtcagagttggaagagagcttaggagaatggctcctgaacctgacaggtggtcaatctcccagggagcttataaaatatatgcacccagaagttctatgctagtcttactaaatcaaatccttgctgagtggggccacgaaatctgtacatttatcaagttctcaagataatgagaagctcagtttggaaatttctttaaagtaccatcgaaggcactgagatccaatattgcaatgggcatttaagatattaaaagtaaatggggaagtcatgtactcatgtattcattttattttttaattaatatttatttttttatgtacatagtgcttacttacaggcaaaggatgcaaaggtgaaaaaatatgatctctgacttcaagtatttatta

SEQ ID NO: 718923 - DNA, 675 bp, Homo sapiens
atagattcatgtgcattaatacacccagtatgtgtttcctggctagacctcagtttctacttatattaagacctcctttctccaggagagattgattggacaaattggttggagccattctaagatgggtaacttagaaaagcagatttttaggggaactggggagtctgtatctctcttcaaccatggtacagatacatttatttcatttattttattcttgtaggtctgtcgttggtccttggaaattggtgttattatttagttttgctttgtttattattatttttaactatgaaagtttcagggatggtcttttttcttttactgcttaaggcaattccatctccttccccttcaactcctcctcctctcacttttctgaaagcgatttatctcttactaagaaaattcaagtataagaaggggaattcatttcagcctagtgtagcctgagggcatagcttagaaatagaaagcgatataaccataaaaaataaccaaraaagttaggtttcttggttatttgctgtataagtgatttgctgtaatgggatgctttgagagctgttttcattttctattgatgctgtgacaaatcatcaagaatgtagtagttttcttacatttatgaaggtcagaagtgctaaaatgaaggtgtcggcaggtctgcat

SEQ ID NO: 718924 - DNA, 1388 bp, Homo sapiens
tcacttacattttcgttttctgagaatagaggcgtagtttttaggaccccagagagaatcagttttgcataagtcgtgaatttctttatctaatacctatattttaactacacatcctaactctgctttctagtttggctttcagagtgtaggtcacaaaagcctaagccgtgcctccgaaggtcagaccaagcgttctcatatcagaaacaaaaaactctgttttaattctttcattttttaacagcccagcaggctttctttgttttgtgagagtgggtagttcacttttctcatgcttgaaaattatgccacccatttatgtgctctgaaagcaggttttgaaatgggtaggaaaagacaagccatggctattttggtagaaaattgaaagtactcaggtggaagggaatcaagaaacaaggctgttaagtactgtatcaggattgcaggcccatccgaagtcgaggagcacctgtagatgaatttcccttcctttgccaagccttccccctggtgacccccatttatctttaacaagaagtcttacacaagtgtaattcataggtaacaaggcaaagcctctgctattactgttggggttctcgctttttgcctgtgtgccctaaaatggtgaatttaaaaaagcaattgtaagaattaatcagagagagagagagaagcaaaatatgtatcttgtaaatggtatttatttccaaagttccggtttttttttttctatgaaattgtgtctccttatacaaaaggtatgtgagtctggttcttgcttcactcaatatcgttgaaaatgtttatttctggccatgaaraaagcaatctatctacctaaatcagaatgttcatatgagggaaaactgccctacatagaaaaatcagatgttccttgaagtagcccagagggtggagtccatatgctgcagtgagagttccatacttaggagtcttcgaattctgcactctggactcctacggaccaagatgatcaactctgaggaagaaaggtagtagccttgcaccacaggactttaactgactgattctgagagccaccgtctaacagcttgcaaaatttgggaagaaaatccccagagtgagatctgaggattgtaaatgcaaagggttaaaaacagataatttctggattcttgctgtgatctttgtcatagcaagtctgaacacactggagctttcatgctctgctagtgggataaaaataaactgtttaaccttttaaatgctggtaatttggagaggtttgccatttttagttctaacacatgagcttctgaaaagctaggaggatagaaatggctaactaactaaatttggaaccttaaaaaggtcagagtaaatctggtgcaatcctg

SEQ ID NO: 718925 - DNA, 2679 bp, Homo sapiens
  misc_feature 659, 660, 661, 662, 663, 664, 665, 666, 667, 668, 669, 670,671, 672, 673, 674, 675, 676, 677, 678, 679, 680, 681, 682,683, 684, 685, 686, 687, 688, 689, 690, 691, 692, 693, 694,695, 696, 697, 698, 699, 700, 701, 702, 703, 704, 705: n = A,T,C or G
  misc_feature 706, 707, 708, 709, 710, 711, 712, 713, 714, 715, 716, 717,718, 719, 720, 721, 722, 723, 724, 725, 726, 727, 728, 729,730, 731, 732, 733, 734, 735, 736, 737, 738, 739, 740, 741,742, 743, 744, 745, 746, 747, 748, 749, 750, 751, 752: n = A,T,C or G
  misc_feature 753, 754, 755, 756, 757, 758: n = A,T,C or G
cagagctttgtctgattacttactctcagctttgattagtgacttctgtcagattcttcaggtagaagaaatctttggagcaggaagggatggatccagttcaaggtcaggatgtgtgtcaaactctcgtcaaggaataaagggacaaggcagacggacaaaataagagagaggctaggacaggaggttggcaaacactcaggtagaatccataatgagagtcagcagagtgagtggtaagtgtaaacttagcyggaaagcccacatagcaagaaagcattttgagccctgctgcatgctgggctgtagaactagcaggaagagaaagcagggttgatagggcagcctccaagtagctcctgaaatgccctgcaagacacaagctctcctaccatacattgaggaactgagggcttctggccctggggccagctttgcctgggttgacagggatcgccagaaggccctacaaaatgtggcttcatagtctttttgcagtctgccagtctcccagattattttggactccctctctctttttaataagtgggagaaaaaaagaaagatggaagatgacaataaaaaccatatggaggcctcttctctggctgaaatcctttgatcttttctccaaacacgagaaagtacccctcccactnnnnnnnnnnnnnnnnnnnnnnnnnnnnnnnnnnnnnnnnnnnnnnnnnnnnnnnnnnnnnnnnnnnnnnnnnnnnnnnnnnnnnnnnnnnnnnnnnnnntttaaaattcaccaaccaaaataataattcagaaatctgacaaagagggtatttctgggaatgtataagatgccaaaagtggcactagaaatatatttttaaacttgaatttaagttcaaaggagcttatcttagacaaagcttaaaaaagtgacagattaggagaagatatttgcaatgtcaaaatcaatgaggaaattctatttagaacacctaaggaacttgagcaagcaacaagaaaaatacaagaaacccagtagaaaaaataggcagaggaaatgaagtgttgataattcacaggagagaaaccaaatagttaataatacttgatgtttctggaatttttaaaaaccccacataaattacacaaattaaaacaatggtttacttttataacactttatacccttcaaattgctgaaaaaaaagagaaagtcagaaattgctaaatggaagcagacttttggggaaaaaggaacctgcatgtgctgctgctgggactgtagcttggcaaagtcattctggaaaggaatttggcaatattttctgaaagtaagtatgcgtattctaagatctagaaatcctattactgaatacatataggcccaagaaaacccaggcatatttccacaaaggtatatgtacaagaatgcagcctctttgtgcaagtgcgttgttaagataccactcagatgtccacagtgacatttggtggatgaatatcatgaaactagaaatgcatacagtaatatgaactgataataaacatatattgttcacacatgcaagaaataaaagcagctctatagtactagagtatttaagtacagttgacccttgaatgatgcagaggttggaagtgctggtccagcatagtcgaaaatctgcatgtaacttttgactcaccaaaaacttaactaccaatagcctactgttgaccagaagccttattgataacaattagcatgtattttgtgtgttacatgtattagatacagtgttcttataataaagtaagctacagaaaataaaatgctattaagaaaatcataagaaaaatatatttaatattcattaagtggcagtggatcattataatagtcttcattctcattctctttgggttgagtaggctgaggaagaagaggcacaggaggggctggtcttgtctcaagagtggaaaagctgggagaaaatccgcatataggtgggcctgtagttcaaatctgtgttgttcaagggtcaactgtacatttgaaaacattcacagaaataaatacaattatttttcagggtacatacatatctaagtgcatatatcgaacccattacactgggtgccttaagtagggagtgagggaaatggaggtgagcagcaatacattggaaaacatgcaggtgtagagagagagatggcaatgggatacaaaggcaatcaggtttcctggtcagcgtgaatcctgcttgtgctctgcatgtgaaccatgggtttcaaatgaggcaagataagcagactctggccagagacatgagcagtttacaaatcctgagaaattgaacagtaatacaaaaaccaaaaaggaaaccccttggggatgaaggatgaacactggctattgtaaactagatgaaaaaaccggtgtgatataataaaaaataaatatttggcctttgtccccagttcctggcacagagctcataaaaccctttgaatctcctaagtgataagagtgtcttttgtatgctaatgaggtgactcctggctgggcccctggaaagcttcagggtgggggatagtcaccagaaaaacccagccatcattatggagttggaacttgcacccctctccccacctctggggagggaaaagaggcaggagattgagttcaatcaccaatggcagtgatttaatcaatcatgc

SEQ ID NO: 718926 - DNA, 2188 bp, Homo sapiens
agttgcttttcatacagtgatttttgtagtttaaaaaaatgtttaaatattgggtaaaatttgccattgttgttactgttaaaataatgtttagaaatacttactgaaactcactcattaaaacagtaaatatgaaaagcacattattggatatttaatatttaaacatattgagaaatgggtactataaaagatgaaagcgattgatggtaggcctggactaaacaatcttaaaggcagcttctagctttrtgattttagacttttaccactggaaaaaatatgatggctgtgtttcccaccaactgtctaaagcaccaacttaagtgtacatcagtgtaatgctttttatttgaataagcaacaagagttgcttattgataacttgttactgccttctttatgctaacaaattgtccaaagaggcacttgagaaattcagataagcatcataatctattcaaggggttgggttttgttcaaagataaataatcaaatagagttaaaataagaaaagaattagactaattcacatcctgtatttctttatctgtcgtttgacgaatatgtgccttcaagattttaaatgtgtatttgtattgactcagtgatttgttgcaataggtttctgttcctcagaattttcttcataatggccatgttaagcccttcttaacctgttgctagcgggtctgttgcatttcaggttgcttatactattaaaagaccagacccttatattataccttgataaataattttctcccagtgattacttatttaccttattttagtttttcctaaatctgctaaaaacttaatgagcttttcattcaagcctgatatattgaccctatttttagtgatggttttaaaccacttctttgcttttctcaaggtaaccttggtgatattgttacatttgttcattatcattttttatgcagcaactatctctattgatttgtctgtggcctttgattcgatgaatcacaacatattgctatttgagtgtccctcaatttggcaaagtttaactacagtggaatggttctcaggctacattagtgaataaaccccagtcgttttgtttaatggtgttgaatctgaggtgaaaatgttacattcaaagttacctccggagctaattatggggctttttactttttcagtttttattaatgacctgccgacatcatacagttcatgaaatgctctggatgtgtacatgctgatgatacgacctcagacccagcaagagctcaggcaagtgtgcaggcattgtgtgtttaaactagagattcattgagtgatgctcacaacacagatacaaattttgccccaaatatacaggctcacaattttttttctaactacacagagcaatcctggataattttatatttgcctactttataaatggaggtaggagcacaactagctgaaatagatgatgaaatgatgaaatgtgtatctgggcttttatataccatcctattcccatatcaaatgtaatataattttaggtggtaaaaacttaacatttcacgagcgtgctatttcccactgaataattttttaaaaaattggttgtttatacccatctctctgaatgtaaatatgaaggtaatgccccagaatgctcttttcttaaatttggaaaattaccaaggaggaaaatattctctgcagtagcacagcattctttgagactaacttgtcaattacaattttgtattcatccaagtgataaaacacatgtaaggcctgaatgctcactgggtatagtccatatctttagaagtaacttctcaactcacagaagtctcccttcactgcctcctttgtagacggcaggactctggaccacatttaatattataagattccctgaacttcccttggaccaaagcagaggaattgagtttgtagatggaaacagaagaacaaaccaagtttgaatggatgacctttgcggctgggttttcagtatgtcttgggtcagaggcagccagacattctgttctgagagctcttcagatgctcataatgaacctctcttgtctgtagaagttgtgcatgtactaatgacatagagatgtgagggacagtttctgtactcaaggagcttatattcccatgtcaatagtagttaaaggaatatgttttgagcaaggctgcctggtt

SEQ ID NO: 718927 - DNA, 574 bp, Homo sapiens
tgcctgttatacctggcaagtctggtcctgtgcttcatatatgtccccaccactgctgaaaaaatggatttactgtatggctcattcattggtgaattattattttaagagtgatttttaaaatttcttttttgagaccccatctcaaaaaaaaaaaaaaaagccagcatacctacatttgactacttcttgctcatacagtttctgaactcttgtcgggggaaagtcttaattttttgttagtgagtaaataggtcactaatgatgcctgtaactctcacctgtgccaggcaaaaattatttaatcaaatgctgccaagcacatgaatggctytaaattaagggagaactttatgcagtagggagctgaacacagacacaattttagaatatgagggttaaatttttttttttttttgagatggagtcttactctgtcacccagactggagtgcaatggtgcgatctcggctcactgcaacctccgcctcctgggttcaagcgattctcctgtctcagcctcccgagtagctgggattacaggtgcacgtcaccacacctggctaatttttta

SEQ ID NO: 718928 - DNA, 899 bp, Homo sapiens
caacaagaacaaaactctgtctcaaagaaaaaaaaaaaaaaagatttatgctgtgctgcagtgaccctcctagatttcaaagggcattcttattaaaaactataaaacctcaaatgaggcttatcttctacagttaggaagatttgactttctgagagggaaagaaacggaaataaatacagaaagtagaaatttctgccatattctatgatatactcaaaatggtataaaagttatcattactctcaatttttccatctttttatctcactctctctaccaccrccccacccttccccatgagatataatagaaaagaaggcatgatttgaattttttggtaaaaatcaatatattattttatttatttatttatttatttgagatggagttttgctttgtcgcccaggctggagtgcagtggggcaattatggctcactgtagcctcgaccaccagggctcaagtgactctcccacctcaacctcctgagtagctgcgaccacaggcacgtgccagcatgcctggctattttttaattatttgtagagatgaggtctcactatgttgcccaggttgaatatattattaatcatttcctggcaacaggattccattaggaaatcttgtgttcctgagttacccttgtagccagtcactgaaagcacccatacttacctatatagcttgtaggaaattaagaaaagctgaggatggggaggtgagagcactaagaggagggggtccaaaggaccagaggtgaggggtggacttggtaaatttaagtagtatataaatgagataaattataaacctttgaaattcatatctcatgaatgaaaagttgatttatgtgacaggtatttatctagggcctactatgtctcagtcccttgataa

SEQ ID NO: 718929 - DNA, 592 bp, Homo sapiens
cttacattagatgaatgaatttcacatttattattgaaaattgctttttataaaaatacctttaaggtattatcattttctgtaaaatttattatttatagataatacagtgtggtaacacatactccacttcactaataaaatggtttttgtattctttaattctcatgaattaaatccacaataaatcattaatacatgttgtgtgagcaaatgaatatcttttaataaggagaagcttgattggaggcccttccttcctctgtcattccttccttccttttttatataatttctttatcttaaaraaactctcaacctactatttttggaaaatatatatcaaaagggtaaaactttacatagtcccagaaaaggtatgccttttttttttttttttttagaaatgtagctaactgaattactctcaggaggttttaatttctccatctcaaggctcaaggaatgtaaatggagattatattaccaattggttacttgtaattaaaaaaaaaaactgtcatctagagatttttttccaatcctcaggcagtattggatatgaatatgacgaaagtaatgtactaaaaga

SEQ ID NO: 718930 - DNA, 592 bp, Homo sapiens
cttacattagatgaatgaatttcacatttattattgaaaattgctttttataaaaatacctttaaggtattatcattttctgtaaaatttattatttatagataatacagtgtggtaacacatactccacttcactaataaaatggtttttgtattctttaattctcatgaattaaatccacaataaatcattaatacatgttgtgtgagcaaatgaatatcttttaataaggagaagcttgattggaggcccttccttcctctgtcattccttccttccttttttatataatttctttatcttaaaaaaactctcaayctactatttttggaaaatatatatcaaaagggtaaaactttacatagtcccagaaaaggtatgccttttttttttttttttttagaaatgtagctaactgaattactctcaggaggttttaatttctccatctcaaggctcaaggaatgtaaatggagattatattaccaattggttacttgtaattaaaaaaaaaaactgtcatctagagatttttttccaatcctcaggcagtattggatatgaatatgacgaaagtaatgtactaaaaga

SEQ ID NO: 718931 - DNA, 592 bp, Homo sapiens
cttacattagatgaatgaatttcacatttattattgaaaattgctttttataaaaatacctttaaggtattatcattttctgtaaaatttattatttatagataatacagtgtggtaacacatactccacttcactaataaaatggtttttgtattctttaattctcatgaattaaatccacaataaatcattaatacatgttgtgtgagcaaatgaatatcttttaataaggagaagcttgattggaggcccttccttcctctgtcattccttccttccttttttatataatttctttatcttaaaaaaactctcaacctactatttttggaaaatatatatcaaaagggtaaaactttacatagtcccagaaaaggtatgccttttttttttttttttttagaaatgtagctaactgaattactctcaggaggttttaatttctccatctcaaggctcaaggaatgtaaatggagattatattaccaattggttacttgtaattaaaaaaaaaaactgtcatctagagatttttttccaatcctcaggcagtattggatrtgaatatgacgaaagtaatgtactaaaaga

SEQ ID NO: 718932 - DNA, 1462 bp, Homo sapiens
catccacctatcaatctctggataaatttgcataatgtgatgagaagagtgattttattaaaaattgcattgaattaaaaatcatagacgggattaatctccaattgattttgattccataaattaaagatatgtgataatacaaacacagatttaatatgtgcagttaaaaataagaagtgcttaaaacttgtccgggtgcagtggctcactcctgtaatcccagcactttgggaggctaaggcgggtggatcatgaggtcaggagttcaagaccagccttgccaacatagtgaaaccccatctctactaatgatacaaaaaattatccaggaacggtggtgcacacttaaaataccagctacttgggaggctgaggcaggagaatcccttgaacccaggaggcgaggtttcagtgagccgggatcgcaccattgcactccagcctgggtgacagggtgagactccgtctcaaaaaaaagaaaaaaaacttaaaatttaaatatatgtatatatatgcacacacgtatataaatatatgtatgtgatatagcaggataagtgtttaaactgggaaaaggacataattgtctagttcgtagggtgatatatagattaatgttttaattttgcatataacaatgtgttaattttccctaaatatttagtgttcactaaagttagatatctggcagaatatcgttctaacaagaagctgttagcagttagtttgttgtcattctttgaaaataataacgaaacaatattacttttaaagtattgcatacttcaaacttatgtttaaaccaattaacctaaatcgttatgagatttaattattggcctgatgatattccaattgaattttccttaatgctttgacttcaagaaataactcccagttatactataccagtaaattcttatagtcataattcatttatttataaaacagtgctaccatttaaacctaaaaaggttttgtaattatctttaaaactaaattgttgagagtttatctcctaattatattgtatttagaaatgaaattcattctgcataaataaatggaaatttatagagaatgttatgttcaactaaagaaaaaatgctgacatgttcatagtcaatgaagatcaattcgtgaataagataaattgcttagttttattatttaaagtaataataaaccgtttttattagtggcaatcatcgcctgaactgttgatcttgctatacttcaaattttccattaatacactatattttatttttaatattttgagaaacctccatatgcttgccagcatccgtaatttcttgtcttttctgataatagcctrcctaacatgtgttaagtgatatctcactgggtttttccttcaatttccctgatgattagtgatgttgagcactttacatgtacctattggtcattttttttagaggggagatagttcaca

SEQ ID NO: 718933 - DNA, 920 bp, Homo sapiens
  misc_feature 7: n = A,T,C or G
aacaatnaacaatcaccaccaaaaaagtgagaaattaaacgcaatataatttggaaagaatcttgccacattattgcttacaattgtccatctaagaaaatgtaggatagtaaaatgccagagagtcggccggaaaaagtgaaggtgttcaggaagtgtagttaaatccattaaaaaaataattgagccagaggtaagaaatatctaagaggcctggcatgggggctcacgtctgtaatcccagcactttgggaagctgaggtgggaggatcacttgaggtcagcagttcaagaccagcctttccaacatggcgaagccccatctctactaaaaaaaaaaaatatagaaatcagttaggcttggtggtgcacacctgtagtctcagctactcaggaggctgagggaggagaactgcttgaacctgggcattggaggttgcagtgagtcgaggtcactgacggaacttttgaattcttttaacagcatcctgggatgtaaccaatattaaagttaattgtgtcattagattaagatgatcttgcattattaattcttttcctctttggattgttaaggtaaatgtgccaagtaagtattacctttctctttacaataatatattaaaattatttaacatcttataatacatatagtatgtctggttttatttatatttaaaggaagcataaacttggaaaacataaaacagaagtgataaaagtagccaaatgtcacagttactgtatcttktgagagagcagggtttctgataaaataagcaataagcacaaatggaagcttttcttcttaatcattacatatcttcaggaaatcatgttcataaatgttatcaagaagaacatgttatggataatttatactctaaatagaagattcattgtaggcatttttaaaaatt

SEQ ID NO: 718934 - DNA, 646 bp, Homo sapiens
tagaagatatgaggtttgatttgaccctatttaggctacacactgaggatggcagaagagaaattttggaaaaaatgaaaattgggggatttgataatgttgtaaaactgctcagttaactgagtctgaaattgtaaactttttgttatgtgagaaaatgaaattgtcttattgttaaagttacttatgattcatatttgtgttaattgtggccaaaagcacattatccatttcaggtgctttaacaggaaagtaaagaggtaaataacattatttattcaaataactttctcactacccacataatctgcaaattattgtgctgactgctaaggatgcaatgaattaaaacatctctccaaccatcaattgatttttttaaaaaataattaagacaaaatattaaaattaaaataagaagcaggcattaatttttataaaacacttcaataaaggaaaataacattaacttcaaattttcctaactagtgttttaagttaagttaaataagacaattctgcaacattctagacagatcttgatacatgctaagcaccaatgagttaactaaagatagyaatatttcaaatgtaaatattactggaataaagctttgtgatataataatgcattctgaattgcaat

SEQ ID NO: 718935 - DNA, 622 bp, Homo sapiens
taaatgcacctgcttcttccccgaaatgtctcagtcaactggacacactggttgggacgctaaaaaaataccactccaatccagtggagacccggccctgcaccatcagcatgcagacggcccgagcaggaggcaggaggaaaaagtaattagagcagctgcggtgaccagaattcctgggtggcccggggctgctgagcagctgcggctgccctgcctagttcctgctcgagatggaggggtcaggcggtaatatgaagggccgggggcaaactcagccagagagccaagcattttggtctttacagcccaggtctgcgtgggacaccagccaggctgggaaggrcctcattagggggatgatgtaccagaagacaagtagatcacagtttggagggcattgtggtcacctgggatgtgggctggctagggctaggcatagagaggctgttcccaaatatctttgttgtccaagggcaacaggttcctgttaaaagctatttaacatggaagccagcatttcttcatcgtcagtagataaataagtggggtcttatcttgaaaactgaaactaagacttagaaaaatttcattttatgttctatgaaataaaatataggca

SEQ ID NO: 718936 - DNA, 3056 bp, Homo sapiens
aaaggaagaagaaaaagagaccaggcctgatatgcctgagttcccagatgtggaattttgcaggatatggtcagggacttgtgcttttccttggctaagccgggagccctggcagaagaaagattcatctgacctgcaccttttagatgccactccagggggcaagcgtgaagcagcagacactccttaggaaacattcgaccatccaagagaaacaggaacagagcagaggaggtggtgagagtgccgctgagacctgctgaggggttggatgtggaacttccgagaaagaggacacagggataactccacggtgtggttccgagttaccgtggaggtcggagaagaagtggacaacttctgagatgaggaaatctgagtcttgatttgggtgcctacctgtgcccagcaaacagaaagagcccagtggtaatgccaggagcaaacccccatcccgcctcccccagcccatcccgcctcccccagcccatcccgcctcccccagcccatcccgcctcccccagcccatcccgcctcccccagcccatcccgccacaccgattgccgtcaccagcaggtggcgctatggagcaagcctgagacctggagtcagaaaacctggatccgtgtcctggctcccccagtgagcagagatgaacaaagtgggcactgcagagaaaagatccccttgtcaccaaaaccaccgctgtccatcttccatgcttcctcgtgtccccacaggctagcctcaagaatggcagggactctcagaccaactctcagttcgattttcaatttattatctatatccagctcctttccaaagatacttgaggtgtctttcaaaaacacacacaaaggagtgaaaaaggaagggaagacaattaagaagaggaaatagataaataattctagcacaaatggagctgctatgactgggcaccatcgcaacaaacaagacaaaatgggaaggccagctgttgctgcataacaaatctccccaacatctagaagctgaaaacaccatttgtcactcctcacaaatctcaggctgggctgcacagttctgctggtctgaggcaggattggctgatcttggttgggctcatgcgtgcatctggagaccaatggcaggctgctgggtgctgggtgctggctgctctgagatggccttaactgggacaccttggctgggttctacatggcctctcatccagcagcaggccaacccaggcttgttcacatggtgatagcaggggcccgagaaagcagaagctgtcaggccccttggaaagcctcttcctctaggcttagaactggtataccagcactcctgctatgttccattggctgaagcaagtcacaaggccagaccagattttaggggcaggaaatggacttcacttcttattgggaagagtgatggttgttgccatttttgcaacttacgaccatgataaattgtggagctctaattatcagagaagaataaatatgacagtttcttggagcaaaattgttccccttgaccaactcagagaaatgtttccaagggccgacaccacgttggcctcattttcttcatagcagtgatcattcattgagtacttactatgtgccagaccctaggcatcctttatattcatgtgcttccaaaagcacaggaggcacarcatggctcttcatcatgagtttagttggtacacagataaacagttatgacgtcgtcttctttgtcttttcttattgctttgcatttgtgacaagtgatatcaattttcctctaatgctaataatataaaaatttccttttgaaatagatcagctcaagtctttcaacatggattcatttaaggaaatattaattaaataaataatgaagttgggtgtggtggcttatgtctgtaatcccaacagtttgggaggccaagatgggagtatggcttgaggccaggagttccagagctgcctaggcaacatagcgagacctcatctctatataaataaaggagtcagccaagtttggtagtgtgtacctgtagtactagagactaaggtgagaggatcccttgagcccgggagtttgaagatgcagtgaactacggatagcaccactgccctacagcctgggcaacagaatgagaccttccatctctaaaaaataaaataaacataatggtacaggtggcatgtggtcatagtaaaactcatgagggcgcaggcaacacactgaaatttgaaaaacatgctgaattatctctattcatccctgagaaataagtattatgtttttcattttgcagatagggaaactgagtacagacggggtccccagaggcacagactcaagatagtgccagatgtgcagctctgtctgaaaaagccctgagtgaatgttcccaggtggcttgtaataggaagcttggcaaatggcagaggcctgtggtggcatctgtcacctaatgagaaccccggggcttccagggtgcccctgccactgctacttctgggcttctgagtataatgaggatggcaggccagggccctcgcaaggcacactttcagaatctgtgtcaaatggaatttgaatcagaaagttccctggagacccaagggaggcatcagtctgaaatctccagtacaggtaggtggcaggcatggtgcatgttagctgaaatcactctttacctgagaggccacacacgcacagcggcactgaataaattagagaaaatagacgtgcttctcggaaagggtagtgggaagcctctgtgctcccggcgctgttgtaagtgcattctttcctcaggttccatgaaagcatgtcccgtggggcccatcctgaagccaacgggctgggtccagtgaggggcagaagaggtcaggagggaggtgggaaagctagcagagcccttcctggctgcacaccccaagatctgggcctcacaagcatctgggcactcgttcagggcgcctgcgaaataaaccaacattatgaaccgaattgtaccctcatactttgtatgttgaagtcctaacccccaggacctcagaag

SEQ ID NO: 718937 - DNA, 3056 bp, Homo sapiens
aaaggaagaagaaaaagagaccaggcctgatatgcctgagttcccagatgtggaattttgcaggatatggtcagggacttgtgcttttccttggctaagccgggagccctggcagaagaaagattcatctgacctgcaccttttagatgccactccagggggcaagcgtgaagcagcagacactccttaggaaacattcgaccatccaagagaaacaggaacagagcagaggaggtggtgagagtgccgctgagacctgctgaggggttggatgtggaacttccgagaaagaggacacagggataactccacggtgtggttccgagttaccgtggaggtcggagaagaagtggacaacttctgagatgaggaaatctgagtcttgatttgggtgcctacctgtgcccagcaaacagaaagagcccagtggtaatgccaggagcaaacccccatcccgcctcccccagcccatcccgcctcccccagcccatcccgcctcccccagcccatcccgcctcccccagcccatcccgcctcccccagcccatcccgccacaccgattgccgtcaccagcaggtggcgctatggagcaagcctgagacctggagtcagaaaacctggatccgtgtcctggctcccccagtgagcagagatgaacaaagtgggcactgcagagaaaagatccccttgtcaccaaaaccaccgctgtccatcttccatgcttcctcgtgtccccacaggctagcctcaagaatggcagggactctcagaccaactctcagttcgattttcaatttattatctatatccagctcctttccaaagatacttgaggtgtctttcaaaaacacacacaaaggagtgaaaaaggaagggaagacaattaagaagaggaaatagataaataattctagcacaaatggagctgctatgactgggcaccatcgcaacaaacaagacaaaatgggaaggccagctgttgctgcataacaaatctccccaacatctagaagctgaaaacaccatttgtcactcctcacaaatctcaggctgggctgcacagttctgctggtctgaggcaggattggctgatcttggttgggctcatgcgtgcatctggagaccaatggcaggctgctgggtgctgggtgctggctgctctgagatggccttaactgggacaccttggctgggttctacatggcctctcatccagcagcaggccaacccaggcttgttcacatggtgatagcaggggcccgagaaagcagaagctgtcaggccccttggaaagcctcttcctctaggcttagaactggtataccagcactcctgctatgttccattggctgaagcaagtcacaaggccagaccagattttaggggcaggaaatggacttcacttcttattgggaagagtgatggttgttgccatttttgcaacttacgaccatgataaattgtggagctctaattatcagagaagaataaatatgacagtttcttggagcaaaattgttccccttgaccaactcagagaaatgtttccaagggccgacaccacgttggcctcattttcttcatagcagtgatcattcattgagtacttactatgtgccagaccctaggcatcctttatattcatgtgcttccaaaagcacaggaggcacagcatggctcttcatcatgagtttagttggtacacagataaacagttatgacgtcgtcttctttgtcttttcttattgctttgcatttgtgacaagtgatatcaattttcctctaatgctaataatataaaaatttccttttgaaatagatcagctcaagtctttcaacatggattcatttaaggaaatattaattaaataaataatgaagttgggtgtggtggcttatgtctgtaatcccaacagtttgggaggccaagatgggagtatggcttgaggccaggagttccagagctgcctaggcaacatagcgagacctcatctctatataaataaaggagtcagccaagtttggtagtgtgtacctgtagtactagagactaaggtgagaggatcccttgagcccgggagtttgaagatgcagtgaactacggatagcaccactgccctacagcctgggcaacagaatgagaccttccatctctaaaaaataaaataaacataatggtacaggtggcatgtggtcatagtaaaactcatgagggcgcaggcaacacactgaaatttgaaaaacatgctgaattatctctattcatccctgagaaataagtattatgtttttcattttgcagatagggaaactgagtacagacgggktccccagaggcacagactcaagatagtgccagatgtgcagctctgtctgaaaaagccctgagtgaatgttcccaggtggcttgtaataggaagcttggcaaatggcagaggcctgtggtggcatctgtcacctaatgagaaccccggggcttccagggtgcccctgccactgctacttctgggcttctgagtataatgaggatggcaggccagggccctcgcaaggcacactttcagaatctgtgtcaaatggaatttgaatcagaaagttccctggagacccaagggaggcatcagtctgaaatctccagtacaggtaggtggcaggcatggtgcatgttagctgaaatcactctttacctgagaggccacacacgcacagcggcactgaataaattagagaaaatagacgtgcttctcggaaagggtagtgggaagcctctgtgctcccggcgctgttgtaagtgcattctttcctcaggttccatgaaagcatgtcccgtggggcccatcctgaagccaacgggctgggtccagtgaggggcagaagaggtcaggagggaggtgggaaagctagcagagcccttcctggctgcacaccccaagatctgggcctcacaagcatctgggcactcgttcagggcgcctgcgaaataaaccaacattatgaaccgaattgtaccctcatactttgtatgttgaagtcctaacccccaggacctcagaag

SEQ ID NO: 718938 - DNA, 641 bp, Homo sapiens
tgatacccaaaatgaaggattttggaggtcccagcaaactgggccctggaaacccagtaacccctttccttgaactatctctgcttccataggacgaagtcagcctccaactaagctgtcttttgcttttacctctcccactctgtcctgtaggaagaatcccaacacatcccacacccattcactctacaactttagaggcccagctccaacgcagactggttatttccatgaagagaataaagcacgtggattgatcaattcattatgacacccgaataaagtggawaaacatacacacacacacacacacacacacacacacaaagacacacacacacacacacacagacacagagtcacacatccttgagaatgtttatttttcattccatacaatccacatttaccccctcttcctgaatttttgtgactcgatctctttttcctttagttcctgtgcataagaccatgctgagtactgccgtcctgcatatggctgtaactttttaggagttctgctgtattaggtaaaatctgatgctccatcatattcaactcaacaactgggagtcccctagagaaacacaaactcatgttaaaacgcattttctctgagccatactttgaaatgtttcaat

SEQ ID NO: 718939 - DNA, 641 bp, Homo sapiens
tgatacccaaaatgaaggattttggaggtcccagcaaactgggccctggaaacccagtaacccctttccttgaactatctctgcttccataggacgaagtcagcctccaactaagctgtcttttgcttttacctctcccactctgtcctgtaggaagaatcccaacacatcccacacccattcactctacaactttagaggcccagctccaacgcagactggttatttccatgaagagaataaagcacgtggattgatcaattcattatgacacccgaataaagtggaaaaacatacacacacasacacacacacacacacacacaaagacacacacacacacacacacagacacagagtcacacatccttgagaatgtttatttttcattccatacaatccacatttaccccctcttcctgaatttttgtgactcgatctctttttcctttagttcctgtgcataagaccatgctgagtactgccgtcctgcatatggctgtaactttttaggagttctgctgtattaggtaaaatctgatgctccatcatattcaactcaacaactgggagtcccctagagaaacacaaactcatgttaaaacgcattttctctgagccatactttgaaatgtttcaat

SEQ ID NO: 718940 - DNA, 641 bp, Homo sapiens
tgatacccaaaatgaaggattttggaggtcccagcaaactgggccctggaaacccagtaacccctttccttgaactatctctgcttccataggacgaagtcagcctccaactaagctgtcttttgcttttacctctcccactctgtcctgtaggaagaatcccaacacatcccacacccattcactctacaactttagaggcccagctccaacgcagactggttatttccatgaagagaataaagcacgtggattgatcaattcattatgacacccgaataaagtggaaaaacatacacacacacacacacacacacacamacacaaagacacacacacacacacacacagacacagagtcacacatccttgagaatgtttatttttcattccatacaatccacatttaccccctcttcctgaatttttgtgactcgatctctttttcctttagttcctgtgcataagaccatgctgagtactgccgtcctgcatatggctgtaactttttaggagttctgctgtattaggtaaaatctgatgctccatcatattcaactcaacaactgggagtcccctagagaaacacaaactcatgttaaaacgcattttctctgagccatactttgaaatgtttcaat

SEQ ID NO: 718941 - DNA, 1140 bp, Homo sapiens
aaaatcaataactaacacaaagtaggttagtaaggtattccttaagtgaaatttctgaagacagtctagcagtctcaattgaaaatctattaacctaaacttacaaaaaggaaaaaatcagtctatcatttttttcctagattcagagaccatctgtgaatactacatatgtgttttaaattagctttcgaagaaatatttatgccttatcaatgctactagcaaagactgttgatatgatctttacaaccctcagtttagacaaaacattttggataacaaaatgatggatatgtacaaatgtcattaagctatagtaatatttgcagctaagaatagcatttcagaaacacttagacttaaccatctgaagaaaaacagataaaaacaaatagcaaaagaaccagagttaaaagtacagagtgatttacaggaactattgcctataaagtgtaataaaaaggatatatgtaactatttgacagaacattatcatataatttttatttatcatcctaaattttcacatctttcttatttttttctaaatataaaaatatctagcaccatgtagagcatgttgatgattggacttctcaatcttcatctcaatatttggtatcttgaagacaaactttcactatatgtctttgaaaattataagaatcaccaggaacacatgcatacatgtatcacttatacatcattctattcccaagctatagaaaacacaaataagagtaactttaccaaatatagtcatgtgccacctaataatgttttcgtcaatgactgaccacatacataacagtggtcctttaagattataataccatattattactatagcttttctatgcttaaacataacatatttagtgatacacaaacacttaccattgtgttacaatgatctacggtttatagtacagtaacatgctgtacaggtttrtagcctgggagcaataggctgtacaatagcataggtgtgtagcaggctatatcatctaggtttgtgtacttgcattctatgatgtttgcataacaacaaaatcatcaaataacccatttctcagaatggatcccactcattacatgactttagtgctttattaatttcacatgtagcaacaagtccca

SEQ ID NO: 718942 - DNA, 608 bp, Homo sapiens
tgctgcatttcttcactacttgtcataagctctagacctagggctaccacttaatgtgttttttgggagttttgttttttgttttcattttgtcagggaaaactaaggaatgtctttttgcactgttggtactttcaggatatacagaattctgtgctactcaactagacaaagacctgagaacttttatgttgaaaaacctagcaattaatggttcctttaataaaaagtctcatttatttaaattacacattctcccttctgcagtgtttaggtcattgttccctttcctcctcctygcctactgcagtctcatgccttcgcagtattgtttagagttctaggtcagaccagaaaattcatctatgatattctgtgaatacaccaaagaaaataagaaggaattgagttactctcagccttaagattacagaccttctgttaactatgtgggatccataagactgaaagggggtcccagaatctaacccacaaaccagagcagcaagactgctaatgtaactggaggtagagccataaaccctgtttcttcttgctcatctgaaatgcttccaaaattggtgcatttattgtcagggatattagaa

SEQ ID NO: 718943 - DNA, 640 bp, Homo sapiens
tggctctttctatttatcttggtatgcctggtaatttaatacacaatgaaatttttaaaaattgtagaagctttggataatgttattttcctttaragagaattttctttagtttctatcaaaaagttagaaaaaatttagtaggtcacctcaattcaatcaggattaaactcatttaaggttaggctttataaaatccttgtaaaatctggcatatttatgatttgctcttactaccaggatacagcccttcaggattcccaagtaaagtactaagatatttattataacctattttccttggcaggctctgaagtccaattttgaaacttttttccaaatcttctcagcaccatgatactgcagtgagctatgcttagcttctctctctcttaaaagtctctttctcttcatcttcttagccccagggaccagccctccaatgaattaacaagtgcttcaaggggcatagaaacacagaatggcaggttcaccctaatgagcttctctttgttctgggatctttgcccctcagtttctggctctttggtaagtctctgatgccttcaaatagatttttaaaattgagatgaacttcacacaacataagagtaacttttaaaatgaacaatttagtgac

SEQ ID NO: 718944 - DNA, 569 bp, Homo sapiens
tggttgtaattggaacattggtctctttaattagttactgcttttcygctgaatgctgagtctttatgttcgggaggtgcagagcgctggcttatctctttggcatctttaatggtggtgcaatgtggggagggccagggacaagtggaggaaggaaggacagagttgggggagattcagtgtggaaatatgatgttatagcttttacatgtaaatcattagtaaatttccacttagcagcctctatggagttctttgtctctataggagtttacaaatgtcctcctctgggatgattttaagtataatttttcccacaggaataaggcttccacattaaatataggaatatgatactcagattgtattctttttctttttcttttttctttttttgtgagacaaggtctcactttgttgcccaggctggagtgcagtggcgcaatcttggctcactgcaaactccacctcccgtgttcaagcaatcctcctgcctcagcctcctgagtagctgggattacaggcacacaccaccacacccaggtactttttttttttttttttttttt

SEQ ID NO: 718945 - DNA, 606 bp, Homo sapiens
gcaagtcagggctccgagcactaagtgacttggctgaggtcaaactgcctgcaagttttatctaatagtgacagaggaaccaatgtgtcgagcatgaatgtcagtccattgaaacagtgcccacttttctgactmtgctccttaagagacagggcctgtacagcaaggacacagagaagcaggttacagaaaaagggctggctcatccgtgtatgcctggcatttgaggaatgtggctgaaatctcaacactctggttcagaagcacatctgcaatcaaatataacaagacatggtatgagagatgtctggcataccaaggagattcctagaatacagcggataggaaaacctcattacttcaattcccaagaaagagtactactggtagtaatcccaacaggagtatccaagtaactcggtaatcttcagtaaagaaaagaaattgtgaaacaattatagtcagtcctccatctctgtaggttccacatctgtggattcaactcacctcatattgaaaatattaataaataaataaataataacaatataacaattaaaataatgcaaattttaaaagcataacaactatttacatagtatttat

SEQ ID NO: 718946 - DNA, 611 bp, Homo sapiens
tctattactatstcagaaatgcagtgttttttctttgacctcatgattttcctacctttgaagcatagatttgtccatgaagattgtgtgaatgaaacattcacttctgtcttgtgtgtgtgtgtgtgtttaaacacttatatggtggaataattgacatacaatggactgcacatatttaaaatgtaccagttaagttctaatgtatgtatacacctgtgagactatcaacacattaagatagcaaatatatcaatcacacccgaaagtgtcatttttattttattttatttttagttttggagacagagcttcactctgttgcccaggctggagtgcagttgcacaattttggcttactgcaactctccctctcatgtttaagtgattctcctgcctcaacctctccagtagctaggactacaggtgctcgctagcacgcctgcctaatttttgaaattttggtagagatggggttttatcctgttgcccaggctggtctcaaatccctgacctcaagtgatcctccctcctcggccttccaaagtgctgggattacaggtatgagccactgcacctgtccacgcccaaaagtttccttatgacacttt

SEQ ID NO: 718947 - DNA, 611 bp, Homo sapiens
tctattactatctcagaaatgcagtgttttttctttgacctcatgattttcctacctttgaagcatagatttgtccatgaagattgtgtgaatgaaacattcacttctgtcttgtgtgtgtgtgtgtgtttaaacacttatatggtggaataattgacatacaatggactgcacatatttaaaatgtaccagttaagttctaatgtatgtatacacctgtgagactatcaacacattaagatagcaaatatatcaatcacacccgaaagtgtcatttttattttattttatttttagttttggagacrgagcttcactctgttgcccaggctggagtgcagttgcacaattttggcttactgcaactctccctctcatgtttaagtgattctcctgcctcaacctctccagtagctaggactacaggtgctcgctagcacgcctgcctaatttttgaaattttggtagagatggggttttatcctgttgcccaggctggtctcaaatccctgacctcaagtgatcctccctcctcggccttccaaagtgctgggattacaggtatgagccactgcacctgtccacgcccaaaagtttccttatgacacttt

SEQ ID NO: 718948 - DNA, 611 bp, Homo sapiens
tctattactatctcagaaatgcagtgttttttctttgacctcatgattttcctacctttgaagcatagatttgtccatgaagattgtgtgaatgaaacattcacttctgtcttgtgtgtgtgtgtgtgtttaaacacttatatggtggaataattgacatacaatggactgcacatatttaaaatgtaccagttaagttctaatgtatgtatacacctgtgagactatcaacacattaagatagcaaatatatcaatcacacccgaaagtgtcatttttattttattttatttttagttttggagacagagcttcactctgttgcccaggctggagtgcagtkgcacaattttggcttactgcaactctccctctcatgtttaagtgattctcctgcctcaacctctccagtagctaggactacaggtgctcgctagcacgcctgcctaatttttgaaattttggtagagatggggttttatcctgttgcccaggctggtctcaaatccctgacctcaagtgatcctccctcctcggccttccaaagtgctgggattacaggtatgagccactgcacctgtccacgcccaaaagtttccttatgacacttt

SEQ ID NO: 718949 - DNA, 611 bp, Homo sapiens
tctattactatctcagaaatgcagtgttttttctttgacctcatgattttcctacctttgaagcatagatttgtccatgaagattgtgtgaatgaaacattcacttctgtcttgtgtgtgtgtgtgtgtttaaacacttatatggtggaataattgacatacaatggactgcacatatttaaaatgtaccagttaagttctaatgtatgtatacacctgtgagactatcaacacattaagatagcaaatatatcaatcacacccgaaagtgtcatttttattttattttatttttagttttggagacagagcttcactctgttgcccaggctggagtgcagttgcacaattttggcttactgcaactctccctctcatgtttaagtgattctcctgcctcaacctctccagtagctaggactacaggtgcycgctagcacgcctgcctaatttttgaaattttggtagagatggggttttatcctgttgcccaggctggtctcaaatccctgacctcaagtgatcctccctcctcggccttccaaagtgctgggattacaggtatgagccactgcacctgtccacgcccaaaagtttccttatgacacttt

SEQ ID NO: 718950 - DNA, 612 bp, Homo sapiens
tgtgtccttctcgtgtacaatcctctattgaatgacttttttaaaaggcaataattaaataataattaagcaataagccaagaagtcttttatttaagagactgaatgttttatggacagctaagaaagaaagcatttgttgtatactgttattaattgtagattatttgttgtgaccagatcaacaaaacactattactgtaggccattcccccgggacacaagaatgactttgttatgcaaaacttctgtgtaaagctttatactggaatcagattttactccaacagcacttttttctacatagctagcagcacaatgccctgctctctgacctgtactgaaaacatgaggagaaagaatacttaactacttcccttgctactcttccggaaaacataaagctrtgctagcagagctctgaactaggagctcttgagttccagttcactattaaccttagaaaacccacgatacagttttgatgcatgtccctgcccaagtctgatgttgacatgtaatccccagtattggaggtgagtcccagtgggagatgattggatcatggggacaaatttctcattaatggtttagcaccatccccttggtaca

SEQ ID NO: 718951 - DNA, 1384 bp, Homo sapiens
ttttttagcccattcactttcttttctcctggacttacaatgatatgagtgttagactttttgctatagtttcttaggcccttgaggctccgttcattttcttttcttttttttttttttctgtagtctgttttctgtctgtttttcagattgggtcatttttattgttccatcttcaagttcattgagtcattcctctgtcctctccattctgtggttgagcccatcaatttgctttttgtatttcagtaattttttagttctaaaatttccatttggttctttatgtgctttctagttcttgttctaraactggaaagcccaataatacatttttgtactgttactaaagaaagatattttattatcttagttctgtactattaagctgcaaaaaataagaatatccagtggaaactattattaggtctataataatagtcttaatagtttttaggactattttctatatgaattaccattaattatcttattcttacagggacactaattttacttattcaacaagtgtttagttagtacttatacatgacagttttttgttttgttttgttttgtttttgtttttggagatgaagtctcgttctgttgttgcccaggctggagtgcaatggcactgtctcagcttactgcaacctccgccttccgggttcaaatgattctcttgcctcagcctcccaagtagctgggactgggagctacatgccaccatgcccagctagttttcgtatttttattagagatggagtttcatcaggttggccaggctggtttcaaactcctgacctcaggtgatccacctgcctcagcctcactaagtgctgggattacaggcgtgagccactgcacccagcatatatgacaggtttttttgtcaatcagatgtttttgctttagtttcaaatggttaaacagcttatgtttttttattttcagagaaaaagaattacatttctgcctttttggtaggttgcaagcacagagggagaagagaaattttgagctgaattttcttactgtcacacaaaccagttaagaatttttatttacaggcttcaggcttctactgttttatctctagtgcacagatttgtcaatgctttgttatgggacaatactgtattttgaaagggctacaggttttctgagacatagatacacttagctttttgggcagccatccaggcatgggcattaagtatcccatgtactggtcatctccatatactccagtgtgttttaccaatattgtaattatttgtgccatgaaaaagcttgggaagcacttctctagcccacagaaagaatggggttctttctacaaattgcatattgtgtgtgttaggtaataaagcctattctc

SEQ ID NO: 718952 - DNA, 1190 bp, Homo sapiens
ggaatgttttgtcttttgtcgcatgagagaactttgtaatgttattaaaaaccacaaataataaataagttttggattggcttatttgattgtttgcatatattttccttgggatgaaaattaaattattaatagtttgaatcccaggcaaaagggagataattgggtctgtttgcacagaaaaagttgtttttcttttttccctttcactgtcattttggtcttttgttttattgtcatagcattttaatgtggtattaattagtattagagcccttgccatctgctttgatatttatcattgttgctcttaggatagtgggacttttgatatctttttacaatatagatgtaattgactggaacttatgttttgcctgctaaattttgcatgaagatatgcctgttactttttgataactgtgaaaactatgattacacaaatcatttactttctttacttagaatatcattcataacagaatactgtcattatttacagaggccttggttcagccctgagaaagaaagaataatgttttcaaggttatttaacaatgaatatcattgaattatctagtaaaggtaatttactaaatagatcaaagacctgaaagaatcatgaaagaacctctgagaaatgagaactgtaatctattctcacctgtagatgaagcctatttctcccatgcagattcaactgggaatttattggggcttgtgtacactttattattttaatctagaaacctatgcaaaaaagccctcatcataggctcaaatgtaatgttttaatatgatttgacttttaaatttttactgtaatacaggctttcaaaatcttccaaaagtgtttgaagaggaaattttcatttttaaatgaattcacttgcgtagaatttcaatgcatcttttcttcccgtgaatttttatttttcagcatgtagataattagagttgcatgcattttcaaaatttctcagattttgtagagctatataacttcagtattgtgttagagaactgtaagaattggaagtaattggattttgaaaaaaactttgagattatattgaggttataagcataatatagtacacccttatgatcagtgctttgaaatgaaagctggtttgtgtaatcataacmctgaaattctgaagtttagagaggtcgtacaatcagagatc

SEQ ID NO: 718953 - DNA, 1444 bp, Homo sapiens
cagacttttgaaatatatatctcaaatgctagttttaatgattttaaaggagaaaaaatgttgatggtggagatggcaacaagtacttagtttaaccccccaaaaggttctcatagaaatcaataatttgctctaataatttttagcttagtctcataataattattatttgtttcttaaatgtaacatttattggaaataaattgcagaatttttttttcctttgaggccttaatattcatgtcatgaccctcagagaaagctttttaatgtctcagaaaaaatgaagccataaactctttaaaactggtgaaaatagagaataccatagaaatcagttgggtttttgtcacacatttagaaccatgatactatctatracacctctttgatctcatatacaattaaacactcctgcatttctttctttgtttttcacttatgtcttttgccagaagaatagtctcttttttgcccgtttttcttatctgtatctatgttctaatattattagacaagcaaatatttgaactgttttcctttagtattttggagacttttttcttcaagttgttaatctcttaatctaaggcagtggttctcaaattttaatgcacttgaggatcaccagaggacttgttaaaatccaacttccagggcctcattctgattcagtaggtgagaagtgggccccaggaatttataactttataataaataagtgagataatactgacatggaaagtttattaatcacaatttgagaaatacttgtctagggtctatttttgtatttagcagctaaattggtaactataatttaaataatttggatatttcttactcttattcctataaaagggctgattccatttggcaaaaaaaaagatagaaataattttatatacttttttgggctgtcagtttaccttttctgactcaaaagttgctcggtgtctcatactctaggatatgaagtgagggactcgacaaagctatgttggaattggaactgaactgccagtgtttcatgtataaccagtagtggtttttaactgttattctcaagttccaaatttctgtccatttcagtctcaacatagtggttaggtatgtgctgagttctgggccaagatatggatcagagccgtaattatcatagatcctgacatagaatcagacagctaggtgtgcaggtgtgaggtatgtgtgtgggaggtgataactgttaaatcaagtgaattcagcagttggatatgaagttcccttccctaattatggcacagggaaattgttctcattttcttatctcaaataataaaatgtactcttttatcctaaggatattattcatcaacttcacaaaagaatgagacttaatgtctgaataaggaaaaattttaaagatgaattcattatcattttaagttcaaactgaaggaat

SEQ ID NO: 718954 - DNA, 639 bp, Homo sapiens
cccccaatttccttatactatttgatgaatagtccattttttgtttatcgaatcaacaggaatcactaagggaattcaagaaaggagctaggtatgaaatgattatggaatcattttatactgtaccaaaataattagttagaacacattaattgtttccattctgaattaaaaataaaaaatgtgatataaaaataactaacaagaaatgaggggcccacaggaagagccataaaattttactgagtaacataaggaagatgtgagtagcggttcatttcatgttcctaattaggaaggctaagtagtataaagatgcaagctctttgcagataatctcttggagttaataacattctagacataataccagttggacccttgaagtattttatttctaaagttagtctggaagaaacaacacttgtaagaataattaagagtagtgagggagaactcacttgaccagatagtataawatgacaataattgaaaatgtgatactgatagaaaatttggacatatcggtgaaattctaatataatatattaaaactaataaatgataaaatataaaatgcacaacaatccaagtggggagagataaactattcaacaaatagggttggggaaatgcata

SEQ ID NO: 718955 - DNA, 1689 bp, Homo sapiens
attatatagaccacgtaaattgtgtctataattaacaaatgtttaaaatgaaaacgaaatgttaactatatttcacttgtataaaaaattaactgatccacaaaagtacaagcaagcaaaggccacgcagactgaaatacgctagctctcctctgtgccttccttgagggctcaagactcctgtgaccgatcataaacaagaggtattttcatacaaaaacttaatttgaatgctattcaatacactagcctcgcgaacgtttaaaagaatggtcgtatttatgggcacaaaatccaatttcactaatttmtcttaatatccaccctagaggattcatacccaactgttatttccagggagagagacaaaggcgagaaaaggtcgggggaaattgcacttaatgtttgatttgatttctttggatagagatgcaggtactgctgtacaaatttcgcacacacacacacacacacacacacacacacgacacacgaatcaacatccgtgccttacgttgctttctgtttaccttcacagcaaccttcgagatgtgtgagtttaagcagatgcaacaccctttgacaacaaagacgcagcacactgggttaaagtggattgaaatcagacatgtcacattttaggagagaatgcatgcaagtagggcattagtccaattcttttgtactgagcatttcaaagttgagacccagtgggtggggcgaaaataaatcaagccctcctatggcgagaatgtacacggactccagcatctccaatctgaccctatcttttgctctccggattgtcagctgcttcgggggttgtctgatatatgcctccttttctcacttctaagactttttagctgggagtgtgtttgaaaacacttcagaaaaaggatggaaaacacagtgtctactttgaaatgcgttcctttgttaaatccctctcccaggaggaccaggctcccaacacctgagggcagccgatgactggctctgctctccccggtgacctcacatgctcccggcagctccagcacagagctctcgttctcactcagctattataacaaagttgtacaagaaaagaaaaaagtccttcgtcccatccttaattgggcactctttagaaaggagatgctggggaatgtttctagacatctgacgcttataaggaattctacatattatccgagggtagatacgaaaagtcttttcttgacaaatcatcccaacatttaaaaacatttacctccagaaaagcatctgagtattttctcttagacgacattcctcaacgataacctcattgtgaacaaggatgtaacgcgtggtgatggttacaaatggtaacagagcttccagtaaaatgtgttctattagtaagccctcatggtgttttagctcagcagaaacagaaaagaaggctgatttccctccctacattatattataaaaactttcaaccatacagaaaaatggaaagaactgtagagagaacttgtaatgcccacactgagactgtgcacctggcattccgcttggcctgcttcctcccagcctctcatctccccatccgtccagtcatccatcaatccttcttggtcttttgctgccaggagcctaattggagctgtcggcggctctgtctctgggaggggacatgatgatacatctccattgggc

SEQ ID NO: 718956 - DNA, 1689 bp, Homo sapiens
attatatagaccacgtaaattgtgtctataattaacaaatgtttaaaatgaaaacgaaatgttaactatatttcacttgtataaaaaattaactgatccacaaaagtacaagcaagcaaaggccacgcagactgaaatacgctagctctcctctgtgccttccttgagggctcaagactcctgtgaccgatcataaacaagaggtattttcatacaaaaacttaatttgaatgctattcaatacactagcctcgcgaacgtttaaaagaatggtcgtatttatgggcacaaaatccaatttcactaatttctcttaatatccaccctagaggattcatacccaactgttatttccagggagagagacaaaggcgagaaaaggtcgggggaaattgcacttaatgtttgatttgatttctttggatagagatrcaggtactgctgtacaaatttcgcacacacacacacacacacacacacacacacgacacacgaatcaacatccgtgccttacgttgctttctgtttaccttcacagcaaccttcgagatgtgtgagtttaagcagatgcaacaccctttgacaacaaagacgcagcacactgggttaaagtggattgaaatcagacatgtcacattttaggagagaatgcatgcaagtagggcattagtccaattcttttgtactgagcatttcaaagttgagacccagtgggtggggcgaaaataaatcaagccctcctatggcgagaatgtacacggactccagcatctccaatctgaccctatcttttgctctccggattgtcagctgcttcgggggttgtctgatatatgcctccttttctcacttctaagactttttagctgggagtgtgtttgaaaacacttcagaaaaaggatggaaaacacagtgtctactttgaaatgcgttcctttgttaaatccctctcccaggaggaccaggctcccaacacctgagggcagccgatgactggctctgctctccccggtgacctcacatgctcccggcagctccagcacagagctctcgttctcactcagctattataacaaagttgtacaagaaaagaaaaaagtccttcgtcccatccttaattgggcactctttagaaaggagatgctggggaatgtttctagacatctgacgcttataaggaattctacatattatccgagggtagatacgaaaagtcttttcttgacaaatcatcccaacatttaaaaacatttacctccagaaaagcatctgagtattttctcttagacgacattcctcaacgataacctcattgtgaacaaggatgtaacgcgtggtgatggttacaaatggtaacagagcttccagtaaaatgtgttctattagtaagccctcatggtgttttagctcagcagaaacagaaaagaaggctgatttccctccctacattatattataaaaactttcaaccatacagaaaaatggaaagaactgtagagagaacttgtaatgcccacactgagactgtgcacctggcattccgcttggcctgcttcctcccagcctctcatctccccatccgtccagtcatccatcaatccttcttggtcttttgctgccaggagcctaattggagctgtcggcggctctgtctctgggaggggacatgatgatacatctccattgggc

SEQ ID NO: 718957 - DNA, 1805 bp, Homo sapiens
ttatcatagtggcctgaggtgacatacatcctcagcttacgaagataacaggattaagagattaaagtaagacaggtgtaagaaattatgaaagtattatttgggaactggtaaatgtccataaaatcttcacaattatggtcctctgccatggctccagctggtccctccattcagggtccctgacttcccgcaacatttagcctttctaatcttcaccaatctttactacttaacctctccatagctttaaaagaagaaaacaaaagtgccttcttcatgggatagttgtgaggttaaatgaaatattgtaggtaaagcatgcctggcacacattagctttgagtaaacgttttaaataggtggtagaaaagagaactcttaaatttgtagtcatcactaatgccatcttgtattaacttctaacagaattatcagtgagttttgtcctagtgtttaaccttctagttgaaaattaggaaatccatgtctttttctgagcccttgttatgaatcttttagaaaatatatctatttaacaatgagtatatatttacatgtaataagaaaatttgtctaatgtcattctgaaatatcttagtttaatgatgaaatacaaatattattcaatctacctttctagttgttcagtccctctgattttatcacatttacttattctcctcttagacttttctttcacctactcctcaattattagtgtttcccagaattctattctctgctgtcttccccaccctcacttgcttgtcttctttattctctttgatcctttgcacaccaatggcttcaattactgccaatctattgatatcaccctgtataacctccgtgttgatacatatcaatagaaggtgcagattagcagaaataccaccacacagacaccacttgggtttactttatctaaaggatacataaaggaattagttgcaatatcagccaagagatgaaagtgcaagtttctaagccttccaaatactcagaccttctggaatgcataacatcagaccttctggaaacttaactttctcttccagtcctagccttatatacataaagctggactagtcctatacatagccccttccctagagaccacttcacctagacatggtagatgatcaatcacagagtaatacaatacacaatatgatagctaggatacagtttagaggatattcagatatgaacaaattatttattctaagctttcctaggctaacacagtctagtttagtgtattcctgaatttagtatggtgagaataaaacatgaaactgtagtcttaatatctctgaaagctatgatgttgagaggtgtcagtgtgctggcagccctcacagccctcgctgactctcagcgcctcctctgcctgggctcccactttggcagcacttgaggagcccttcagcccgccgctgatcggtgggagcctctttctgggctggccgaggtcggacccggctccctcagcttgcagggaggtgtggagggagaggcrtgagctggaaccagggctgcgtgtggcacttgcgggccaactggaattccgggtgggcatgggctcggtgggccccacactgggagccgctagccggccctgccggccctggccagtgaggggcttagcacctgggccagcagctgctgtgctcgacttcttgccgggccttagctgcctccccacggggcagggctcaggacctgcagcccgccatgcctgagcctcgccccaccccaccgtgggctcctgtgcagcctgagcctccccaacgagcacc

SEQ ID NO: 718958 - DNA, 1805 bp, Homo sapiens
ttatcatagtggcctgaggtgacatacatcctcagcttacgaagataacaggattaagagattaaagtaagacaggtgtaagaaattatgaaagtattatttgggaactggtaaatgtccataaaatcttcacaattatggtcctctgccatggctccagctggtccctccattcagggtccctgacttcccgcaacatttagcctttctaatcttcaccaatctttactacttaacctctccatagctttaaaagaagaaaacaaaagtgccttcttcatgggatagttgtgaggttaaatgaaatattgtaggtaaagcatgcctggcacacattagctttgagtaaacgttttaaataggtggtagaaaagagaactcttaaatttgtagtcatcactaatgccatcttgtattaacttctaacagaattatcagtgagttttgtcctagtgtttaaccttctagttgaaaattaggaaatccatgtctttttctgagcccttgttatgaatcttttagaaaatatatctatttaacaatgagtatatatttacatgtaataagaaaatttgtctaatgtcattctgaaatatcttagtttaatgatgaaatacaaatattattcaatctacctttctagttgttcagtccctctgattttatcacatttacttattctcctcttagacttttctttcacctactcctcaattattagtgtttcccagaattctattctctgctgtcttccccaccctcacttgcttgtcttctttattctctttgatcctttgcacaccaatggcttcaattactgccaatctattgatatcaccctgtataacctccgtgttgatacatatcaatagaaggtgcagattagcagaaataccaccacacagacaccacttgggtttactttatctaaaggatacataaaggaattagttgcaatatcagccaagagatgaaagtgcaagtttctaagccttccaaatactcagaccttctggaatgcataacatcagaccttctggaaacttaactttctcttccagtcctagccttatatacataaagctggactagtcctatacatagccccttccctagagaccacttcacctagacatggtagatgatcaatcacagagtaatacaatacacaatatgatagctaggatacagtttagaggatattcagatatgaacaaattatttattctaagctttcctaggctaacacagtctagtttagtgtattcctgaatttagtatggtgagaataaaacatgaaactgtagtcttaatatctctgaaagctatgatgttgagaggtgtcagtgtgctggcagccctcacagccctcgctgactctcagcgcctcctctgcctgggctcccactttggcagcacttgaggagcccttcagcccgccgctgatcggtgggagcctctttctgggctggccgaggtcggacccggctccctcagcttgcagggaggtgtggagggagaggcgtgagctggaaccagggctgcgtgyggcacttgcgggccaactggaattccgggtgggcatgggctcggtgggccccacactgggagccgctagccggccctgccggccctggccagtgaggggcttagcacctgggccagcagctgctgtgctcgacttcttgccgggccttagctgcctccccacggggcagggctcaggacctgcagcccgccatgcctgagcctcgccccaccccaccgtgggctcctgtgcagcctgagcctccccaacgagcacc

SEQ ID NO: 718959 - DNA, 974 bp, Homo sapiens
taggagagcaggccttacctatcaatgcacccttttcctacatctttttttctgcattgatgctgggaaactaaacaaggaggagagcatgggacacaattgtcaatctcccttttcaaggcatccttaagaacttcatccatgaataatatattgtttgtacttagtatggtattaatttttaaagtggataaagtactttttcatttttgtttaaagcacatgttatcatgttgaataacatgaaacatgtttttccagaggggagcctcagttgatttttcctctgttgaaaaggcactgaatttcattcctacaggttatgtatgctccatttgataggatgatgttccctgaggacaaaatttagactacaacattgctctgcatatcagcccttacacaaataaatggtttggcctagagatacctgatatgggaaggggactggtgaacaaatgttaaggaaatctcttttcctgtgggggtcctgaatccctaaatattataatccatagcctaactaaagtactaaattattgtgtttgagattttattctaaaagtcctctgccacacccagatggatagtctgcaagtctggattgaaatagtaacctctactctagtatctttcccatctaayctgttatcttagataataatctttcctttcccgagagttctgttctaagatgtccctctgggccagcacaattgagttagaaaagtgggaagtggacaggagacaaaagagtgaatctctactatgagctggtcctaaggatcacttaccttaatgatgtcctgatgtttcattaatatgggtagaatttgattcctctgttggtagtatattcagtaccataaggtggaaccccaccactcacaagagaaaacaaagaagaaaatgaagctttatgtagttgagcttgagctcagccatggggctctaaagagatattctccatcgtc

SEQ ID NO: 718960 - DNA, 1333 bp, Homo sapiens
gtcccatcagcctgtcactcaactgagggggccagagagaggcggggagctcccactccagtcatgcaacagctcctctcaaatgaagacagggcaggaggatctcccggaggctctgccacacacggggagcttatagcaagttgagcagtatctcccgagacttcatgtccactcagaacagyggaataggaccttatttggaaataagttctttgcagatgtaattggttaaggatcttgaagtcatcctggatttaggggagccctaaatccaatgaccggtgtccttataaatgaaaggagaggaggatttgggcacagagacacagaaaacaaggccatgtgaaggcagaagtggagattggtgtgacgcggctacaagccacaggatgccacgcactgccagagccaccagcacctagaaggcaacgaagaaagatccccctcccgccttcagagggggctcggccctgccagcactcggattttggacttctggccctagaactgggagacaacaagctcctgctgctttgggccacccagtttgtggtaactgtggcccatgttctaccaatatgtcctgttccaggctctgagacatctggggaaggggaggactgactttcctcattcacaaccaaagcatctgcagcccagagagatcagggcacgtggccaagagcgttcagcacacttcctctatggcactgaccctcctctgagctcacggcatcaggaggccagggtgctagacacacgccagcagagacacctatgagctgtgtggcatcaggccagtccctgagcctctctgggctgtttcctcatttgtaaaacagacaccatagcattatcttctttgcagaggattaaatggtcaatacacattaagcccatggcacagtgccatgaatttcaagtgctctctgttcagggggcacagctggtcgctggaccctggctcagggttgagcatgcaccacaccagcggcacagccctgtgatcctgctcacagccccttccgcccgtcacaccccctggtcctcaggtcagcctcaggagataggcctggcagggctgtgtcccatgttccggctggagaaactgcagccagggtgtaggcgactcacctccaggacaccgagctccctcccacggtcccacgctgcccccagccatgcctccacctccctccttccccagccccaggctcagacagcctccctcctattcctgcccatcccccacacccagcacgacctccccagccacactgtctcggcccaggccagaggcccctatccctcaatggcgacacatccttca

SEQ ID NO: 718961 - DNA, 1087 bp, Homo sapiens
tttggtgctgtccatggtgctgattgacagagcgtctctcttttcaactaagtttaaaaccggccccagtgtctgtcccttcctgccccacagcaagaggcggtggcctccacaactgctctcaggaattctagaatcagggcctggtagcagctgtccccaggatcgctggacctcacatcgcagggcctgaccctctttacatggtcgaaaaggacgagcttgaaagcaggaccgctgaccaggcggggctttcgtccctccgggggcagcgtctgctgtggagtgcggcctgcatctccgtgacaggtcgttatcagtgagagggcatcagagcctcatcatctgatcttcttagaaagccttattcttctgcaaaaggacagagaggtcacattcatcttcaaatccccaaaggagaggctacgaccacagcttttctgggacagaatcacgcaatcaccaggcctgaccttggcacctggggccatggcaagcttggaaagaggaccccagatatcccctcagcacagccaactaaatgccaggagcttttgtgtattaggcactttatgtttgtgaactaattgtaaactcacaacaaacatacaaatccttccacttatagatgggaggactgaagctcagagaggttaggcaacttgtctgaggttgcacagtggtgactggaacggggcttgaacccaggccccaggctccaatgctcttggaggttctctatggttcttgtcccactgctgagaacaaacacagtgacaaacagattgagaactgaccactctacagcacccagaatgccactgacagagccagagctgaaggaacctcatgctccctcagagacaaccccctagctcagaccacaargctgctaagtacaccacaggccaccccaagccagaagattccttcacccgccttcaagggcccagtatatcctgcgcctgaggccagcagggatgcctgtgtctctactaggaacaggtaagaatctttgtttgtgagctgattcagcttcaaagagatctctgggggccaaagaggtgggcccagggcttcccaggca

SEQ ID NO: 718962 - DNA, 637 bp, Homo sapiens
tgtaagagagagtagaatgacagctgccagaggctagaaggaaggggaaataggagttgcttatcaatggccataaagtctgttatacaggatgaataagttcttgatatctgctgtacaacattatccctataattaataatactgaattgtacactcagaaatttatgaagaggttagacttcatgccaagtattcttaccacaataaaataaaataaaatcagcaagtagactaaggaagccaaagccccagtttcacatgtgaatggagcagtggggcagggattacatctactgttatggcagccacgacacaaaagggcaccactttattaaaaatcactctcacaattgctccatactcagaacaccttcagtgctttcttagcacttstttatgttgttatgactgtgacttcataaggctgctttttaaaataaataagccagaatataaatccaactaaatgtcatctccttcaaaatagtcacagagaaaagacctatacttgtttcaatgatatcccaaacatctatgtcaaaatcttcagttactaacactttctcccttaagagtcatttttttaatgaattaaaattcatttaagtcaagattgagaaggtgaatgatcaga

SEQ ID NO: 718963 - DNA, 595 bp, Homo sapiens
gcacacagagtagataataaataaatgcctgtggattaacatgcccaaatttacatggggaaaagtcaagtaaagtagggggtgtagagcaaagtattagttcaagctgatgataaaaatgatgtgagggcttattcgaggaagggctcatttgttgaatacaacaaacttttcatatccttctcatcacatatcagtaagtgtacctgaaacttkgcaatagcttgtgattctaattgctgttgagataagtgtaacagaaaagataaagctttccattttgtccccagaaagtgggtacctcatcatgtttatcctgcagcccaatcttgcacacagccatctgcagttatatttgccattgtaaaattaacagcccatgtggttcctagaaaatgtccaggttgaaaagggaacttctcactacatggtgtgcagtcagaaacagctggccccatggccagggaggattctactgccaccactgccgaggcatttgccatgggtcattgccattcttggagcaccagactggcccatcagcccttcgtgatacgatacaaacccacaagcaggtggttgctgctccacttca

SEQ ID NO: 718964 - DNA, 595 bp, Homo sapiens
gcacacagagtagataataaataaatgcctgtggattaacatgcccaaatttacatggggaaaagtcaagtaaagtagggggtgtagagcaaagtattagttcaagctgatgataaaaatgatgtgagggcttattcgaggaagggctcatttgttgaatacaacaaacttttcatatccttctcatcacatatcagtaagtgtacctgaaacttggcaatagcttgtgattctaattgctgttgagataagtgtaacagaaaagataaagctttccrttttgtccccagaaagtgggtacctcatcatgtttatcctgcagcccaatcttgcacacagccatctgcagttatatttgccattgtaaaattaacagcccatgtggttcctagaaaatgtccaggttgaaaagggaacttctcactacatggtgtgcagtcagaaacagctggccccatggccagggaggattctactgccaccactgccgaggcatttgccatgggtcattgccattcttggagcaccagactggcccatcagcccttcgtgatacgatacaaacccacaagcaggtggttgctgctccacttca

SEQ ID NO: 718965 - DNA, 595 bp, Homo sapiens
gcacacagagtagataataaataaatgcctgtggattaacatgcccaaatttacatggggaaaagtcaagtaaagtagggggtgtagagcaaagtattagttcaagctgatgataaaaatgatgtgagggcttattcgaggaagggctcatttgttgaatacaacaaacttttcatatccttctcatcacatatcagtaagtgtacctgaaacttggcaatagcttgtgattctaattgctgttgagataagtgtaacagaaaagataaagctttccattttgtccccagaaagtgggtacctcatcatgtttaycctgcagcccaatcttgcacacagccatctgcagttatatttgccattgtaaaattaacagcccatgtggttcctagaaaatgtccaggttgaaaagggaacttctcactacatggtgtgcagtcagaaacagctggccccatggccagggaggattctactgccaccactgccgaggcatttgccatgggtcattgccattcttggagcaccagactggcccatcagcccttcgtgatacgatacaaacccacaagcaggtggttgctgctccacttca

SEQ ID NO: 718966 - DNA, 605 bp, Homo sapiens
tcactgcaacttccacctcccgagttcaagctattctcatgcctcagcctcccgagttcaagctattctcatgcctcagcctcctgagtagctggaattacgggtgtacgccaccatacctgactaatttttgtatttttagtaaagatggggtttcgccatgttaggctaggctagtctcaaaatcctgacctcaagtgatccatccgtstcagcttcccaaagcgctggaattacaggtgtgagccactgtggctggcctgttggttcatttttgaaaggttgtttgggtggtcacttacctctatatgctggaaagtccattgcaagactctaaagcaagtccctgagaaaggatttcttgaaacatgtttgcttaacaaaatgaatctgaatcgcctggtgtatgttgttttgttttgttttgttttttgagatggagtcgcactctcttgcctaggctgaagtgcaatggcgccatgtcagctcactgcaacctccacctcctgggttcaagtgattcttctgcctcagcctcccgagtagctgagattacaggcgcccgccaataggcctagctaatttttgtatttttagtagagaca

SEQ ID NO: 718967 - DNA, 1084 bp, Homo sapiens
ttgaaccatcccaacatctaacaacttggtaaaagagaatgagcctgcaacagagatagaggatagaagagtagaagatcagagtgtcacagaagataaaggaaaaatgtgtttcaagaacatcaatgctgctaaagaggtaaaggaagaggaggactgcatgggaggtaggaaagggatgatttcagataccaagtggcactcaggtgacctcagttataaccgttttgatagagtgatgggggcgggagccaacatggggcatttggaggaaggaagagttgtcactgcaaggcagatgcttccctgctctgcacacctcagtaaccaaggctgtgactacgcagggaagattcatcagtttaagagcttcctcatagcagtattccaagtcatgcctttaatttgccatttactaaactactaaccttctttttaagagatgaggtcttgctatgctgcccaggctgctctccaacttctgggctcaagggattctcccacctcaacctctcaagtagttgggattacaggcgtgagccaytgcacctggcttaaactactaacttaaacattgatttacacaaaaaacattcaaatactgaagagccataactaccatatgggtttgctattaactgcctcctcattttccaggtaattcatgaaatccagccagaagtagctcagagagcaactccggactgacctttgtctggctttactacttcctttgtagcctgatggcttcatcatccctgctccatttccatgtcctattccagtccaagatccttgctgatccatgacaatctatgttagaccagccacttgcccacatcagagccaaactagagttctgtctgtactgagagttctgtctctacacctgtttatacatagctccaagatcatgcagagatttcagtaacagcagggttttgctctgtcgtgtcccaggcaagtgttgaagcaactagaaatgaaagttctgcaaacatgctccagagaaaacctatgaatatgacctacagataccatctccagttgtgatgggtgagtagttaagatctccctggttgta

SEQ ID NO: 718968 - DNA, 1084 bp, Homo sapiens
ttgaaccatcccaacatctaacaacttggtaaaagagaatgagcctgcaacagagatagaggatagaagagtagaagatcagagtgtcacagaagataaaggaaaaatgtgtttcaagaacatcaatgctgctaaagaggtaaaggaagaggaggactgcatgggaggtaggaaagggatgatttcagataccaagtggcactcaggtgacctcagttataaccgttttgatagagtgatgggggcgggagccaacatggggcatttggaggaaggaagagttgtcactgcaaggcagatgcttccctgctctgcacacctcagtaaccaaggctgtgactacgcagggaagattcatcagtttaagagcttcctcatagcagtattccaagtcatgcctttaatttgccatttactaaactactaaccttctttttaagagatgaggtcttgctatgctgcccaggctgctctccaacttctgggctcaagggattctcccacctcaacctctcaagtagttgggattacaggcgtgagccactgcacctggcttaaactactaacttaaacattgatttacacaaaaaacattcaaatactgaagagccataactaccatatgggtttgctattaactgcctcctcattttccaggtaattcatgaaatccagccagaagtagctcagagagcaactccggactgacctttgtctggctttactacttcctttgtagcctgatggcttcatcrtccctgctccatttccatgtcctattccagtccaagatccttgctgatccatgacaatctatgttagaccagccacttgcccacatcagagccaaactagagttctgtctgtactgagagttctgtctctacacctgtttatacatagctccaagatcatgcagagatttcagtaacagcagggttttgctctgtcgtgtcccaggcaagtgttgaagcaactagaaatgaaagttctgcaaacatgctccagagaaaacctatgaatatgacctacagataccatctccagttgtgatgggtgagtagttaagatctccctggttgta

SEQ ID NO: 718969 - DNA, 2180 bp, Homo sapiens
ggctctattacaatttgcttaaaatgtgtaaattttgttctgggcttcccactggccaatttaaagaaattcaatcagttacacaagacaacgtccacatggagggagaaaaaatggctatcaggagaagcaaagctatttctgagaatgaatcctgaaagaaagttaactaagagactggtctgattactgaattatatctctagcaatatcaattatcccatacacactgtttaattctgaatcatatatggctctgtcttataatgtccttcattttcagccaatggacacacaggatggtaaaagttgggatttttaaagctaaaatgatgtcattgatttccagctgtctattgatgtggcttaatccagagataaaatctagaacgttttatgcagggaktcccaaaaactagtccacagactagatgcatcaggatcacctgcagcttacctttaagaagatacagatggctggatttcaaccctggggaatctgattgattggacaattccaaatgaattctagatgagaaccactcatctagaggattataaagtgcctcaaccaagccttctgatatgtaggcaacatttctctcagtccagattttaataacttttagatagaaggtgagactccaagtcaattatgggttccctcaatgtgacagtgtaaacccaccaaactcattgctacggtctgaatgtgtctgaaaattcatatgttggaagtttgatcctcagtgaagtggcattgggaggtggggcctttggggaggtgaaatgactggtgctgtttgctatggtttggatgtggtttctttgttcccaccaaagctcatattgaaatttgacgcccagtgtagtggtgctgggagatgaggcctactgagagatgtttgagatgtgaggacaaatcatgaatggcttagggaagttcttgtggtaggaagtgagttcttactcttgtgagaataaattagttcttttaggaatagttgctgagagagcgggttgttataaagccaggacgtccctcaggtctccctcttcttcacatgtgttcgcttcccctttgactttctccaccatgttatgatgcagcacaaaagccctctccagaaaccagggccatgcccttgaacttctcagcctgcagaaccatgaattaaataaaccaccttcctttataaattacccagactcggacgttaatagcaacataaaacagactaagccaccatgaccaaaaaaaaaaaagcttgctggagtggattcactctcttcttctcttctgctatgtgagcacacagcaagaaggccctcacaagacaccagaatcttgatcttggactttccatcctccagaactgtggggcaaaaatttgttttttatgttacccaatctcaggtagtctgttgtagcatcacaaaaggactaagacacttatcacctcaaaaagattgtgttatggagtgaaagtgactcatcacccacacttccatgtgccacgggggcttggtctgaattccatcacctcatttattagccacatggtccttagctgggtcagggacctctctaggtttacttggcctagagaaatgaagatgacaaagccagtttcatccatttgttgtaatagttaaataagagtagtgtgaaactcttagcaaaatgcctgagtggtggaaacatccaataaaggaagcttattgttgtttattattcctctaggagatatcattttctaagactgtgccccaagatatcaccctgcctggctgaaattgtcaaactgcaagataaaccattgagatgctccacagatcaaaactgacctccaaggtgcaaagctgtgacataaacccagaaagtgggccctccctggctacctccaacccttggtgagggtgtcttctacacagcccagttgggagatgggaggacaggtgtgcagaatgccatgtgtaactaagcagagagtgttgttacagaaatgaggaaggctgtgagagcaaacgactcaaaacccataaaaataaaccagactccacatgcagcacttaaatgcaacaaggactcaggaggcctcctagagaatggttcatgttatttttatttagtaagggtcttttaaatcctttattggttaattcttctattggctgga

SEQ ID NO: 718970 - DNA, 2180 bp, Homo sapiens
ggctctattacaatttgcttaaaatgtgtaaattttgttctgggcttcccactggccaatttaaagaaattcaatcagttacacaagacaacgtccacatggagggagaaaaaatggctatcaggagaagcaaagctatttctgagaatgaatcctgaaagaaagttaactaagagactggtctgattactgaattatatctctagcaatatcaattatcccatacacactgtttaattctgaatcatatatggctctgtcttataatgtccttcattttcagccaatggacacacaggatggtaaaagttgggatttttaaagctaaaatgatgtcattgatttccagctgtctattgatgtggcttaatccagagataaaatctagaacgttttatgcagggagtcccaaaaactagtccacagactagatgcatcaggatcacctgcagcttacctttaagaagatacagatggctggatttcaaccctggggaatctgattgattggacaattccaaatgaattctagatgagaaccactcatctagaggattataaagtgcctcaaccaagccttctgatatgtaggcaacatttctctcagtccagaktttaataacttttagatagaaggtgagactccaagtcaattatgggttccctcaatgtgacagtgtaaacccaccaaactcattgctacggtctgaatgtgtctgaaaattcatatgttggaagtttgatcctcagtgaagtggcattgggaggtggggcctttggggaggtgaaatgactggtgctgtttgctatggtttggatgtggtttctttgttcccaccaaagctcatattgaaatttgacgcccagtgtagtggtgctgggagatgaggcctactgagagatgtttgagatgtgaggacaaatcatgaatggcttagggaagttcttgtggtaggaagtgagttcttactcttgtgagaataaattagttcttttaggaatagttgctgagagagcgggttgttataaagccaggacgtccctcaggtctccctcttcttcacatgtgttcgcttcccctttgactttctccaccatgttatgatgcagcacaaaagccctctccagaaaccagggccatgcccttgaacttctcagcctgcagaaccatgaattaaataaaccaccttcctttataaattacccagactcggacgttaatagcaacataaaacagactaagccaccatgaccaaaaaaaaaaaagcttgctggagtggattcactctcttcttctcttctgctatgtgagcacacagcaagaaggccctcacaagacaccagaatcttgatcttggactttccatcctccagaactgtggggcaaaaatttgttttttatgttacccaatctcaggtagtctgttgtagcatcacaaaaggactaagacacttatcacctcaaaaagattgtgttatggagtgaaagtgactcatcacccacacttccatgtgccacgggggcttggtctgaattccatcacctcatttattagccacatggtccttagctgggtcagggacctctctaggtttacttggcctagagaaatgaagatgacaaagccagtttcatccatttgttgtaatagttaaataagagtagtgtgaaactcttagcaaaatgcctgagtggtggaaacatccaataaaggaagcttattgttgtttattattcctctaggagatatcattttctaagactgtgccccaagatatcaccctgcctggctgaaattgtcaaactgcaagataaaccattgagatgctccacagatcaaaactgacctccaaggtgcaaagctgtgacataaacccagaaagtgggccctccctggctacctccaacccttggtgagggtgtcttctacacagcccagttgggagatgggaggacaggtgtgcagaatgccatgtgtaactaagcagagagtgttgttacagaaatgaggaaggctgtgagagcaaacgactcaaaacccataaaaataaaccagactccacatgcagcacttaaatgcaacaaggactcaggaggcctcctagagaatggttcatgttatttttatttagtaagggtcttttaaatcctttattggttaattcttctattggctgga

SEQ ID NO: 718971 - DNA, 2180 bp, Homo sapiens
ggctctattacaatttgcttaaaatgtgtaaattttgttctgggcttcccactggccaatttaaagaaattcaatcagttacacaagacaacgtccacatggagggagaaaaaatggctatcaggagaagcaaagctatttctgagaatgaatcctgaaagaaagttaactaagagactggtctgattactgaattatatctctagcaatatcaattatcccatacacactgtttaattctgaatcatatatggctctgtcttataatgtccttcattttcagccaatggacacacaggatggtaaaagttgggatttttaaagctaaaatgatgtcattgatttccagctgtctattgatgtggcttaatccagagataaaatctagaacgttttatgcagggagtcccaaaaactagtccacagactagatgcatcaggatcacctgcagcttacctttaagaagatacagatggctggatttcaaccctggggaatctgattgattggacaattccaaatgaattctagatgagaaccactcatctagaggattataaagtgcctcaaccaagccttctgatatgtaggcaacatttctctcagtccagattttaataacttttrgatagaaggtgagactccaagtcaattatgggttccctcaatgtgacagtgtaaacccaccaaactcattgctacggtctgaatgtgtctgaaaattcatatgttggaagtttgatcctcagtgaagtggcattgggaggtggggcctttggggaggtgaaatgactggtgctgtttgctatggtttggatgtggtttctttgttcccaccaaagctcatattgaaatttgacgcccagtgtagtggtgctgggagatgaggcctactgagagatgtttgagatgtgaggacaaatcatgaatggcttagggaagttcttgtggtaggaagtgagttcttactcttgtgagaataaattagttcttttaggaatagttgctgagagagcgggttgttataaagccaggacgtccctcaggtctccctcttcttcacatgtgttcgcttcccctttgactttctccaccatgttatgatgcagcacaaaagccctctccagaaaccagggccatgcccttgaacttctcagcctgcagaaccatgaattaaataaaccaccttcctttataaattacccagactcggacgttaatagcaacataaaacagactaagccaccatgaccaaaaaaaaaaaagcttgctggagtggattcactctcttcttctcttctgctatgtgagcacacagcaagaaggccctcacaagacaccagaatcttgatcttggactttccatcctccagaactgtggggcaaaaatttgttttttatgttacccaatctcaggtagtctgttgtagcatcacaaaaggactaagacacttatcacctcaaaaagattgtgttatggagtgaaagtgactcatcacccacacttccatgtgccacgggggcttggtctgaattccatcacctcatttattagccacatggtccttagctgggtcagggacctctctaggtttacttggcctagagaaatgaagatgacaaagccagtttcatccatttgttgtaatagttaaataagagtagtgtgaaactcttagcaaaatgcctgagtggtggaaacatccaataaaggaagcttattgttgtttattattcctctaggagatatcattttctaagactgtgccccaagatatcaccctgcctggctgaaattgtcaaactgcaagataaaccattgagatgctccacagatcaaaactgacctccaaggtgcaaagctgtgacataaacccagaaagtgggccctccctggctacctccaacccttggtgagggtgtcttctacacagcccagttgggagatgggaggacaggtgtgcagaatgccatgtgtaactaagcagagagtgttgttacagaaatgaggaaggctgtgagagcaaacgactcaaaacccataaaaataaaccagactccacatgcagcacttaaatgcaacaaggactcaggaggcctcctagagaatggttcatgttatttttatttagtaagggtcttttaaatcctttattggttaattcttctattggctgga

SEQ ID NO: 718972 - DNA, 636 bp, Homo sapiens
ttaattagcttaattgtggaaatcatttcacaatgtatctgcacatcaaaacatcatgttgcatacctcttaaatatatagaatttttatttgtcaggtataccgcaataaacgtgaggggcaagaagagtcatatgttaagagtttaaggcctgtgcatgaattggggaagcagaaatgccaactttttaattttaaaattgttcacaaattattgcttcatggaaagatycagattggaaatacaaggagtggcagagttaagggaacattattttagtaaagaagcacgctatgttaaagcaaagaaagtgccctggagaagatattagaaaggtaaaggagggaagtagataactttatgagtaaatcagacaggaaatgaaaaagagaggactgaatccaggaaggtaagttagactttgctaaccacaaggcccttttttaccctacatagaaataaaagcttagatggagagtagaaatcaaaggcaaataggaaagaataaaataaagaagttcaggtggagtcattttaattttgatagaaacagtgaattttaatatctgggttatcaagcacaagcccactccaatgttgcgccaattctataattctctgtacagcatcctggc

SEQ ID NO: 718973 - DNA, 548 bp, Homo sapiens
caaactaatgtgtctgctaaccatcatgcttatgaaatattacatgtgttgatcactctcttctcccaattaagattccactccaaattaatgaaatgatataccttcttaagaaaactcttttaaaagtggtgcaaatgccagaaactccaggaagggtagaaggaagacactgttcatgtgtaggagcctcaggtacccttcagtgctatcacatatgcactatttctgtccctgcatatgtggtactgagcaacttgttgaccctcgcgtgccatgtttccgagatgagaatatcmccatacaacttgtgagccattaaaaaaaatctggtcatcttaagcatctagagataatgctttaggtcactttttctgcttcttgctctgttttgcatttgatgatgatgatcatcatagaaaatatttattgagtgcttagttgcttgtcaggcctatgctgaatgctttacaaatattttctcattgatgacaaccatgcaatgacacagcagttatactttccccgtttatagatgaggaaataga

SEQ ID NO: 718974 - DNA, 466 bp, Homo sapiens
gagccactacagacagaggtttaatactaaatctgcacaaacttctaattctagcgtcagacaacagcaatttatgctccaggtaagaattttggagaaaaagcaaaactggatttatgcaacagatatttatttgagtacaamtttacatgcagtaccctaaaaggtgtgatataagctgagaaactttaaaatttaatgtggctccaatagaaacttttcacctctgaaagataaaattaaacattggataacttcacaaaatgaatttgaaacccttacaaatttggaaaaattcactcagataaacaatttaaaatgagaggattttaggaatatattttatgtggaagataaaattttgttctatattttgaatgagttactttttataaattgacaagtctttataatttaattttaatttaatataatttaattttgtagttttagccattttctgagt

SEQ ID NO: 718975 - DNA, 466 bp, Homo sapiens
gagccactacagacagaggtttaatactaaatctgcacaaacttctaattctagcgtcagacaacagcaatttatgctccaggtaagaattttggagaaaaagcaaaactggatttatgcaacagatatttatttgagtacaactttacatgcagtaccctaaaaggtgtgatataagctgagaaactttaaaatttaatgtggctccaatagaaacttttcacctctgaaagataaaattaaacattggataacttcacaaaatgaatttgaaacccttacaaatttggaaaaattcactcagataaacaatttaaaatgagaggattttaggaatatattttatgtggaagataaaattttgttctatattttgaatgagttactttttataaattgacaagtctttataatttaattttaatttaatataatttaattttgyagttttagccattttctgagt

SEQ ID NO: 718976 - DNA, 2093 bp, Homo sapiens
  misc_feature 1317, 1318, 1319, 1320, 1321, 1322, 1323, 1324, 1325, 1326,1327, 1328, 1329, 1330, 1331, 1332, 1333, 1334, 1335, 1336,1337, 1338, 1339, 1340, 1341, 1342, 1343, 1344, 1345, 1346,1347, 1348, 1349, 1350, 1351, 1352, 1353, 1354, 1355: n = A,T,C or G
  misc_feature 1356, 1357, 1358, 1359, 1360, 1361, 1362, 1363, 1364, 1365,1366, 1367, 1368, 1369, 1370, 1371, 1372, 1373, 1374, 1375,1376, 1377, 1378, 1379, 1380, 1381, 1382, 1383, 1384, 1385,1386, 1387, 1388, 1389, 1390, 1391, 1392, 1393, 1394: n = A,T,C or G
  misc_feature 1395, 1396, 1397, 1398, 1399, 1400, 1401, 1402, 1403, 1404,1405, 1406, 1407, 1408, 1409, 1410, 1411, 1412, 1413, 1414,1415, 1416: n = A,T,C or G
tgactctaagttatgcctcagggagtgcagaggaatgaatttgcttttggaaatatcatctgggttatctaagagagtcttgaatgacacagtatggcaatggggaacctttgtaagtttttgagtaggttagtagtatcaaaaagagttgagcttgatataagacatgcatttaggagtcatcttcaaagagctgagagttaaagcaatgggcatgtttatgatgcctaaaacaaggactgaaggtggcatgacctcacaacctgatctgcccagaacactgcaggtctattatgtattgtcctaatgtcccctttgattagtacccctgtctgtttcagaaatgtcacagtttggatcataatttatatggtcacccaaaacagagaaagcacaaatggctgggtgcattggctcacgactgtaatcccagcactttgggaggccgaggtgggcggatcacaaggtcaggagatcgagaccaacctggccaacatggtgaaaccccgtgtctactaaaaatacaaaaattagccaggcgtggtggtacacacctgtaatcccagctactcatgaggctgaggcaggaaaattgcttgaaccagggagtcggaggttgcagtgagcagagatcacgccactacactccagcctggcgacagagcaaagctctgtcaaaaaggaaggaaagaaggaaggaaggaaggaagggactcacttaatgattatatttaataaatggaaaacaagtccagaagrtggtaatggaaaagtggagaggagagtttggaaatctcaattgcatgcatttgcctctatttctagctgggccatgcatcactctagcattcttcatacctgacatgcgtttagctcaattcacagtcagagggaagaactgccccatgatcattccgttggttgtatttcactttggaattacatttcattctttcaacatgataacttacttttcaaattattaatctaccttcaaaatagttcttactcgttaaactactaccagactaaactaaaccaagagagactggtcatgatggtgataaatagcacagaattgcgactgaaagcaatttgtcaagtggattattaacgtgtttctagaagaaagttcacctgtgagaagatgactttgtacctctttcaatatgattcaatctatttgcctccaattcctccattcaatttcaaacttcctgcaggcagtaagagcctcttttctattttagtaaaaagcctgcaaacatcagataaaaagcgaggttgattgatcggctgaacacgcagcgctccatnnnnnnnnnnnnnnnnnnnnnnnnnnnnnnnnnnnnnnnnnnnnnnnnnnnnnnnnnnnnnnnnnnnnnnnnnnnnnnnnnnnnnnnnnnnnnnnnnnnncattacatatatttttcctaatgtcctccttttctaactacatacaatttaattgtgatatattttaaagctataagtaataagattgaacaaatacaaggcaaatcatgagttacagaatgtatatacttggaaaaacaaaagacatttttatgtagaatatgtttatgtaacaaccaattgacatacatttatgtactactgtggaggtccactgttgggccacagatggggtgttaggagatgctgtaaaatcactggcccattaataagtcatattgtttcatacagtttaatattttaaaattttgaaactttaataaaaacaattttattcagaagtgctttagcctacagtgatgctattatcattgtagcatgcatgcaaaatccaaggtgtaaaaacttgcggtgaactaacacaatttgggtcgattatatttgattcttaatgacatttttgtagtataaggcaaaggccacggccagcttattgaataggattattaattgactttgaatgtaaatagcggacaattctaattgaattacatttgtctcagaaaatgcatctaatactatttatttattttctaccttaagctactcctaacaccttttttatttttatgtgtgtgtatatataatatatatattataacatatatatattttga

SEQ ID NO: 718977 - DNA, 2093 bp, Homo sapiens
  misc_feature 1317, 1318, 1319, 1320, 1321, 1322, 1323, 1324, 1325, 1326,1327, 1328, 1329, 1330, 1331, 1332, 1333, 1334, 1335, 1336,1337, 1338, 1339, 1340, 1341, 1342, 1343, 1344, 1345, 1346,1347, 1348, 1349, 1350, 1351, 1352, 1353, 1354, 1355: n = A,T,C or G
  misc_feature 1356, 1357, 1358, 1359, 1360, 1361, 1362, 1363, 1364, 1365,1366, 1367, 1368, 1369, 1370, 1371, 1372, 1373, 1374, 1375,1376, 1377, 1378, 1379, 1380, 1381, 1382, 1383, 1384, 1385,1386, 1387, 1388, 1389, 1390, 1391, 1392, 1393, 1394: n = A,T,C or G
  misc_feature 1395, 1396, 1397, 1398, 1399, 1400, 1401, 1402, 1403, 1404,1405, 1406, 1407, 1408, 1409, 1410, 1411, 1412, 1413, 1414,1415, 1416: n = A,T,C or G
tgactctaagttatgcctcagggagtgcagaggaatgaatttgcttttggaaatatcatctgggttatctaagagagtcttgaatgacacagtatggcaatggggaacctttgtaagtttttgagtaggttagtagtatcaaaaagagttgagcttgatataagacatgcatttaggagtcatcttcaaagagctgagagttaaagcaatgggcatgtttatgatgcctaaaacaaggactgaaggtggcatgacctcacaacctgatctgcccagaacactgcaggtctattatgtattgtcctaatgtcccctttgattagtacccctgtctgtttcagaaatgtcacagtttggatcataatttatatggtcacccaaaacagagaaagcacaaatggctgggtgcattggctcacgactgtaatcccagcactttgggaggccgaggtgggcggatcacaaggtcaggagatcgagaccaacctggccaacatggtgaaaccccgtgtctactaaaaatacaaaaattagccaggcgtggtggtacacacctgtaatcccagctactcatgaggctgaggcaggaaaattgcttgaaccagggagtcggaggttgcagtgagcagagatcacgccactacactccagcctggcgacagagcaaagctctgtcaaaaaggaaggaaagaaggaaggaaggaaggaagggactcacttaatgattatatttaataaatggaaaacaagtccagaaggtggtaatggaaaagtggagaggagagtttggaaatctcaattgcatgcatttgcctctatttctagctgggccatgcatcactctagcattcttcatacctgacatgcgtttagctcaattcacagtcagagggaagaactgccccatgatcattccgttggttgtatttcactttggaattacatttcattctttcaacatgataacttacttttcaaattattaatctaccttcaaaatagttcttactcgttaaactactaccagactaaactaaaccaagagagactggtcatgatggtgataaatagcacagaattgcgactgaaagcaatttgtcaagtggattattaacgtgtttctagaagaaagttcacctgtgagaagatgactttgtacctctttcaatatgattcaatctatttgcctccaattcctccattcaatttcaaacttcctgcaggcagtaagagcctcttttctattttagtaaaaagcctgcaaacatcagataaaaagcgaggttgattgatcggctgaacacgcagcgctccatnnnnnnnnnnnnnnnnnnnnnnnnnnnnnnnnnnnnnnnnnnnnnnnnnnnnnnnnnnnnnnnnnnnnnnnnnnnnnnnnnnnnnnnnnnnnnnnnnnnncattacatatatttttcctaatgtcctccttttctaactacatacaatttaattgtgatatattttaaagctataagtaataagattgaacaaatacaaggcaaatcatgagttacagaatgtatatacttggaaaaacaaaagacatttttatgtagaatatgtttatgtaacaaccaattgacatacatttatgtactactgtggaggtccactgttgggccacagatggggtgttaggagatgctgtaaaatcactggcccattaataagtcatattgtttcatacagtttaatattttaaaattttgaaactttaataaaaacaattttattcagaagtgctttagcctacagtgatgctattatcattgtagcatgcatgcaaaatccaaggtgtaaaaacttgcggtgaactracacaatttgggtcgattatatttgattcttaatgacatttttgtagtataaggcaaaggccacggccagcttattgaataggattattaattgactttgaatgtaaatagcggacaattctaattgaattacatttgtctcagaaaatgcatctaatactatttatttattttctaccttaagctactcctaacaccttttttatttttatgtgtgtgtatatataatatatatattataacatatatatattttga

SEQ ID NO: 718978 - DNA, 605 bp, Homo sapiens
ttaaaaaaatctacactttgtgtacagcattgatccagtagtcaaaaacccactaacctgatccagcaggccctgggtccaatgtggtgaggctcaaatgagtttccctacttccctcctcaccctccccatgtctctccttccctgccttcctmtccttcacaatgagaaaataaaaaaggaaaattatagaaaaggataaatgggagttgttcctaaccaatcttcaggaatttgaaaggctaaagcaaagtatatgcattgtgttcaaaatcaaatcacagctcctctttaaccttatcctcttgatcaggtgatcatcttaatgatgtccattcctgtataaatgtgggtcagggctgatggactagctagacttggggaacacacacagtgacattttaaacactgtttataatgtcatgctgacatgacttccacctggatgacagaaacctgtagtaagctattgacattttcctgtcctatatacactgaaaaggttaaaggaagatcagaattgcacagacacaatgaagagtgattgcaaacagttttttgggaaaaagaactaactgaccttcatgaagagatgtgcagaaagg

SEQ ID NO: 718979 - DNA, 1031 bp, Homo sapiens
cagccttaaagaaggaaattctggcatatgctataacatgaatgaaccttgaagacatatgctaaatgtaataagccagatataaaagaacaaatattgtattattccatttataagaaatacctagagtagtaaaattcatacagacagcagtatagaaggtactagggactgggaaggaggaaatgaggagttactgcttaatgggtacagagtctctgtttgaaatgatgaaaagatctggaaatagattgtacatttaaaaatgggtgaaagggtaaattttatgttatgtgtattttatcactttgcattttgataaagtacacacagaatgtgaggagacagccacaggaaggtcatgcctcaggtgaattcctaacagaaaggtagtggtggggaatccacacatcaaagtgccgagaccagctcagtcggggagaccctaacccagtagcactagaggaattaaagacacacacacaaaaatatagaggtgtaagtggaaaatcaggggtctcacagccttcagagctgacagccccagagatttacccatgtatttattaacagcaagccagtcattagcattgtttctacagatattagattaactaaaagtatcccttatgggaaatgaagggatgggccaaaataaagggatgagttggactagttacctgcagcaggagcatgtccttaagacacagatcactcatgctattgtttgtggcttaagactgcctttaagcggttttctgccctgggcgggccaggtgttccttgccctcattctggtaaacccacaaccttccagtgtgggcgttatggccatcatgaacatgtcacagtgctgcagrgattttatggccagttttggggccagtttatggccagattttgagaggcctgttcccaacacaaagagacaagcaccaagaggaagaaatgcaagatcctataggaaaaacagagaatacctctaaactccacctctccgacaacgcccaagtcatctagtccaaaaatca

SEQ ID NO: 718980 - DNA, 344 bp, Homo sapiens
gtctgaaggagataagctttgtacgcctttgtgattctgtacaggatgctcaattcagcatttctagagtatgaacaaagtgcaaacaacctaaacatccagtgctaggggagttacataaactagatcatctgtacactgaactactgggcagcatgtaaacagtggtgaccaggatgctgttatttgtataatgkgattttatttttatttaaatatagaaccatatttgcatgaaaatcacctgaagagacatagcaaaaagttaactttttctggtggtagaaagttagatgagcacttcttgttgttttgcttattgatcttttagaattttctagtaa

SEQ ID NO: 718981 - DNA, 654 bp, Homo sapiens
gaaaagaaaagaaaagaaagaaaaaaagaaaagaaaagaaaaaaaggggccgggcrcggtggctcatgcctgtaatcccagcactttgggaggccgaggcgggtggatcacgaggtcaggagatcgagaccatcctggctaacacggtgaaaccccgtctctactaaaaatacaaaaaattagccaggcgtggtggtgggcgcctgtagtcccagctactcaggaggatgaggcagcagaatggcgtgaacccaggaggtggagcttgcagtgagctgagattgtgccactgcactccagcctgggcaacagagcgagactccgtctcaaaaaaaaaaggaaatgatctcaacaacccaataaacacatttgacctcaaattctcaattgtcccccattagtctacactttcagcccaattcttatcaaaattccagcaggaattttgtgaaaattgaatagccaattctaaaattctaaaagaagaggacaaaactggagaatttacgtcagcaagtgtaaggcttattataatgctcgagtaatctaaagcaatgttgtgttggcacaagattagacagaaagaatgaaagagaatagagtccagaaacaaatctgtatgcaaacagaccaatggaacagattatggaaccc

SEQ ID NO: 718982 - DNA, 654 bp, Homo sapiens
gaaaagaaaagaaaagaaagaaaaaaagaaaagaaaagaaaaaaaggggccgggcacrgtggctcatgcctgtaatcccagcactttgggaggccgaggcgggtggatcacgaggtcaggagatcgagaccatcctggctaacacggtgaaaccccgtctctactaaaaatacaaaaaattagccaggcgtggtggtgggcgcctgtagtcccagctactcaggaggatgaggcagcagaatggcgtgaacccaggaggtggagcttgcagtgagctgagattgtgccactgcactccagcctgggcaacagagcgagactccgtctcaaaaaaaaaaggaaatgatctcaacaacccaataaacacatttgacctcaaattctcaattgtcccccattagtctacactttcagcccaattcttatcaaaattccagcaggaattttgtgaaaattgaatagccaattctaaaattctaaaagaagaggacaaaactggagaatttacgtcagcaagtgtaaggcttattataatgctcgagtaatctaaagcaatgttgtgttggcacaagattagacagaaagaatgaaagagaatagagtccagaaacaaatctgtatgcaaacagaccaatggaacagattatggaaccc

SEQ ID NO: 718983 - DNA, 654 bp, Homo sapiens
gaaaagaaaagaaaagaaagaaaaaaagaaaagaaaagaaaaaaaggggccgggcacggtggctcaygcctgtaatcccagcactttgggaggccgaggcgggtggatcacgaggtcaggagatcgagaccatcctggctaacacggtgaaaccccgtctctactaaaaatacaaaaaattagccaggcgtggtggtgggcgcctgtagtcccagctactcaggaggatgaggcagcagaatggcgtgaacccaggaggtggagcttgcagtgagctgagattgtgccactgcactccagcctgggcaacagagcgagactccgtctcaaaaaaaaaaggaaatgatctcaacaacccaataaacacatttgacctcaaattctcaattgtcccccattagtctacactttcagcccaattcttatcaaaattccagcaggaattttgtgaaaattgaatagccaattctaaaattctaaaagaagaggacaaaactggagaatttacgtcagcaagtgtaaggcttattataatgctcgagtaatctaaagcaatgttgtgttggcacaagattagacagaaagaatgaaagagaatagagtccagaaacaaatctgtatgcaaacagaccaatggaacagattatggaaccc

SEQ ID NO: 718984 - DNA, 654 bp, Homo sapiens
gaaaagaaaagaaaagaaagaaaaaaagaaaagaaaagaaaaaaaggggccgggcacggtggctcatgcctgtaatcccagcaytttgggaggccgaggcgggtggatcacgaggtcaggagatcgagaccatcctggctaacacggtgaaaccccgtctctactaaaaatacaaaaaattagccaggcgtggtggtgggcgcctgtagtcccagctactcaggaggatgaggcagcagaatggcgtgaacccaggaggtggagcttgcagtgagctgagattgtgccactgcactccagcctgggcaacagagcgagactccgtctcaaaaaaaaaaggaaatgatctcaacaacccaataaacacatttgacctcaaattctcaattgtcccccattagtctacactttcagcccaattcttatcaaaattccagcaggaattttgtgaaaattgaatagccaattctaaaattctaaaagaagaggacaaaactggagaatttacgtcagcaagtgtaaggcttattataatgctcgagtaatctaaagcaatgttgtgttggcacaagattagacagaaagaatgaaagagaatagagtccagaaacaaatctgtatgcaaacagaccaatggaacagattatggaaccc

SEQ ID NO: 718985 - DNA, 624 bp, Homo sapiens
taaatgtactccaaaatatattcccctattcctatttattgaactcttttttttttttwttttttttttttaagatagggtcttgctctgtcgcccaggctggagtgcagtggcgctatctcggctcactgcaacctccacctcccgggttcacgccattctcctgcctcagcctcctgagtagctgggaccacaggcgcccgccaccacgcctggctaattttttgtatttttaatagagatggggtttcaccgtgttagccaggatggtctcgatttcctgacctcgtgatctgcctacctcagcctcccaaagtgctgggattacaggcgtgagccaccgcgccaggcctcttttgttttttaagggtctataagttaatcatccttgttggtcttcactatagacattgattgtctttacgtatgaaataaccttttagaaatatgtcttcagagctccctgtcatgttccgcatgcaaggtcctctttgttaccaagagaaaggagttcacttctggattgagttaaatatcaggtcattgtatttgattgacaacacaatttctcagaggttttgaagcatgtttgctttttttctgtttcttgcacctcagtcagat

SEQ ID NO: 718986 - DNA, 624 bp, Homo sapiens
taaatgtactccaaaatatattcccctattcctatttattgaactctttttttttttttttttttttttttaagatagrgtcttgctctgtcgcccaggctggagtgcagtggcgctatctcggctcactgcaacctccacctcccgggttcacgccattctcctgcctcagcctcctgagtagctgggaccacaggcgcccgccaccacgcctggctaattttttgtatttttaatagagatggggtttcaccgtgttagccaggatggtctcgatttcctgacctcgtgatctgcctacctcagcctcccaaagtgctgggattacaggcgtgagccaccgcgccaggcctcttttgttttttaagggtctataagttaatcatccttgttggtcttcactatagacattgattgtctttacgtatgaaataaccttttagaaatatgtcttcagagctccctgtcatgttccgcatgcaaggtcctctttgttaccaagagaaaggagttcacttctggattgagttaaatatcaggtcattgtatttgattgacaacacaatttctcagaggttttgaagcatgtttgctttttttctgtttcttgcacctcagtcagat

SEQ ID NO: 718987 - DNA, 624 bp, Homo sapiens
taaatgtactccaaaatatattcccctattcctatttattgaactctttttttttttttttttttttttttaagatagggtcttgctctgtcgcccaggctggagtgcagtggcgctatctcggctcactgcaacctccacctcccgggttcacgccattctcctgcctcagcctcctgagtagctgggaccacaggcgcccgccaccacgcctggctaattttttgtatttttartagagatggggtttcaccgtgttagccaggatggtctcgatttcctgacctcgtgatctgcctacctcagcctcccaaagtgctgggattacaggcgtgagccaccgcgccaggcctcttttgttttttaagggtctataagttaatcatccttgttggtcttcactatagacattgattgtctttacgtatgaaataaccttttagaaatatgtcttcagagctccctgtcatgttccgcatgcaaggtcctctttgttaccaagagaaaggagttcacttctggattgagttaaatatcaggtcattgtatttgattgacaacacaatttctcagaggttttgaagcatgtttgctttttttctgtttcttgcacctcagtcagat

SEQ ID NO: 718988 - DNA, 610 bp, Homo sapiens
ggaacttttaaagataatggaagrcaaagagaaatgtttgacaaaaccaaacagtgagttctgtggttatgcttacatgtttacctaggaattttgcatttagaagtcaacatattcatgagccattttttcctagttttcttaagaataaaataaaaattatatgtggtaagcaaaaatagcacaatagccttctacataaaatagaactggctgctgaaaactaaatcttaccccacagccaacatctgtattttgaaggtcagggactcacatcagaagtaagttgtgcattgaatactttcaaatgaagatccttactaacttgcaaaaaaaaaatacttaaacataatttgggctctccagagagaggagctatattttaagctaaaagaaaatagctcttggtgaatagcttaaaaagttagtttgtactttatttattaaacattttaagccgttattgagaatcttttctaggtatagaaatcttttctaacacacagaaaattatttattattctacatgttagggattgcatgagctatctattgatgttttctaaaaaattcccccaaattagcagcttaaaacattacaaattaacac

SEQ ID NO: 718989 - DNA, 610 bp, Homo sapiens
ggaacttttaaagataatggaagacaaagagaaatgtttgacaaaaccaaacagtgagttctgtggttatgcttacatgtttacctaggaattttgcatttagaagtcaacatattcatgagccattttttcctagttttcttaagaataaaataaaaattatatgtggtaagcaaaaatagcacaatagccttctacataaaatagaactggctgctgaaaactaaatcttaccccacarccaacatctgtattttgaaggtcagggactcacatcagaagtaagttgtgcattgaatactttcaaatgaagatccttactaacttgcaaaaaaaaaatacttaaacataatttgggctctccagagagaggagctatattttaagctaaaagaaaatagctcttggtgaatagcttaaaaagttagtttgtactttatttattaaacattttaagccgttattgagaatcttttctaggtatagaaatcttttctaacacacagaaaattatttattattctacatgttagggattgcatgagctatctattgatgttttctaaaaaattcccccaaattagcagcttaaaacattacaaattaacac

SEQ ID NO: 718990 - DNA, 633 bp, Homo sapiens
gttcatagaaaaaaattcaaatacatttcttttctactaaaatgtggtgggaaaaggacaacccatgctttgtggagacaggtctgcagtccacctgttcattatattcatattttcagtccaggagtctccctagtcacacagaaatgccaccagttggccttaaaacacacttgctagagagaggggaggcaaacagtcctcccaaatgatgctgcagcctcaaacaggcttatccattcatatcttctccaccacattcttattaggcatcaaacagtccctttaaataagaatggttttaataagatattaacaactaagtttcccatggaataagaatttctaacttagggtatctcagcacgtattcccagttacatatgccctacacaattgcttaagtggtaagcagtctgaaaaactctcctccctttacctctttgtgaatctacagcagtcttttaagattgttttgcaaatgctatattcaaaaagaggttttttttttttcaagtaaagkgcatggatttctcaaaagttgctgtattttaaaaagtgcctctttaaccccataatgagcaatccttatgttggtcaaaagcaaagcagtattgtttgcaattgtaaatc

SEQ ID NO: 718991 - DNA, 633 bp, Homo sapiens
gttcatagaaaaaaattcaaatacatttcttttctactaaaatgtggtgggaaaaggacaacccatgctttgtggagacaggtctgcagtccacctgttcattatattcatattttcagtccaggagtctccctagtcacacagaaatgccaccagttggccttaaaacacacttgctagagagaggggaggcaaacagtcctcccaaatgatgctgcagcctcaaacaggcttatccattcatatcttctccaccacattcttattaggcatcaaacagtccctttaaataagaatggttttaataagatattaacaactaagtttcccatggaataagaatttctaacttagggtatctcagcacgtattcccagttacatatgccctacacaattgcttaagtggtaagcagtctgaaaaactctcctccctttacctctttgtgaatctacagcagtcttttaagattgttttgcaaatgctatattcaaaaagaggttttttttttttcaagtaaagggcatggatttctcaraagttgctgtattttaaaaagtgcctctttaaccccataatgagcaatccttatgttggtcaaaagcaaagcagtattgtttgcaattgtaaatc

SEQ ID NO: 718992 - DNA, 633 bp, Homo sapiens
gttcatagaaaaaaattcaaatacatttcttttctactaaaatgtggtgggaaaaggacaacccatgctttgtggagacaggtctgcagtccacctgttcattatattcatattttcagtccaggagtctccctagtcacacagaaatgccaccagttggccttaaaacacacttgctagagagaggggaggcaaacagtcctcccaaatgatgctgcagcctcaaacaggcttatccattcatatcttctccaccacattcttattaggcatcaaacagtccctttaaataagaatggttttaataagatattaacaactaagtttcccatggaataagaatttctaacttagggtatctcagcacgtattcccagttacatatgccctacacaattgcttaagtggtaagcagtctgaaaaactctcctccctttacctctttgtgaatctacagcagtcttttaagattgttttgcaaatgctatattcaaaaagaggttttttttttttcaagtaaagggcatggatttctcaaaagttgctgtattttaaaaagtgcctctttaaccccataatgagcaatccttatgttggtcaraagcaaagcagtattgtttgcaattgtaaatc

SEQ ID NO: 718993 - DNA, 633 bp, Homo sapiens
gttcatagaaaaaaattcaaatacatttcttttctactaaaatgtggtgggaaaaggacaacccatgctttgtggagacaggtctgcagtccacctgttcattatattcatattttcagtccaggagtctccctagtcacacagaaatgccaccagttggccttaaaacacacttgctagagagaggggaggcaaacagtcctcccaaatgatgctgcagcctcaaacaggcttatccattcatatcttctccaccacattcttattaggcatcaaacagtccctttaaataagaatggttttaataagatattaacaactaagtttcccatggaataagaatttctaacttagggtatctcagcacgtattcccagttacatatgccctacacaattgcttaagtggtaagcagtctgaaaaactctcctccctttacctctttgtgaatctacagcagtcttttaagattgttttgcaaatgctatattcaaaaagaggttttttttttttcaagtaaagggcatggatttctcaaaagttgctgtattttaaaaagtgcctctttaaccccataatgagcaatccttatgttggtcaaaagcaaagcagtwttgtttgcaattgtaaatc

SEQ ID NO: 718994 - DNA, 626 bp, Homo sapiens
gggagactgtcatcacaacagaattttgcttattctacaaacttttagattgtcttttctccaaaattcrtcacaaacaaatgaaaatccaactatcgtataaggagtaacagcaatattctatctgattaaaatataatgatttaaaatgatggcaaactatttacagcttgacttcccatacagacatacatgaaaaaattaacaaaagccataatactaaattttggccctaaactgtgttccctttaatgttgctaataatctgctcataaaatctctgaagacagagaccccatgtagaagccattactgctatttcaaatacaacctgtaataaagttaatcgggcacacatttaacaatacacatgtggtaattgttatggcactgcatagtaactagacattaagactaaatggttcacataaattatagaaaaatagaaaagtcacattatccctttctctataccactggtccccagatgcctatctgtggaccacctgtattcacatcatctggagggctttttgaaattataaattcctgccccctccccaacaagagtaagattcagtagatctggtatatgaggaagttttgcaccacaccaagattctcaa

SEQ ID NO: 718995 - DNA, 642 bp, Homo sapiens
ctctgaggctcacacagccttgttaagagagagtttacctgttctctgggggccacagctgaaggcagccagatgcgggtattgctgcatctgttttgcgtaatgaagttgagctgtgtgtgatatgtgtggtagctagttatagagaaagcaacaataatatacagggtgctgatttgcatgacttgtctgaggagagagcaattgtaactgytcctgtttattttatgtctactgcgtgcagggcattgtgcactcatcataccatttaattccctcagcagccctgcaatataggtgttatcattctgatttcccagtggagggaacctaggctcaaagaagagaggtctttaactttcttccaggatgacaatgggagaagctgtcaatacagctagcattaacagtgtcctgaaattaattggataggtctccatcctcaacctcatccatctctttagtttattgtcctgtcccccatcctacctttcccctttgagaatccaggaagggagagaggggtggaagaaggagaggcagaaaaagaggatgacgttaatagttcgagctaagaaaaggactgaacagactcagaaggaggcagcaaatggagtaaagctgccccaacttagtcatcca

SEQ ID NO: 718996 - DNA, 635 bp, Homo sapiens
tcatcaagcatgtctgcttcatgttgtattctattagagcacttctatcaatcattagctgtgacagtgaattaattgggtaaatgaatccttactttggtgttaataagaaacaatagcttataagatattcctcccrggtatatgtaccattgtcaccgaactccttttgcagtaaagtgtcaaagtattttcaggaactgaggaaagttgatagaagggcaatttggggacagcatttaaaaaggcatttagttccattcagaggacacacactggtagatttgttcatttagcaaatattctttccttcattcagcaagtatcccccctcccatatgccatgcctgttgtaggtgctggacataccatagtgaataggacagcatagtcctcatacagcccccacctaagtctgttaggtatcacatgctcttctaggggctgcaaagtccttggaggtgaataagataatagactctacatttgagtctgcagactcagaagcctcaggtaggataatctggtgatgctttctcatctatatatattcatagaattgcttgtatatgggatgaagactgacctgtacttgccctttcacagagtttgctgaagactgctgaaggtgaaca

SEQ ID NO: 718997 - DNA, 1536 bp, Homo sapiens
attctcttgatgcattctgagactaacagccattttttggcaatcacataaaactgttawctcatggtgagtttatttttctaccagatatctaagcatcgttttatccatgttgatccaaaagccatactagtaagttcaggacactataaaatgttattttactagagaagctcttgtttttaacttgcggttaaacccatggagatatttgaacctggctccaaaacaatagaattaaattacattgccatgaatttgataagaattcttatctcttcattacatcaattaataagaatgttcaattcaacagattcccattgcttgagaaacctcacacttttataccagtccacttttggataccattgactccatatttaatcaacaaacatctgccaaacagaaactcttaatagttttctcaaatgattacaaactatccaagtatagcttccagtctattatttgataccataaatccttgtcaaaagctctggtgaagtccagaaaccttatccactatgtttcctaatctactctcaaagacagaagcaaggttattataacattacttgtttttaatgattatttttaataaatccaattctttactactccctcttgtcaaggttatcaaaactctaagtttatacaaaggtgtttataatctgaagtggtgtttcaaatataaaaacatgtcaatttcaaatgaaatctaccagagatctaaaatctaagtaagatctttccaaaacaccgttctaaatcatgtataagacaaaaggcctccgtactttgtctgaagtttgggggcactgacattattgacattttctctggtttctagctttatgcttcagtggaaggcactcagtgaactatcctgccatctgctaggggctaacaaactggaaactgatggttagatgactctccagctgaaatgactagtggcctctaacattaggaaagtttcttggaccaacccaccccacattgtgcttctacttctacaaaatattttaaaattctctctccccttcctttccacccccttccttttcttctctcccttccttcctagaagcaaaaatcaaattctttgttttatctctcaaataaataaatatatatatatatatttgttttggcttctgccctcaagatatctattatcttttataaagacactcttctaaaatagaaggtgaaaaagagggaaattcatataattaccaagaagacaggacactatgaattactaaagtaaactgaatgtcagaaaaaagcaatgcaaatctattgaaatatgacaactgacatcctgctttagtgtgaggaagataacaggaactgatctggaccatggcaaactgaaaagggcatgccggcctaaaagggacagctgttatttagctacaaaaaaaaaagtgtttgacatgtgagcacactgatctggtcttatgagagaatctgggaatccaaaatgtatgtaaaatctcctaagtttaaaatattggtttattttaa

SEQ ID NO: 718998 - DNA, 1536 bp, Homo sapiens
attctcttgatgcattctgagactaacagccattttttggcaatcacataaaactgttatctcatggtgagtttatttttctamcagatatctaagcatcgttttatccatgttgatccaaaagccatactagtaagttcaggacactataaaatgttattttactagagaagctcttgtttttaacttgcggttaaacccatggagatatttgaacctggctccaaaacaatagaattaaattacattgccatgaatttgataagaattcttatctcttcattacatcaattaataagaatgttcaattcaacagattcccattgcttgagaaacctcacacttttataccagtccacttttggataccattgactccatatttaatcaacaaacatctgccaaacagaaactcttaatagttttctcaaatgattacaaactatccaagtatagcttccagtctattatttgataccataaatccttgtcaaaagctctggtgaagtccagaaaccttatccactatgtttcctaatctactctcaaagacagaagcaaggttattataacattacttgtttttaatgattatttttaataaatccaattctttactactccctcttgtcaaggttatcaaaactctaagtttatacaaaggtgtttataatctgaagtggtgtttcaaatataaaaacatgtcaatttcaaatgaaatctaccagagatctaaaatctaagtaagatctttccaaaacaccgttctaaatcatgtataagacaaaaggcctccgtactttgtctgaagtttgggggcactgacattattgacattttctctggtttctagctttatgcttcagtggaaggcactcagtgaactatcctgccatctgctaggggctaacaaactggaaactgatggttagatgactctccagctgaaatgactagtggcctctaacattaggaaagtttcttggaccaacccaccccacattgtgcttctacttctacaaaatattttaaaattctctctccccttcctttccacccccttccttttcttctctcccttccttcctagaagcaaaaatcaaattctttgttttatctctcaaataaataaatatatatatatatatttgttttggcttctgccctcaagatatctattatcttttataaagacactcttctaaaatagaaggtgaaaaagagggaaattcatataattaccaagaagacaggacactatgaattactaaagtaaactgaatgtcagaaaaaagcaatgcaaatctattgaaatatgacaactgacatcctgctttagtgtgaggaagataacaggaactgatctggaccatggcaaactgaaaagggcatgccggcctaaaagggacagctgttatttagctacaaaaaaaaaagtgtttgacatgtgagcacactgatctggtcttatgagagaatctgggaatccaaaatgtatgtaaaatctcctaagtttaaaatattggtttattttaa

SEQ ID NO: 718999 - DNA, 1536 bp, Homo sapiens
attctcttgatgcattctgagactaacagccattttttggcaatcacataaaactgttatctcatggtgagtttatttttctaccagatatctaagcatcgttttatccatgttgatccaaaagccatactagtaagttcaggacactataaaatgttattttactagagaagctcttgtttttaacttgcggttaaacccatggagatatttgaacctggctccaaaacaatagaattaaattacattgccatgaatttgataagaattcttatctcttcattacatcaattaataagaatgttcaattcaacagattcccattgcttgagaaacctcacacttttataccagtccacttttggataccattgactccatatttaatcaacaaacatctgccaaacagaaactcttaatagttttctcaaatgattacaaactatccaagtatagcttccagtctattatttgataccataaatccttgtcaaaagctctggtgaagtccagaaaccttatccactatgtttcctaatctactctcaaagacagaagcaaggttattataacattacttgtttttaatgattatttttaataaatccaattctttactactccctcttgtcaaggttatcaaaactctaagtttatacaaaggtgtttataatctgaagtggtgtttcaaatataaaaacatgtcaatttcaaatgaaatctaccagagatctaaaatctaagtaagatctttccraaacaccgttctaaatcatgtataagacaaaaggcctccgtactttgtctgaagtttgggggcactgacattattgacattttctctggtttctagctttatgcttcagtggaaggcactcagtgaactatcctgccatctgctaggggctaacaaactggaaactgatggttagatgactctccagctgaaatgactagtggcctctaacattaggaaagtttcttggaccaacccaccccacattgtgcttctacttctacaaaatattttaaaattctctctccccttcctttccacccccttccttttcttctctcccttccttcctagaagcaaaaatcaaattctttgttttatctctcaaataaataaatatatatatatatatttgttttggcttctgccctcaagatatctattatcttttataaagacactcttctaaaatagaaggtgaaaaagagggaaattcatataattaccaagaagacaggacactatgaattactaaagtaaactgaatgtcagaaaaaagcaatgcaaatctattgaaatatgacaactgacatcctgctttagtgtgaggaagataacaggaactgatctggaccatggcaaactgaaaagggcatgccggcctaaaagggacagctgttatttagctacaaaaaaaaaagtgtttgacatgtgagcacactgatctggtcttatgagagaatctgggaatccaaaatgtatgtaaaatctcctaagtttaaaatattggtttattttaa

SEQ ID NO: 719000 - DNA, 1536 bp, Homo sapiens
attctcttgatgcattctgagactaacagccattttttggcaatcacataaaactgttatctcatggtgagtttatttttctaccagatatctaagcatcgttttatccatgttgatccaaaagccatactagtaagttcaggacactataaaatgttattttactagagaagctcttgtttttaacttgcggttaaacccatggagatatttgaacctggctccaaaacaatagaattaaattacattgccatgaatttgataagaattcttatctcttcattacatcaattaataagaatgttcaattcaacagattcccattgcttgagaaacctcacacttttataccagtccacttttggataccattgactccatatttaatcaacaaacatctgccaaacagaaactcttaatagttttctcaaatgattacaaactatccaagtatagcttccagtctattatttgataccataaatccttgtcaaaagctctggtgaagtccagaaaccttatccactatgtttcctaatctactctcaaagacagaagcaaggttattataacattacttgtttttaatgattatttttaataaatccaattctttactactccctcttgtcaaggttatcaaaactctaagtttatacaaaggtgtttataatctgaagtggtgtttcaaatataaaaacatgtcaatttcaaatgaaatctaccagagatctaaaatctaagtaagatctttccaaaacaccgttctaaatcatgtataagacaaaaggcctccstactttgtctgaagtttgggggcactgacattattgacattttctctggtttctagctttatgcttcagtggaaggcactcagtgaactatcctgccatctgctaggggctaacaaactggaaactgatggttagatgactctccagctgaaatgactagtggcctctaacattaggaaagtttcttggaccaacccaccccacattgtgcttctacttctacaaaatattttaaaattctctctccccttcctttccacccccttccttttcttctctcccttccttcctagaagcaaaaatcaaattctttgttttatctctcaaataaataaatatatatatatatatttgttttggcttctgccctcaagatatctattatcttttataaagacactcttctaaaatagaaggtgaaaaagagggaaattcatataattaccaagaagacaggacactatgaattactaaagtaaactgaatgtcagaaaaaagcaatgcaaatctattgaaatatgacaactgacatcctgctttagtgtgaggaagataacaggaactgatctggaccatggcaaactgaaaagggcatgccggcctaaaagggacagctgttatttagctacaaaaaaaaaagtgtttgacatgtgagcacactgatctggtcttatgagagaatctgggaatccaaaatgtatgtaaaatctcctaagtttaaaatattggtttattttaa

SEQ ID NO: 719001 - DNA, 2419 bp, Homo sapiens
  misc_feature 427, 428, 429, 430, 431, 432, 433, 434, 435, 436, 437, 438,439, 440, 441, 442, 443, 444, 445, 446, 447, 448, 449, 450,451, 452, 453, 454, 455, 456, 457, 458, 459, 460, 461, 462,463, 464, 465, 466, 467, 468, 469, 470, 471, 472, 473: n = A,T,C or G
  misc_feature 474, 475, 476, 477, 478, 479, 480, 481, 482, 483, 484, 485,486, 487, 488, 489, 490, 491, 492, 493, 494, 495, 496, 497,498, 499, 500, 501, 502, 503, 504, 505, 506, 507, 508, 509,510, 511, 512, 513, 514, 515, 516, 517, 518, 519, 520: n = A,T,C or G
  misc_feature 521, 522, 523, 524, 525, 526: n = A,T,C or G
atgcctagcagatgattcatgggagaacacctgaaggctttagcaaaactgcccatctgctaaagccctcaagtctgaacaaatagaaagataatgacctctggctttccaacaagtgcctcttattggtgagatctaaataggcatcacactaaaaaggtttctaggaaatgtagctcccaggattcttagttcccaaagccattgttttcctcttcagaaatgaartgactcaattgtatttcttgcctgtgttacctaagaaaaacaaaacaattttacctcatgttactcacatgatggccaaatctaccttcattttaaataaaaatgcagtgatcactaatgaaatttctctaaaaactataaatatagggaatatctttgttcaaagacatgctgaggatcaacagcatgttgggatgannnnnnnnnnnnnnnnnnnnnnnnnnnnnnnnnnnnnnnnnnnnnnnnnnnnnnnnnnnnnnnnnnnnnnnnnnnnnnnnnnnnnnnnnnnnnnnnnnnntagtttgttcctctgtactttataaaaatgtcactactattgtgagttgaaaatatccaagacacattttccttatttgtgggaggagaagatcaaagagaaataattggtattccatggaaaggaagtacacgtcaaagagatatatgaatgttatctttggtgtagtgatttaaaagtttatgtagaataaatatatccatttgttcacccagaattaattgatttttcttctctatgtaaggtacaggtctgggcaatagttaaaatggtaataatgttcatttcttcacattttgctggaagttgtgctaatagaagaaaatacgaatataagttatttagtcatccaataaacaggtgtatctcaaaaggcagttactgtggaaagaatactgaacttggagaccaggtatctgcattgaaaccccaggccttcatatacagcttctccacacagaatcttttttttagaatgtaaatcggattgtattatgtttccttgtcttttaaaggcttctgattgtccttacgatatagaaaacagtttataacgttgcatacagttcctgcgtggtccagctccatctttcagtgctgacccacatgtactgtgagtactgaaacacatgtacatgcattatggctatgatcatgcttccagccaccacagccatagttcattgagtagacaatgctccatctctcaggaccatcggtcattctatttttctctctaaagcactcttttgcttgcctttaaaacttccactactcccacttagaacagattagtttttacaggttttcatgaaacatgttgctttcctttggatcacttatctccatttttagttgaatattaatttgtgtcatcaacgttgactcctcaactgaactgttaactccccaagagcaggtactacatctgtgtccctgaccgctggctcccctgtgcctatctcagtttctgacacacacaggtttttgaaaaagttaatcacttaagaaaattattgaactgctcagaaacaaaatttcaccaattataaaatggggataataaattacttgttagattaactgagagaatgtgcataaaaactttgcctaatgctctaaaatatagggtgggataatgattataacaataaccaagatgaattgctgttctaattgatttggtcaatagagaaaaactagtcagtgatatgggtgtgcatataactttaaaataaatcattgtcttactgcataaaaaaaagcaaaatatgtttatagatatcttcagatactgtaaaagaatataaaatcaaaaacgaaagttcctttctctgttattacttccagctgtaatctacagttgtaaccacttaaaattgctttttgttttcagctcttatgtggttatcattggatctctaagttttatgtttttatttctatttcttgtttcatcaactttagacagcatctactaacttgctgctatgaaagatgagtttagatcatcacactaacttctaccttcccgatttctatatgcaatttttgttatttatattattatgattattcaatattacatttttgactttaaacaatatttttaacaaacgtttcttgcttcatgtaatttaaggtagctatttatctcacattgtataagaagaggaaagtagtgtacacacatttttctttcattattcttgccctttacatttcctaagttctgcccaccgtgccactgtttgattttgtcaacttatgtcctgttttgttctgtcaagtcttatgttatcttctgtgttttttcaccaaaggttgattttaaaaattataaacaaagcaacctcataaacatgagcattatgtaagtgtgataaatattat

SEQ ID NO: 719002 - DNA, 629 bp, Homo sapiens
ctgaaactttgagttacagcagccccagaaatgtggcttaaaaacggggaaaaacaacagtgaccaaaaataaaaataagaccaggtgtaccactgttggatatatccaaattccctcttttggcacaattcaaaatacaaaattttcttagtcagatctagttgaaaaaccttggtcaaattatacaatcttattaagtaccaattttctcaacttttaagtgaatctagtatccacacttacagaactgatggagaattaaacaatatacctagcttctagcgtgattccactgtagcaaatattctcaattttgtgttttccctgtcacaaagacccattacttactagtcttgtcatctaccaggggaaaataaaagacckactcctattctcatggtttctctctccagcctttttctatcatctttcttctatttttttttattcttaaagaatcctgcatatccttctatccctctcttcttaatgaatcttctgttaatacatcttccatatatctcaactcctgaaacttaaactctgtatttactagtgaaagagagaaggatgtttaaccttagtcaatgaagtttacaacctactatttgcaaaatatcgtttcccc

SEQ ID NO: 719003 - DNA, 1717 bp, Homo sapiens
agaggaaaaagttgcagtgatcacccacgtcctgggctgggaggcgggacacctggatttcagtgcaggtatcacattcagagcctccagccctaggcctctcacctcacactgaggtccacgcaaaccttgctctctctttttccctttcaaagttagtaagattacttttccttttgcataaagatataataaatatttaccttaggaaaattagtgccaaaatatataaagaaaatccagattgtcactaatgttttgagcatttggttctattgtatcctttgtaagactgtatttattttattctttttattagagacagggtcactctgtcacccaggctggagtacagtggtgcagtcataactcagtccagccttgaacccctgggctcaagcgatactccagcctcagcctcccaaagtgctgagactacatgcatgagccactgtgcccagccctttgtgagacttcttttctctttttgagacggagtttcactcttgttgcccaggctagagtgcaatggtgcgatctcagctcactgcaacctctgcctcccacgttcacgcgattctcctgcctcagcctccgaagtagctaggattacaggcatgcgccaccacacacggctaattttgtgcttttagtagagacggggtttcatcaggctggtctcaaactcctgacctcaaatggtccacccgcctcagcctcccaaagtactgggtgagtacaccacacccggccttgtgagactttcatatgttgatccatatttttgccaagctatataattctgagtctgtgtgggtcgtttgcttaataccaaaacattttcccaatgacaaattctttataaactcattttataaaattctttatacactcatataccattgttccatcatataaaggtgccatcatttaactagtatcattcagctattaatcttcatccagttttggattcttgtttcataaacactgctccttacttaagtctgtgcatttctagttattccttaagatactctctgagaagtagaatttctgagtcaaaggcactaaatttctttttcagttcttggaatttgctaactgtcctgcaaaaaaagcttcattcattcattttttctgttttaatatacctgtatgggctgccatatcatagttggacatttttcttgcttattggtatataaaataaaggtgcatattataagcaatggcactttagagctgctcacataagcgtagcatctccccagctaccacaaggctgccggggtctgccgctcccttcactcgctcacccctccccgccatcacctttatcatccatgtctacagaaygttacaattgacagattccacctgtgtccattctcctcaccctcgtgagacaggctgggccagttttcttgctccccgtagtctctataaagcctggctcaccatctccagaagtctctctgacttcatgttatcctaatttgctgtcccaaaacacatctaccttggtctccagattcttcctatgctgctgccagaggcaagggcagatttttctctagtgaagaggggtgcttttattgagttgggaggacaggtggtaaagagctctctttccaacaggacccagctcgggagtgggttgaggttgcgcattttgctagttatgtggcccagctacttgctctaggggaatgtg

SEQ ID NO: 719004 - DNA, 1646 bp, Homo sapiens
ctgctctgggtgtattttcattgattctagagccctcagtggagaagagagtttattggctttgaggctgtaggactggctgtgctccttatcccccttaaggggcagggtacttttgggatataacttgtaacagactggctgcccatccatctgcccatctctggaggtgtctaactaaatatttgtatgacttttgtattttatgaatttcactactagtgacaacttatttagcagcaaaagtgctaaactagacaaaagactttatcaaaaatgaaaatacttttttttgcaaaaaaatttaaagtgttaaatatgaataagggtttacattttgttctgtgtgtagcgtgcataaactgagtaagaatttccataacagtctctttttttactctaaatctgcatgagaatggactgtagagctattctgttgagttaattataccctaaaatgtttagtattgcctcttatcaatcaagtttgcattttcataaggtatttttgatgactgaatgatttaacatacgcaaaacacatctggacactacttggcatttagttaagtgctcaaaaatattacttcttttcctcttttatcaggaaattatttctgccctcagttccaactctgcaagtgagtctcttagattcatagaaaatactcaatgaccattagccgttattctttttgtttctctattctgtattttcttatgaagtagctttaaattttcataataaagaacaggaaatgaaaagggcatttctaaaaccaattctacacacttaaagraaagtagagagttaagacaatatagtcaattcaaacacaccaaaacatttaactcagaaatatctccctaattctttctatttttcagaattagccagatggttcaatacttctcggtgggatctgagaattaaaatgaatgtcatgtagtaccccctaaataaatgtatgctgactgatagataattgcatttcttcttcagatcacacttcatatatacatatagattttttttgctgtcagctgtgaaaggtcctaccggtctgctaataattgagcaagcatgttttagtgctgcatgtatgcattgaaatgaaccaagtgtaattataggcctctccctttgaacatcaaagggcacagcgctgtcaatatgcccgcatcaagccagcagcctaatttactatttaataatacatttgtgtgtcagacctctctttgcccagggctgttacagttcaactagttcctctgctgttaaaaaattgatcatctttctttcctgatatttggaaaaggaacaataaaatttatctctgtcaattgaaaggtctgttcactttaaccttgacctgtttatttcagaagtgtaagagggcttaaacacatgaagaagcagtaaagtaaaagaaaccttaaaattagtgatttaggaaatagctgaaagtagaagatggtttctatacaaaacatttgctctggagtgatatctatacaaactgggtcacaaaacctgacttttttaaagtgttgttgaaccaaatacgttagaatctcttgaaatgaatcagaatcctgggtaggaggaggctggagctggacaaagaggaaagacaactgggaat

SEQ ID NO: 719005 - DNA, 1646 bp, Homo sapiens
ctgctctgggtgtattttcattgattctagagccctcagtggagaagagagtttattggctttgaggctgtaggactggctgtgctccttatcccccttaaggggcagggtacttttgggatataacttgtaacagactggctgcccatccatctgcccatctctggaggtgtctaactaaatatttgtatgacttttgtattttatgaatttcactactagtgacaacttatttagcagcaaaagtgctaaactagacaaaagactttatcaaaaatgaaaatacttttttttgcaaaaaaatttaaagtgttaaatatgaataagggtttacattttgttctgtgtgtagcgtgcataaactgagtaagaatttccataacagtctctttttttactctaaatctgcatgagaatggactgtagagctattctgttgagttaattataccctaaaatgtttagtattgcctcttatcaatcaagtttgcattttcataaggtatttttgatgactgaatgatttaacatacgcaaaacacatctggacactacttggcatttagttaagtgctcaaaaatattacttcttttcctcttttatcaggaaattatttctgccctcagttccaactctgcaagtgagtctcttagattcatagaaaatactcaatgaccattagccgttattctttttgtttctctattctgtattttcttatgaagtagctttaaattttcataataaagaacaggaaatgaaaagggcatttctaaaaccaattctacacacttaaagaaaagtagagagttaagacaatatagtcaattcaaacacaccaaaacatttaactcagaaatatctccctaattctttctatttttcagaattagccagatggttcaatacttctcggtgggatctgagaattaaaatgaatgtcatgtagtaccccctaaataaatgtatgctgactgatagataattgcatttcttcttcagatcacacttcatatatacatatagattttttttgctgtcagctgtgaaaggtcctaccggtctgctaataattgagcaagcatgttttagtgctgcatgtatgcattgaaatgaaccaagtgtaattataggcctctccctttgaacatcaaagggcacagcgctgtcaatatgcccgcatcaagccagcagcctaatttactatttaataatacatttgtgtgtcagacctctctttgcccagggctgttacagttcaactagttcctctgctgttaaaaaattgatcatctttctttcstgatatttggaaaaggaacaataaaatttatctctgtcaattgaaaggtctgttcactttaaccttgacctgtttatttcagaagtgtaagagggcttaaacacatgaagaagcagtaaagtaaaagaaaccttaaaattagtgatttaggaaatagctgaaagtagaagatggtttctatacaaaacatttgctctggagtgatatctatacaaactgggtcacaaaacctgacttttttaaagtgttgttgaaccaaatacgttagaatctcttgaaatgaatcagaatcctgggtaggaggaggctggagctggacaaagaggaaagacaactgggaat

SEQ ID NO: 719006 - DNA, 886 bp, Homo sapiens
tacaatgatcctaataattgcagaattatttacagtagataaatagcagatacttagtatctatrttgtgtcagaaaaaggtgaagtctattttagataagctagtcttatcactgtcctcaaaaattggaagaaaaaaatgaaggaagaagaattgaaaacagtgattcaagcaaatacttgtatcctaatgatcattgcagaattatttacagtaaataaaagtggaaacaacacaagtgtccaacaaatgaatgaataaacaaaatgtggtaatccatgcaatgtaatactattcacctatgaaaaggaacaaagttctgatacatgctacaataaggatgatccttgtaaatattatgctaactcaaataaaccagacaaaaaggacaaatattgtatgattccacttacataaagtatctagaataggcaaattcataaatcagaaaacagactacaagtcaccaaaggctaggtaaaggggaaatggggagatattgtttaatgtgtacagagtttctgtttggggcaatgaaaaagttccagaaatggagagtggtgatgattgcacaacattgtaaatatactgaatgacactgaattgtacgctcaagaatggtaaaatcacaaatgttatgtgattatatgtatatatatatatatatatgcgcacgcgcacacacacacacacacacacacacacatatattttaacacgataaaaaatttttcagaaaagaaagccaaaatggagaactgactagtaacaaaagcttaccaaacctcatcgcacctcaacacctattctgcctccctcggagcacattatgtggtaaaatatgcacatctgcatatgtttataaaactatgaagcatatgaata

SEQ ID NO: 719007 - DNA, 2050 bp, Homo sapiens
ttttttttttgagagatggagtctcactctgtcgcccaggctggagtgcagtagcatgatctcggctcactgcaacctttgtctcctgggttcaagtgattctcctgcctcagcctcccgagtagctggtgttacaggcaagcaacactacgcccagctaatttttgtatttttagtagagacggggtttcaccatgttggccaggctggtctcaaactcctggcctccagcaatccacccgcctcggcctcccaaagtgctgggattacagatgtgtgacaccacacccagcatgatcctactacttgtctacatgtcaatctgtgttgttcattattactggccatttcccggccccccaccaccaccaaccttcttgcttttcctaaggaccaaatttaattttcagcagccctgggttcacaaactgagttctgacccaacttaaaatagttctcatccttggtttcctttttttgagtcgaggtctcactctgtcacccaggctggagtgcagtgtgccacaatcacggctcactgctcctggctcactgcagcctcaaactctaggcccaagtgagcctccgacatcagcctcctaagagctgggaccatgggcaggtgtaccatcatgcttggttaatttttctattttttgcatagacaagttctctctctgttgcccaagccagtcttgaattcctgggctcaagcaatccacccacctcagtctctcaaagtgctgagattacaggcgtgagtcaatgcacctcacctgttttttgttttgttttgttcatcctttctaaaatgatcccagaagggtctctcaaaaatgctgggacctatttataaacatttttaaagaacacacttgatgatattgactcaaatacttgccactgaaggtaaagcccctattctatgtgtctttcggctttgacaagtcatatattaaataactgaccctctaaattggaagagactttggaggtcggcctaattcctgtccttctcttctaccgcatccctaatcaacagcattcagccctacttgaatacygccaacagccgtaagctcactacttcctgggcagacatttcttctgttggacagatctgccagctagaaaatcctttttcatattgaactgaaatctgctgtcccagtctttcgggtcaaaggggacctcaaagtctatcaacttcagcatgatcgctgatcattctacagacaaggaatcatgtaatcatgccataaattaggaatctgcagctacagagaataaagtgactgtttcatctattggttgtattcgaacaccaggagtaaaaatgaacgtctcctccttcctatgtctgataaccaggaaaatatttgaaggtgctactgtgtacccaatgcatgaatacagtttagttattccctatcctacagcatcctactctcctttccaggatcaagtcttcttgctcatatccctattaactcttggctctccagggtccaaatgtcacctgaccagccaaggtcattaagactagatcttatgattagatcactgaatttctgatcctgttataaactgcattcaattttttaaaagccatatcttagagctaagctcagtggcccatgtgcgtagacccagccacttgggaggctgaggcagaaggatcgcttcagcccaggagttcgaatccagccaggacaacatggcaagactcatgactctctgaaaaaaataaaaatagaaacaaataaaaataaaagcctcatccactgaaggctcacactgaactgatgaacaacagaaaaatcccaacgctttttttctccatgccctgcccctcctcagtggacctgtgccaacctggggtcaaagactctgtcttccactgtgactctagtttctgaccttgaggttgacacagcgagcaggcactcaagattaatcactgaatgaatcatctactttaccctttcttgtccttgaaccataaaaagttttaaaaattgcagatgtccccactgtggaatacatacac

SEQ ID NO: 719008 - DNA, 1589 bp, Homo sapiens
gttactatagaaatccacatgaacatgatgagtacccacccaaatgaaggaaaatcttttgttcttatacaatttagtgaagtttttattatcttattaggcatggactgttattcctcattgactgacttttgaggaaattccattgcttgggagaatgtgagcatagtgttttgtacaaatatcagaggagtatacaaactggcatattcaacctaaccagactcttgttcactcaagttttcccatatttttagaaatcatatgtagttgttctctttagggtataccattgactctaaaataatgggttattgggatatttggaaactcaatggagttcatgttcttttctcatggagaaaacgagagagctgtttccagaagtctttaaaagacttctaagctactttcttatttgctccttaactttttcagtgcaaaaacaaattttttaggttttggcatttgtatttatttgaatttttttacattgactcaccattctttgtggattarggaattaatcagttcaagtgaataaacaatgaaatgtctttaatattctgtagagtaatgataattcagatgcttattgactgcagtgtgtggtatggttttctgtcataatataacatagatgagtagagcatgggctttggtgttaactgaattcggatccaattgtttgttatgtgaccttcagaagatcagttagccttttaaagcctattttcccctctataaaattgaatatgatcacctctatttgcagattgtattgaagaatgtgaaacacttggcacagggaaggggcatcaccaattcatgaaagtatgtcgtagtcatttgggtgtcagtatttggtagagttttaagcatacatttttaaaatgtgttatgtttccagacaagtagaggaaggatgaaacattcctacattccttgtttattttcaaatagccagattttagataaaccatttggattatggggcagattgataatttgatgatctggcattctgtggcatacagctttgaaacataatgttaaataaaaggtagttcacatcaaaagtccagtatgatccctttagttaccatgtaagtctgcttttatttggttttatataccagtgaaaactgaacctgatcttaatagcctttcaggttttttgtttttttgagacagggtctcactctgccacacaggctggggtgcagtggttgcaaccaaagcccactgtaacctggaactgctgggctcaagtgaccctcctgcctcagcctactgagtagctagaagcacaggcatgtggcaccatgcctggctaagttttttagaaaagggttttgtagaggcagggtctcactatgttgcctagactggtctcaaactcctgggcttaagtcatcctcctactttggccttgcaaagtgctgggattataagtgtgagccaccatgcccagctgtctttccgttttaaaataagttgttcaccttctaggaaggtgggtgaatggacacttttgttacatttgttacaatgactgtttcctttttatttagactaagcaacctggg

SEQ ID NO: 719009 - DNA, 899 bp, Homo sapiens
cctagactcagatggtgagagacaaccctttcccttctctggaatccttcagatttactgaagtgcgaggtgttggaagtcgtcacttctgtgaaatgtagaagatggattggtttaaaatttagggtgtagagtcaaaccaatgtgagtttcagttccagctctaccatgtrgcagcattgcatcttaggctacttaacctttgtgagcctctgatcacatgatttagtgcccacctcaccaggctgttgtgaggaataaatgaggcagtatgtagagagcactgttggcatggctggcccttagtaacacttattctttgtgtataataacatggacaattgtagtgccttctccctctcagcactgtggctttgcatccactcaggtttttgggatttccttacacattttttcatataaactcaggaggttcccaagggaacacactccaagaattagatgaaaaaaactgcagaaaaatccacctcacatgaaaatctctgtatttaatatttttaaaaaattaccactgtgtttgttgcagctgtgacctctacaagttccagagactactctctgacttttggtgcaatcaaccaaacatggtcctaccgcatccaccagaacatcacttaccaggtgtgcaggcacgcccccagacacccgtccttccccaccacccagcagctgaacgtggaccgggtctttgccttgtataatgacgaagaaagagtgcttagatttgctgtgaccaatcaaattggcccggtcaaaggtaaggtttccttttttgttgttgggtaaaaatgacatccttttaagtagagttagaatgattcacagaggttactaagggttacctagtgccatgctgtgttatgtgctaggtataagga

SEQ ID NO: 719010 - DNA, 899 bp, Homo sapiens
cctagactcagatggtgagagacaaccctttcccttctctggaatccttcagatttactgaagtgcgaggtgttggaagtcgtcacttctgtgaaatgtagaagatggattggtttaaaatttagggtgtagagtcaaaccaatgtgagtttcagttccagctctaccatgtggcagcattgcatcttaggctacttaacctttgtgagcctctgatcacatgatttagtgcccacctcaccaggctgttgtgaggaataaatgaggcagtatgtagagagcactgttggcatggctggcccttagtaacacttattctttgtgtataataacatggacaattgtagtgccttctccctctcagcactgtggctttgcatccactcaggtttttgggatttccttacacattttttcatataaactcaggargttcccaagggaacacactccaagaattagatgaaaaaaactgcagaaaaatccacctcacatgaaaatctctgtatttaatatttttaaaaaattaccactgtgtttgttgcagctgtgacctctacaagttccagagactactctctgacttttggtgcaatcaaccaaacatggtcctaccgcatccaccagaacatcacttaccaggtgtgcaggcacgcccccagacacccgtccttccccaccacccagcagctgaacgtggaccgggtctttgccttgtataatgacgaagaaagagtgcttagatttgctgtgaccaatcaaattggcccggtcaaaggtaaggtttccttttttgttgttgggtaaaaatgacatccttttaagtagagttagaatgattcacagaggttactaagggttacctagtgccatgctgtgttatgtgctaggtataagga

SEQ ID NO: 719011 - DNA, 899 bp, Homo sapiens
cctagactcagatggtgagagacaaccctttcccttctctggaatccttcagatttactgaagtgcgaggtgttggaagtcgtcacttctgtgaaatgtagaagatggattggtttaaaatttagggtgtagagtcaaaccaatgtgagtttcagttccagctctaccatgtggcagcattgcatcttaggctacttaacctttgtgagcctctgatcacatgatttagtgcccacctcaccaggctgttgtgaggaataaatgaggcagtatgtagagagcactgttggcatggctggcccttagtaacacttattctttgtgtataataacatggacaattgtagtgccttctccctctcagcactgtggctttgcatccactcaggtttttgggatttccttacacattttttcatataaactcaggaggttcccaagggaacacactccaagaattagatgaaaaamactgcagaaaaatccacctcacatgaaaatctctgtatttaatatttttaaaaaattaccactgtgtttgttgcagctgtgacctctacaagttccagagactactctctgacttttggtgcaatcaaccaaacatggtcctaccgcatccaccagaacatcacttaccaggtgtgcaggcacgcccccagacacccgtccttccccaccacccagcagctgaacgtggaccgggtctttgccttgtataatgacgaagaaagagtgcttagatttgctgtgaccaatcaaattggcccggtcaaaggtaaggtttccttttttgttgttgggtaaaaatgacatccttttaagtagagttagaatgattcacagaggttactaagggttacctagtgccatgctgtgttatgtgctaggtataagga

SEQ ID NO: 719012 - DNA, 899 bp, Homo sapiens
cctagactcagatggtgagagacaaccctttcccttctctggaatccttcagatttactgaagtgcgaggtgttggaagtcgtcacttctgtgaaatgtagaagatggattggtttaaaatttagggtgtagagtcaaaccaatgtgagtttcagttccagctctaccatgtggcagcattgcatcttaggctacttaacctttgtgagcctctgatcacatgatttagtgcccacctcaccaggctgttgtgaggaataaatgaggcagtatgtagagagcactgttggcatggctggcccttagtaacacttattctttgtgtataataacatggacaattgtagtgccttctccctctcagcactgtggctttgcatccactcaggtttttgggatttccttacacattttttcatataaactcaggaggttcccaagggaacacactccaagaattagatgaaaaaawctgcagaaaaatccacctcacatgaaaatctctgtatttaatatttttaaaaaattaccactgtgtttgttgcagctgtgacctctacaagttccagagactactctctgacttttggtgcaatcaaccaaacatggtcctaccgcatccaccagaacatcacttaccaggtgtgcaggcacgcccccagacacccgtccttccccaccacccagcagctgaacgtggaccgggtctttgccttgtataatgacgaagaaagagtgcttagatttgctgtgaccaatcaaattggcccggtcaaaggtaaggtttccttttttgttgttgggtaaaaatgacatccttttaagtagagttagaatgattcacagaggttactaagggttacctagtgccatgctgtgttatgtgctaggtataagga

SEQ ID NO: 719013 - DNA, 899 bp, Homo sapiens
cctagactcagatggtgagagacaaccctttcccttctctggaatccttcagatttactgaagtgcgaggtgttggaagtcgtcacttctgtgaaatgtagaagatggattggtttaaaatttagggtgtagagtcaaaccaatgtgagtttcagttccagctctaccatgtggcagcattgcatcttaggctacttaacctttgtgagcctctgatcacatgatttagtgcccacctcaccaggctgttgtgaggaataaatgaggcagtatgtagagagcactgttggcatggctggcccttagtaacacttattctttgtgtataataacatggacaattgtagtgccttctccctctcagcactgtggctttgcatccactcaggtttttgggatttccttacacattttttcatataaactcaggaggttcccaagggaacacactccaagaattagatgaaaaaaactgcagaaaaatccacctcacatgaaaatctctgtatttaatatttttaaaaaattaccactgtgtttgttgcagctgtgacctctacaagttccagagactactctctgacttttggtgcaatcaaccaaacatggtcctaccgcatccaccagaacatcacttaccaggtgtgcaggcacgcccccagacacccgtccttccccaccacccagcagctgaacgtggaccgggtctttgccttgtataatgacgaagaaagagtgcttagatttgctgtgaccaatcaaattggcccggtcaaaggtaaggtttccttttttgttgttgggtaaaaatgacatccttttaagtagagttagaatgattcacagaggttactaagggttacctagygccatgctgtgttatgtgctaggtataagga

SEQ ID NO: 719014 - DNA, 899 bp, Homo sapiens
cctagactcagatggtgagagacaaccctttcccttctctggaatccttcagatttactgaagtgcgaggtgttggaagtcgtcacttctgtgaaatgtagaagatggattggtttaaaatttagggtgtagagtcaaaccaatgtgagtttcagttccagctctaccatgtggcagcattgcatcttaggctacttaacctttgtgagcctctgatcacatgatttagtgcccacctcaccaggctgttgtgaggaataaatgaggcagtatgtagagagcactgttggcatggctggcccttagtaacacttattctttgtgtataataacatggacaattgtagtgccttctccctctcagcactgtggctttgcatccactcaggtttttgggatttccttacacattttttcatataaactcaggaggttcccaagggaacacactccaagaattagatgaaaaaaactgcagaaaaatccacctcacatgaaaatctctgtatttaatatttttaaaaaattaccactgtgtttgttgcagctgtgacctctacaagttccagagactactctctgacttttggtgcaatcaaccaaacatggtcctaccgcatccaccagaacatcacttaccaggtgtgcaggcacgcccccagacacccgtccttccccaccacccagcagctgaacgtggaccgggtctttgccttgtataatgacgaagaaagagtgcttagatttgctgtgaccaatcaaattggcccggtcaaaggtaaggtttccttttttgttgttgggtaaaaatgacatccttttaagtagagttagaatgattcacagaggttactaagggttacctagtgccatgctgtgttaygtgctaggtataagga

SEQ ID NO: 719015 - DNA, 1119 bp, Homo sapiens
aaaaccatcttcctcaattcagccactgtattgaaactgttgagcccagagttagctcctcagtgaggtgaatctgtaagtgatacgcggttctgtgctttgttattggagctragggctccttaagcctcagcaggctcaataaagaagtgttgcttcagcaatatgacaagattaaggtacaaggactagactcttttctaggatgcgaaagtgacttgtaatgagaatcccgaggtgctttggttttaagaaacttggttgggaatgtaggcattaggtgcccagatattggattgtaaggtagcaaatgaacacatgaaaatgtgagttgattttagaggaacatgtaaattagaaagggaaagattgctgtagtagatttctcaaagagagatttaaacctactggggagaatggtctttacctttaaatgtccaggtcagcccctgtgttgggtgtaggcatctgatctgtaaaagcaactgttagtgaaatttcccaggctatggagtcccattcagattctggaaccatttaggaaaaagatgtgtctctgggtatatttttcctagagacataccaaatgagagtaagaaaggatcagagaaagcaaactggcaggtaccaagttgcttgttttctttagaattttatgattttccctcccaccccagtcaaataataatatcaaaggatggtttacttggtgccaagtactgttctaagcaccttacatgaattaactcatttaatccccacaatgacctctacccaatggtggggtgggggtggggttatttgttatcccattttacagatgatgagactgaggtatagaaatgaagtaatttgcctggtcatagtaagtgacctgggtgagctgggactcaaactcaggcactggctccagtacgcacacccttacccctcatggctctgctgttccacagtggcctcatgactgcctcataatttagaccaaactttgaaagaggcaatgtgtgtcttttaaaccctttgtgtttgaaccctacttcatccacacacagcagtactgttcattctacctgaataggagggaaaaaaagaaaaacaaaaaagaaacacccaaaagtt

SEQ ID NO: 719016 - DNA, 1119 bp, Homo sapiens
aaaaccatcttcctcaattcagccactgtattgaaactgttgagcccagagttagctcctcagtgaggtgaatctgtaagtgatacgcggttctgtgctttgttattggagctgagggctccttaagcctcagcaggctcaataaagaagtgttgcttcagcaatatgacaagattaaggtacaaggactagactcttttctaggatgcgaaagtgacttgtaatgagaatcccgaggtgctttggttttaagaaacttggttgggaatgtaggcattaggtgcccagakattggattgtaaggtagcaaatgaacacatgaaaatgtgagttgattttagaggaacatgtaaattagaaagggaaagattgctgtagtagatttctcaaagagagatttaaacctactggggagaatggtctttacctttaaatgtccaggtcagcccctgtgttgggtgtaggcatctgatctgtaaaagcaactgttagtgaaatttcccaggctatggagtcccattcagattctggaaccatttaggaaaaagatgtgtctctgggtatatttttcctagagacataccaaatgagagtaagaaaggatcagagaaagcaaactggcaggtaccaagttgcttgttttctttagaattttatgattttccctcccaccccagtcaaataataatatcaaaggatggtttacttggtgccaagtactgttctaagcaccttacatgaattaactcatttaatccccacaatgacctctacccaatggtggggtgggggtggggttatttgttatcccattttacagatgatgagactgaggtatagaaatgaagtaatttgcctggtcatagtaagtgacctgggtgagctgggactcaaactcaggcactggctccagtacgcacacccttacccctcatggctctgctgttccacagtggcctcatgactgcctcataatttagaccaaactttgaaagaggcaatgtgtgtcttttaaaccctttgtgtttgaaccctacttcatccacacacagcagtactgttcattctacctgaataggagggaaaaaaagaaaaacaaaaaagaaacacccaaaagtt

SEQ ID NO: 719017 - DNA, 1119 bp, Homo sapiens
aaaaccatcttcctcaattcagccactgtattgaaactgttgagcccagagttagctcctcagtgaggtgaatctgtaagtgatacgcggttctgtgctttgttattggagctgagggctccttaagcctcagcaggctcaataaagaagtgttgcttcagcaatatgacaagattaaggtacaaggactagactcttttctaggatgcgaaagtgacttgtaatgagaatcccgaggtgctttggttttaagaaacttggttgggaatgtaggcattaggtgcccagatattggattgtaaggtagcaartgaacacatgaaaatgtgagttgattttagaggaacatgtaaattagaaagggaaagattgctgtagtagatttctcaaagagagatttaaacctactggggagaatggtctttacctttaaatgtccaggtcagcccctgtgttgggtgtaggcatctgatctgtaaaagcaactgttagtgaaatttcccaggctatggagtcccattcagattctggaaccatttaggaaaaagatgtgtctctgggtatatttttcctagagacataccaaatgagagtaagaaaggatcagagaaagcaaactggcaggtaccaagttgcttgttttctttagaattttatgattttccctcccaccccagtcaaataataatatcaaaggatggtttacttggtgccaagtactgttctaagcaccttacatgaattaactcatttaatccccacaatgacctctacccaatggtggggtgggggtggggttatttgttatcccattttacagatgatgagactgaggtatagaaatgaagtaatttgcctggtcatagtaagtgacctgggtgagctgggactcaaactcaggcactggctccagtacgcacacccttacccctcatggctctgctgttccacagtggcctcatgactgcctcataatttagaccaaactttgaaagaggcaatgtgtgtcttttaaaccctttgtgtttgaaccctacttcatccacacacagcagtactgttcattctacctgaataggagggaaaaaaagaaaaacaaaaaagaaacacccaaaagtt

SEQ ID NO: 719018 - DNA, 1119 bp, Homo sapiens
aaaaccatcttcctcaattcagccactgtattgaaactgttgagcccagagttagctcctcagtgaggtgaatctgtaagtgatacgcggttctgtgctttgttattggagctgagggctccttaagcctcagcaggctcaataaagaagtgttgcttcagcaatatgacaagattaaggtacaaggactagactcttttctaggatgcgaaagtgacttgtaatgagaatcccgaggtgctttggttttaagaaacttggttgggaatgtaggcattaggtgcccagatattggattgtaaggtagcaaatgaacacatgaaaatgtgagttgattttagaggaacatgtaaattagaaagggaaagattgctgtagtagatttctcaaagagagatttaaacctactggggagaatggtctttacctttaaatgtccaggtcagcccctgtgttgggtgtaggcatctgatctgtaaaagcaactgttagtgaaatttcccaggctatggagtcccattcagattctggaaccatttaggaaaaagatgtgtctctgggtatatttttcctagagacataccaaatgagagtaagaaaggatcagagaaagcaaactggcaggtaccaagttgcttgttttctttagaattttatgattttccctcccaccccagtcaaataataatatcaaagsatggtttacttggtgccaagtactgttctaagcaccttacatgaattaactcatttaatccccacaatgacctctacccaatggtggggtgggggtggggttatttgttatcccattttacagatgatgagactgaggtatagaaatgaagtaatttgcctggtcatagtaagtgacctgggtgagctgggactcaaactcaggcactggctccagtacgcacacccttacccctcatggctctgctgttccacagtggcctcatgactgcctcataatttagaccaaactttgaaagaggcaatgtgtgtcttttaaaccctttgtgtttgaaccctacttcatccacacacagcagtactgttcattctacctgaataggagggaaaaaaagaaaaacaaaaaagaaacacccaaaagtt

SEQ ID NO: 719019 - DNA, 1119 bp, Homo sapiens
aaaaccatcttcctcaattcagccactgtattgaaactgttgagcccagagttagctcctcagtgaggtgaatctgtaagtgatacgcggttctgtgctttgttattggagctgagggctccttaagcctcagcaggctcaataaagaagtgttgcttcagcaatatgacaagattaaggtacaaggactagactcttttctaggatgcgaaagtgacttgtaatgagaatcccgaggtgctttggttttaagaaacttggttgggaatgtaggcattaggtgcccagatattggattgtaaggtagcaaatgaacacatgaaaatgtgagttgattttagaggaacatgtaaattagaaagggaaagattgctgtagtagatttctcaaagagagatttaaacctactggggagaatggtctttacctttaaatgtccaggtcagcccctgtgttgggtgtaggcatctgatctgtaaaagcaactgttagtgaaatttcccaggctatggagtcccattcagattctggaaccatttaggaaaaagatgtgtctctgggtatatttttcctagagacataccaaatgagagtaagaaaggatcagagaaagcaaactggcaggtaccaagttgcttgttttctttagaattttatgattttccctcccaccccagtcaaataataatatcaaaggatggtttacttggtgccaagtactgttctaagcaccttacaygaattaactcatttaatccccacaatgacctctacccaatggtggggtgggggtggggttatttgttatcccattttacagatgatgagactgaggtatagaaatgaagtaatttgcctggtcatagtaagtgacctgggtgagctgggactcaaactcaggcactggctccagtacgcacacccttacccctcatggctctgctgttccacagtggcctcatgactgcctcataatttagaccaaactttgaaagaggcaatgtgtgtcttttaaaccctttgtgtttgaaccctacttcatccacacacagcagtactgttcattctacctgaataggagggaaaaaaagaaaaacaaaaaagaaacacccaaaagtt

SEQ ID NO: 719020 - DNA, 603 bp, Homo sapiens
tgagycactgcgcccggccccttattccttcttggtgcttgacctgaaaactggggagagctgccatcttgtaggcaatgaaactttggccatgtctctggagtctggggaaaaagcatacttttaagctgaaatccacatcacagccatgagtttaaatatgaaagtagaactttcttatccagacagcaaatataaatgctaaaggacttgaatttttaataaaaagaaaacccaccttgaaccaggttgcaatataacacatgtaattacatctccttcaactgcgtaacagaatggttgtcaagccttcctgcatatttctcatttgctttctatagatttcacctttacaactttcttcctctggcaatccccaaataatttacaccaaatatctgtgtgagcttgtttcagacttattgttgttgatgatattaaatcattttggggaggagactgatcagaagcgatgaagcaatgatatgcatgctgtaccctctggccacctccaccttagcgcaaagtggaaactgctttctagcttttgctctcagcttctctctgcttcatctgttgggcataagggatgaaattcgcaac

SEQ ID NO: 719021 - DNA, 2729 bp, Homo sapiens
tgagaccgaatatcggcagtgatagcctatcacttctgctatactctatgcactagaagaagcaagacactactaatgcagcccaaactcaaggggattgcttaaggctataatacatgaggagatggagatcactgggggctgcttagatgctgcctaccacaggctacatggctattcttttacaatcttgatttttaacttacagcaacttgtactggacagactggaatagagaagctcctaaaattgaaacgtcatctttagatggagaaaacagaagaattctgatcaatacagacattggattgcccaatggcttaacctttgaccctttctctaaactgctctgctgggcagatgcaggtaatactactgatggaatgcaaatagataacctctcatcacagtgaatgtgagcactaacagattttactacaaaatgaaatcccatcacttagatctcctttctttggtctgtaaacttttaagtactagtaaatttaagtactagtaaatgagtcttaaaatgaactttctggggtttgggtggagggaaggatatatcaagcagtaagtttgtactgcttgcctgaccatgagtgcctggcatatttttaacagttaaaagaattagccattgttgaattgacaaacttaagtgaagttattcttatgcggggagagggtcactataacttacctataaacatctgttataatgctaaggacattctttggaaagcattgtagcagggtagcttccttcagtaataacatgggtattagcaacctacatttgtttgcttttatcagcacaactgaaaaaatgctgtgtgtctagttctatactaaagaatatgaaaaagactgttcttgaatttgtaatctaataaaagggcctaatgtacataggtcacttttataacccagttgtttaaaacaagttacatttcttaaaaggatttgaaatttaaatcggctccatgagaaatgtgaaacttggaaattcttgaatggtttagctattgtaaaaatttttaagactgattcctttacattgaaatatgagttatgttaccattttagtcacttttttcctcctacctagaaaatattttaaaaatactaaggattttggttaaaaggttgcctcagtaattayagacatagcttacaaagggcaagtatttacccagatgttataatttataagctaaggcttgaaatcacacaaattataaaaataattatgtttaatgccctactttggcagaaacttaccagatttcagtaaatgcaatcctgtcttccaaaaaaggattgaaagtttgaatctctactaaaaactggagactagtaataggacaggtaattttacagttgctaatctatgactgtaatggaagtaaaatatcctatttccccattctatcactgtgtcactatcactatgtcactatcatttttggcaaagcagctgaaggacctcattttccccctttgttttaaaaggaaccaaaaaactggagtgtacactacctgatggaactggacggcgtgtcattcaaaacaacctcaagtaccccttcagcatcgtaagctatgcagatcacttctaccacacagactggaggaggtgagccccacaaattctggacaagcctgaaaaggccaactgttccagaggacacaccacttgttttaccaaaagtcagtacctgacttgactcattaagccctctgaggcttttgtttcatcacctcctcattggcagataagatccttcaaggatgtttttcatcctttcatgtttttgaaatcatccttttacttcacccagaaatcgaatggtattgctcacatatagcttaaaaagtagcaaagctattggataatgtctcaaaagggagcatattaatctaaatatgttctttagagaataagactacccttgataccatgagctatattacagggcttaagttggcttttgacactgtggacatattgtctgagggaccgaaaaatactatttagactagttctcaaatgaggaactgtggaacattaaagtctaagccctttacaccatgccctacaactctgatttgatagctcatcatgtgattctaacatgcagctagagatgagcaatggatttagagcaatggtcttcaaacttcagtatggctttagcaccagccctgggacagagaaggctgccagaaattttcctctattgcaactgattttctgtggctgacttctttatctagtaaatgactgtccctgaattcactcttcctttctgttaccagggatggtgttgtatcagtaaataaacatagtggccagtttactgatgagtatctcccagaacaacgatctcacctctacgggataactgcagtctacccctactgcccaacaggtaaaaagtatgctttaggatgctcctttaaattagcagggtagagaagggatatatatggtatttgattacccctgctgcctgtgacactgccaccattgccttcttcctgccctgagggccagtctttactaccttaaatctacctagtttatacacaaaatgcaaagacttgctgttgcaacttggttacaatatactcacccaccaccctgtcccacccctgctcttctctcacaggaagaaagtaagtacagtaatgtaaaggaagacttggagtttacaatcagaacc

SEQ ID NO: 719022 - DNA, 647 bp, Homo sapiens
gaaacagcagctggagaatggagaggaaagtgatgtgggagagagaaaactttctttacccttttcataactgagtttatgaagtaaactgacagtagaaagataaataggagaaaagacataaatttattttgtgcgtacacatgggagtcccataaaatatgagactcaaagaaaggccagatgattgaagtttatatagtattcctgagctacagaaaaggaatcagggcttggggcttattgaggggaggtggtgacaggttataagagggtgaggagaggaagtgtatagcragcataggttgtcttgttatgcagataaaaagtctctcaggtgataaaagttgtctcagagtcccccatcagaagaataggtaatagcctgtgacaaggtctacctgtccaatcttctccctggtgataaaatcttccctggttgatgagattcttatcaaagtttttttctttatagatataaattttgtttacaaaaagacagtttttcagagctactcctgtgtctacagtgtctcagaataactaactggaaatacatcaaataagcatatcctgatgtggcatattctggtcatattttgggatggtgcgtcctgagctccaatgctgaaaaaacaggaacccca

SEQ ID NO: 719023 - DNA, 988 bp, Homo sapiens
ggaggcggaggcgaggggattgctgaggccaggagttcaagaccagcttggccaatttagtgagaccccatctccattaaaaaatgataaaataaaataattgattttgagaaaggatgtggacaaagtgcagcacatagaccaagggcccagttctgtttgagggcattggaagcaacttccacagcaaagacttgggttgaaatttacaaaaataggagtttgccagcttgacagagaggcagcggaggtcaaccagcagcacacttaagcagtcatggaggctgacctaggcgctggacatggaaaagtagcaatcctggagctttgtatagatgtggggagggaacttacaggggaccaactaggctactgggcaatttcacattataaagaattttatatgctcaaattaaaggattaaaaattttcccccatgtacataataaattggcaaaaatggttatatttgagggtgactaaggaactctgggaaagagatcggcaaaccaggcacatgttcttgactactgcaaaagtacatttaaagtagccgcgggggatacatgtatacttttgggcaggattgtgccgtggtcctctcagcatgcagcaaagttactttggggacagtagggaggtgggcaggagccagtgatgacggaatggcaatcacatttgacctctgatctgtttatttcctcctccttgacgtctccatataaatgttacacgggcatccccacactcggatacgcacccacagtggctgattcgggggtaaccgtgtcatttgcttgcaacactggcacctctgccctgcaccccgggartgagcagtgagtgaggctcgggtctgggcgctggctccgaatcttcgggctgggagagactccaccatctgggggcggcctgggggagcagccttagtgtcttcctgctgatgcaatccgctaggtcgcgagtctccgccgcgagagggccggtc

SEQ ID NO: 719024 - DNA, 957 bp, Homo sapiens
tgcaaaatcggggtgaaggggaactgtgcaaggagcctccagagttttaatactcgagatctgctctctcccttaacaactagggttttcttggtttgagatgtaggcctttagctgagcctcagcctcagtgggacctggagaggacaaggccaccatggttctgagatctgtgtggagactgtgggcagctccataggctgggtggagaaatggacctacagctaaaagcaaaacaggagatggacagccggaagctattggctctagggcagcgattcacagtccttgctgtgtcccagagtcatgtgggaaatgattttaaaataaatattccttggtatctactaaagctgaaaatatgtatatccartgacccagtaattttacttcattgtatataccctataggaatatacatattaaccaaaaatcatgtactaaaatgtttataaaagcactatttgtgttgccccaaagtgggaacaaaaatgctcaacagcagaattaaaaaataaattttgggacatttatataataaaatcccatataggggcatatatgtatacttcaaaaaagtttatatatgtgtgtgtatacatatatatatatatatatatatatatacacatttataaatatagatatagttaaagctataaatatatatacacacatacataaacatatatatagttttagatatgggtataattgtagatatatctatttgtagagagaacaaaatcagcaaaatgatggaaaataagagaagtgaatataggaaaaataggaaaaatacagacaaaaagagagagagaagatagatataataaaatacaaattaaatataagtatattgaaatatatggttctcatcaaaatggaataagttcatttttgtttcaaaatggaataggcccatgtcacttatcttttccactgattacaactgaa

SEQ ID NO: 719025 - DNA, 957 bp, Homo sapiens
tgcaaaatcggggtgaaggggaactgtgcaaggagcctccagagttttaatactcgagatctgctctctcccttaacaactagggttttcttggtttgagatgtaggcctttagctgagcctcagcctcagtgggacctggagaggacaaggccaccatggttctgagatctgtgtggagactgtgggcagctccataggctgggtggagaaatggacctacagctaaaagcaaaacaggagatggacagccggaagctattggctctagggcagcgattcacagtccttgctgtgtcccagagtcatgtgggaaatgattttaaaataaatattccttggtatctactaaagctgaaaatatgtatatccagtgacccagtaattttacttcattgtatataccctataggaatatacatattaaccaaaaatcatgtactaaaatgtttataaaagcactatttgtgttgccccaaagtgggaacaaaaatgctcaacagcagaattaaaaaataaattttgggacatttatataataaaatcccatataggggcatatatgtatacttcaaaaaagtttatatatgtgtgtgtatacatatatatatatatatatatatatatayacatttataaatatagatatagttaaagctataaatatatatacacacatacataaacatatatatagttttagatatgggtataattgtagatatatctatttgtagagagaacaaaatcagcaaaatgatggaaaataagagaagtgaatataggaaaaataggaaaaatacagacaaaaagagagagagaagatagatataataaaatacaaattaaatataagtatattgaaatatatggttctcatcaaaatggaataagttcatttttgtttcaaaatggaataggcccatgtcacttatcttttccactgattacaactgaa

SEQ ID NO: 719026 - DNA, 957 bp, Homo sapiens
tgcaaaatcggggtgaaggggaactgtgcaaggagcctccagagttttaatactcgagatctgctctctcccttaacaactagggttttcttggtttgagatgtaggcctttagctgagcctcagcctcagtgggacctggagaggacaaggccaccatggttctgagatctgtgtggagactgtgggcagctccataggctgggtggagaaatggacctacagctaaaagcaaaacaggagatggacagccggaagctattggctctagggcagcgattcacagtccttgctgtgtcccagagtcatgtgggaaatgattttaaaataaatattccttggtatctactaaagctgaaaatatgtatatccagtgacccagtaattttacttcattgtatataccctataggaatatacatattaaccaaaaatcatgtactaaaatgtttataaaagcactatttgtgttgccccaaagtgggaacaaaaatgctcaacagcagaattaaaaaataaattttgggacatttatataataaaatcccatataggggcatatatgtatacttcaaaaaagtttatatatgtgtgtgtatacatatatatatatatatatatatatatacayatttataaatatagatatagttaaagctataaatatatatacacacatacataaacatatatatagttttagatatgggtataattgtagatatatctatttgtagagagaacaaaatcagcaaaatgatggaaaataagagaagtgaatataggaaaaataggaaaaatacagacaaaaagagagagagaagatagatataataaaatacaaattaaatataagtatattgaaatatatggttctcatcaaaatggaataagttcatttttgtttcaaaatggaataggcccatgtcacttatcttttccactgattacaactgaa

SEQ ID NO: 719027 - DNA, 957 bp, Homo sapiens
tgcaaaatcggggtgaaggggaactgtgcaaggagcctccagagttttaatactcgagatctgctctctcccttaacaactagggttttcttggtttgagatgtaggcctttagctgagcctcagcctcagtgggacctggagaggacaaggccaccatggttctgagatctgtgtggagactgtgggcagctccataggctgggtggagaaatggacctacagctaaaagcaaaacaggagatggacagccggaagctattggctctagggcagcgattcacagtccttgctgtgtcccagagtcatgtgggaaatgattttaaaataaatattccttggtatctactaaagctgaaaatatgtatatccagtgacccagtaattttacttcattgtatataccctataggaatatacatattaaccaaaaatcatgtactaaaatgtttataaaagcactatttgtgttgccccaaagtgggaacaaaaatgctcaacagcagaattaaaaaataaattttgggacatttatataataaaatcccatataggggcatatatgtatacttcaaaaaagtttatatatgtgtgtgtatacatatatatatatatatatatatatatacacatwtataaatatagatatagttaaagctataaatatatatacacacatacataaacatatatatagttttagatatgggtataattgtagatatatctatttgtagagagaacaaaatcagcaaaatgatggaaaataagagaagtgaatataggaaaaataggaaaaatacagacaaaaagagagagagaagatagatataataaaatacaaattaaatataagtatattgaaatatatggttctcatcaaaatggaataagttcatttttgtttcaaaatggaataggcccatgtcacttatcttttccactgattacaactgaa

SEQ ID NO: 719028 - DNA, 627 bp, Homo sapiens
taccccatatctggtcatttggcttgcattgagtattagccatcaaggaattaatttcaagaacattacttcagagcgtcaaggaaagaacacaaggaacacatatgcaaacatatgcatgccattctttcctatgtatttaataggtattagtatctattgttttggatttatagtatatgtggtgtacatacaaaaatatgaagacatattctcataagcattctattgactctagacataataagtggaggcgaataattaacaggagaaaaaccttaaagtagttcatagaartgtattttatatacttgtcaagattagtctcctttatacattttccacaattgtttccataaagaaatgttcttagtttttaagaaatgatccctcttcgtaaatgtcagctttattgaaatcaaaacaattttattaaaccataaacaaactcagtgttctcttaggtttttaattatttctttctttatgaaaataaaaagagtattaacacaaagaaacaaaatatgaggaaacagagtcgcagttgtaggggtgaattatttaatttaaatgcaatcaaccattagaaatacagttaacaatggacaagagatactcagtttttca

SEQ ID NO: 719029 - DNA, 614 bp, Homo sapiens
tactgagtcttttcttaacctcaagagaaatgaacagaattcaataagattacctatttttaaaatgccacatactccaatagatactactggggctacaaaaaattagaactatgtagttttatcctccccaaatctttcatattgataagggcaaaaaataggatgacacaattggtttacaatgtataaaatgataaagtgctggacagaaggtacaaattacaatacaagttcaaaagagaaagattatattagttaatctagaaaatgtacaaaggaggtgatattggcagaatacctttaaagatggggtaaaacttttgccaggggagaaaggcattctagataaaagggagagaggagagcagtgagtgttgatttgaaaataagaaagggtaattcaaytgtgtaagaatgagaatgtacagagatgtgtggcctacttttctcagagacaggggtcaagtaagggagaaatctaaatcttatataaatgtttgaaatgatatgagaaggaaatgtgaggaaagcttggatagctttccatccagaactcaagggttggggatcctggttagcaggagagcaaagaccaggacctgcaggagtga

SEQ ID NO: 719030 - DNA, 614 bp, Homo sapiens
tactgagtcttttcttaacctcaagagaaatgaacagaattcaataagattacctatttttaaaatgccacatactccaatagatactactggggctacaaaaaattagaactatgtagttttatcctccccaaatctttcatattgataagggcaaaaaataggatgacacaattggtttacaatgtataaaatgataaagtgctggacagaaggtacaaattacaatacaagttcaaaagagaaagattatattagttaatctagaaaatgtacaaaggaggtgatattggcagaatacctttaaagatggggtaaaacttttgccaggggagaaaggcattctagataaaagggagagaggagagcagtgagtgttgatttgaaaataagaaagggtaattcaactgtgtaagaatgagaatgtacagagatgtgtggcctacttttctcagagacagggrtcaagtaagggagaaatctaaatcttatataaatgtttgaaatgatatgagaaggaaatgtgaggaaagcttggatagctttccatccagaactcaagggttggggatcctggttagcaggagagcaaagaccaggacctgcaggagtga

SEQ ID NO: 719031 - DNA, 584 bp, Homo sapiens
tcagttcccattttaaccattttcgggacgtttttttctaaaacacttcttgaatgtttcccactcatcttcttgtgggactgaccataggctccaggccatgggatgccttcaggctcctccctcccacccaaacacccagcggcctcccttcagaggtgctccctgattggctgttccctcttctggtgcccctgcccacatcccacttccagtcagccctgatgagmcaaagcagccagccaggcccaggcaaggcgctctgtgccacctcgcccttccagggcagttaggcttcgcagagcatgcttccggtcctctctcccctgctctccaccccagctccctgtcatgcattctggatccccagggcctaactaagcggcaggtaagaatggggccgggcctgtggatctgcctcctaatttatggaaaatgctggggacgaggagcacagcaaaacccagtacagggatgtaaactgcaaacaaagaactgtgtttcttcaacttaaaccccaagggaaaaaaagacattgcagggaccagagagattaattaaaagagatgtcagagacacataaa

SEQ ID NO: 719032 - DNA, 584 bp, Homo sapiens
tcagttcccattttaaccattttcgggacgtttttttctaaaacacttcttgaatgtttcccactcatcttcttgtgggactgaccataggctccaggccatgggatgccttcaggctcctccctcccacccaaacacccagcggcctcccttcagaggtgctccctgattggctgttccctcttctggtgcccctgcccacatcccacttccagtcagccctgatgagacaaagcagccagccaggcccaggcaaggcgctctgtgccacctcgcccttccagggcagttaggcttcgcagagcaygcttccggtcctctctcccctgctctccaccccagctccctgtcatgcattctggatccccagggcctaactaagcggcaggtaagaatggggccgggcctgtggatctgcctcctaatttatggaaaatgctggggacgaggagcacagcaaaacccagtacagggatgtaaactgcaaacaaagaactgtgtttcttcaacttaaaccccaagggaaaaaaagacattgcagggaccagagagattaattaaaagagatgtcagagacacataaa

SEQ ID NO: 719033 - DNA, 549 bp, Homo sapiens
aagaccagttcttattcttttaacttcctccctggcttatcattttggtttataatttgaacatatttgccaatggcctctaggtaccactgaaagaaatacctaagatgaacaaagaccattttttcttcttaagatccatgtctccacgtcacaatggggcaagatttaaagaatgccaaagagtgcatgagtgcattgtgggtctttwtgcaaaactaggactaaatgttcctgtgcagtatgactgtagctcattctgccacttccaaggctggctgaaactgttggaactaatctctctgtccttttaacctccaactcaagctggggccaagatgccacctggttggccacctcaggggccagggaagtggctgcgaagagtaacagtgcccctactggcgagtgcttatgacagtgaatttgacagcaggaaacctcccccagggggctcctgaagcagctggaacgtgacctttggtgtcttgccctgtggcatatgcaaactgatgtttaatggcaaatataaatgtagcacttactgct

SEQ ID NO: 719034 - DNA, 601 bp, Homo sapiens
acatttattagtcaagtgcttaccttgtcattactaagaaatacgtggtggctcatgcctggaatcccagcactttgggaggctgaggcaggaggatcgctagagtccgggagttggagaccagtctgggcaacagagtgagaccttgtctttacaaaaaatagacaaaattagctgggcatgggtgacatgagcctgtagttccagctcctcaggaggctgaggtgggaggattgtttgagcccgagaggttgaggctgcagtgggctgagatcatgccgctgcatcccgacctgggtaacagagcaagaccctgtctcaaaaaaaaaagaaaagaaaaaagaaaaaaaaaaagaaaagaaaaagggggaatatgcatttgttggtgctttaaactttgtaaaacatttttctttttctttttaggagacctaagttgcctaggctcgtctcaaactcctggcctcaagtgatccttctatctcagcctctcaaaattctgggattacaggtatgagccactgtgcccattctgcaaagtttctattgtcaatttatttgatcttcccargccccctactgtgtaaagcattttatggcc

SEQ ID NO: 719035 - DNA, 601 bp, Homo sapiens
acatttattagtcaagtgcttaccttgtcattactaagaaatacgtggtggctcatgcctggaatcccagcactttgggaggctgaggcaggaggatcgctagagtccgggagttggagaccagtctgggcaacagagtgagaccttgtctttacaaaaaatagacaaaattagctgggcatgggtgacatgagcctgtagttccagctcctcaggaggctgaggtgggaggattgtttgagcccgagaggttgaggctgcagtgggctgagatcatgccgctgcatcccgacctgggtaacagagcaagaccctgtctcaaaaaaaaaagaaaagaaaaaagaaaaaaaaaaagaaaagaaaaagggggaatatgcatttgttggtgctttaaactttgtaaaacatttttctttttctttttaggagacctaagttgcctaggctcgtctcaaactcctggcctcaagtgatccttctatctcagcctctcaaaattctgggattacaggtatgagccactgtgcccattctgcaaagtttctattgtcaatttatttgatcttcccaggccccctactstgtaaagcattttatggcc

SEQ ID NO: 719036 - DNA, 1128 bp, Homo sapiens
taaaaattttatacctggggctttactcacataggtctccttagaatctaatcacacaaatagtcctttatgtatacatattgtaatatgtgctggttgtatagacatggaaaatgggttttggtgcttaagttatttctgccctttatctctcctttatttccagcaatgaggatgtagctgaatgcgtatgggactggagtgaaggcagttgcatactagctgtgaacagctgggcaagccacttagcttctccaagtctctgcttctcacctgcaaaatggggagaatcacaccatcccaaattgcagcaatggcttgggtaaagcactggacttagggcagatgctcaatacatattagttgtccctctacatttcaacatgttttggtgggattaggaagtattcactcgtggccattcccagcctccacccaccactcccccaccccctgccgctaaagtggactcaagcctggctgtccaggcgtcttctctcaagccaatttggggctttgcacaggagatttcagaaaagggtggaaagaacagtaagaagctgagggcagaggcagctgttggaggtgctggagggtttgggaggagatttatgggccatgtgggagcagtgggctcagtgtgcggccagtgcatgggggaggaaactgaggcaagggtccacaggaaagagcagaggccgatgccagaagcagagggctctgtgatctgcaggycctccccattgtcctccttttgctggtctgctgtggtctcaaagcaatatacttcccagactgcttcacagagtgtttctgaaaattaagagtcatttcttcattcattcattgagtagcagttgagcaaccactctgtaccagacgcataaaataataaatttgatcatctctatcaacaagaataacgaggaaacaggtttgagagtaatgaggagggagcgagagcaagagaaagtgagttctgatacatttcttatgcttttgtcaataattaaatctgttcttaaggtggggcacggtggtagctcacgcctgtaatcccagcgctttgggaggccgagatgggaagattgcttgaaatcaggagttccagaccagtctgggcaacat

SEQ ID NO: 719037 - DNA, 1128 bp, Homo sapiens
taaaaattttatacctggggctttactcacataggtctccttagaatctaatcacacaaatagtcctttatgtatacatattgtaatatgtgctggttgtatagacatggaaaatgggttttggtgcttaagttatttctgccctttatctctcctttatttccagcaatgaggatgtagctgaatgcgtatgggactggagtgaaggcagttgcatactagctgtgaacagctgggcaagccacttagcttctccaagtctctgcttctcacctgcaaaatggggagaatcacaccatcccaaattgcagcaatggcttgggtaaagcactggacttagggcagatgctcaatacatattagttgtccctctacatttcaacatgttttggtgggattaggaagtattcactcgtggccattcccagcctccacccaccactcccccaccccctgccgctaaagtggactcaagcctggctgtccaggcgtcttctctcaagccaatttggggctttgcacaggagatttcagaaaagggtggaaagaacagtaagaagctgagggcagaggcagctgttggaggtgctggagggtttgggaggagatttatgggccatgtgggagcagtgggctcagtgtgcggccagtgcatgggggaggaaactgaggcaagggtccacaggaaagagcagaggccgatgccagaagcagagggctctgtgatctgcaggtcctccccattgtcctccttttgctggtctgctgtggtctcaaagcaatatacttcccagactgcttcacagmgtgtttctgaaaattaagagtcatttcttcattcattcattgagtagcagttgagcaaccactctgtaccagacgcataaaataataaatttgatcatctctatcaacaagaataacgaggaaacaggtttgagagtaatgaggagggagcgagagcaagagaaagtgagttctgatacatttcttatgcttttgtcaataattaaatctgttcttaaggtggggcacggtggtagctcacgcctgtaatcccagcgctttgggaggccgagatgggaagattgcttgaaatcaggagttccagaccagtctgggcaacat

SEQ ID NO: 719038 - DNA, 1101 bp, Homo sapiens
tggacatctgcagagtttgacactgttttcctcsctctcttttgtcacacactctcttggcgtctgggctacactttcctggttctgcctctcagattcttcctcctctctgccagtaacttatcattccctgaccaccaggtaggattgggcacccttcctttggtttttcccctgccccccgccaaccctgccactacatttactacgttatatcaaaatagtgtgtttatgagcgatctcccaaaataagttgtaagcgccaaaagaaggcttatgtcatgtttatctgcatcccaaccatctaccgtgaagcctggcacactgagggtgtattttttctttttaaacctaacttcagggagagggccagctaggccttgtagactgaccatataggatgagggttagttgggaggtctcaacctgatggtcacatgggcacctagggccgtgttcacctccagactgcttggcctgctgcagcatgttacctctcagctccacaagctgtttcggggagcgcttcctgacatgctggttgggctctcatttctagtgctggaagtagtggacttttagtaccccaaatcaggcaagcagggacaagcaaggactcctggacaacaggagtttctggacctccaaagctgaggacgctgtatggtggtaatcccactaatgttctgagacccctttttgatgttagcagtctgattgcttgtgatagaggtaattaaggctacgaataaaaggcagaagatgaaatatttgttgattccttttgcctttttgattcactactctcatttttctctcctatcatttttttttgtcttaaaaaatgtgctgtctatgtttatctggcttgcctgtgtttatctaattttagattgcaagctgtgggacagaataatgtctttatatgtgcagcatctcactgtgggtgcctaagaatatctaatgacattaaagtcattcaattaacctgtttttatttaatgagtaaactgtaaagttctccagagagcttattcacttgaacttcactagcaatttataagtaattttcaggttatatccaggatacattcagaatat

SEQ ID NO: 719039 - DNA, 1101 bp, Homo sapiens
tggacatctgcagagtttgacactgttttcctccctctcttttgtcacacactctcttggcgtctgggctacactttcctggttctgcctctcagattcttcctcctctcygccagtaacttatcattccctgaccaccaggtaggattgggcacccttcctttggtttttcccctgccccccgccaaccctgccactacatttactacgttatatcaaaatagtgtgtttatgagcgatctcccaaaataagttgtaagcgccaaaagaaggcttatgtcatgtttatctgcatcccaaccatctaccgtgaagcctggcacactgagggtgtattttttctttttaaacctaacttcagggagagggccagctaggccttgtagactgaccatataggatgagggttagttgggaggtctcaacctgatggtcacatgggcacctagggccgtgttcacctccagactgcttggcctgctgcagcatgttacctctcagctccacaagctgtttcggggagcgcttcctgacatgctggttgggctctcatttctagtgctggaagtagtggacttttagtaccccaaatcaggcaagcagggacaagcaaggactcctggacaacaggagtttctggacctccaaagctgaggacgctgtatggtggtaatcccactaatgttctgagacccctttttgatgttagcagtctgattgcttgtgatagaggtaattaaggctacgaataaaaggcagaagatgaaatatttgttgattccttttgcctttttgattcactactctcatttttctctcctatcatttttttttgtcttaaaaaatgtgctgtctatgtttatctggcttgcctgtgtttatctaattttagattgcaagctgtgggacagaataatgtctttatatgtgcagcatctcactgtgggtgcctaagaatatctaatgacattaaagtcattcaattaacctgtttttatttaatgagtaaactgtaaagttctccagagagcttattcacttgaacttcactagcaatttataagtaattttcaggttatatccaggatacattcagaatat

SEQ ID NO: 719040 - DNA, 1101 bp, Homo sapiens
tggacatctgcagagtttgacactgttttcctccctctcttttgtcacacactctcttggcgtctgggctacactttcctggttctgcctctcagattcttcctcctctctgccagtaacttaycattccctgaccaccaggtaggattgggcacccttcctttggtttttcccctgccccccgccaaccctgccactacatttactacgttatatcaaaatagtgtgtttatgagcgatctcccaaaataagttgtaagcgccaaaagaaggcttatgtcatgtttatctgcatcccaaccatctaccgtgaagcctggcacactgagggtgtattttttctttttaaacctaacttcagggagagggccagctaggccttgtagactgaccatataggatgagggttagttgggaggtctcaacctgatggtcacatgggcacctagggccgtgttcacctccagactgcttggcctgctgcagcatgttacctctcagctccacaagctgtttcggggagcgcttcctgacatgctggttgggctctcatttctagtgctggaagtagtggacttttagtaccccaaatcaggcaagcagggacaagcaaggactcctggacaacaggagtttctggacctccaaagctgaggacgctgtatggtggtaatcccactaatgttctgagacccctttttgatgttagcagtctgattgcttgtgatagaggtaattaaggctacgaataaaaggcagaagatgaaatatttgttgattccttttgcctttttgattcactactctcatttttctctcctatcatttttttttgtcttaaaaaatgtgctgtctatgtttatctggcttgcctgtgtttatctaattttagattgcaagctgtgggacagaataatgtctttatatgtgcagcatctcactgtgggtgcctaagaatatctaatgacattaaagtcattcaattaacctgtttttatttaatgagtaaactgtaaagttctccagagagcttattcacttgaacttcactagcaatttataagtaattttcaggttatatccaggatacattcagaatat

SEQ ID NO: 719041 - DNA, 1101 bp, Homo sapiens
tggacatctgcagagtttgacactgttttcctccctctcttttgtcacacactctcttggcgtctgggctacactttcctggttctgcctctcagattcttcctcctctctgccagtaacttatcattccctgaccaccaggtaggattgggcacccttcctttggtttttcccctgccccccgccaaccctgccactacatttactacgttatatcaaaatagtgtgtttatgagcgatctcccaaaataagttgtaagcgccaaaagaaggcttatgtcatgtttatctgcatcccaaccatctaccgtgaagcctggcacactgagggtgtattttttctttttaaacctaacttcagggagagggccagctaggccttgtagactgaccatataggatgagggttagttgggaggtctcaacctgatggtcacatgggcacctagggccgtgttcacctccagactgcttggcctgctgcagcatgttayctctcagctccacaagctgtttcggggagcgcttcctgacatgctggttgggctctcatttctagtgctggaagtagtggacttttagtaccccaaatcaggcaagcagggacaagcaaggactcctggacaacaggagtttctggacctccaaagctgaggacgctgtatggtggtaatcccactaatgttctgagacccctttttgatgttagcagtctgattgcttgtgatagaggtaattaaggctacgaataaaaggcagaagatgaaatatttgttgattccttttgcctttttgattcactactctcatttttctctcctatcatttttttttgtcttaaaaaatgtgctgtctatgtttatctggcttgcctgtgtttatctaattttagattgcaagctgtgggacagaataatgtctttatatgtgcagcatctcactgtgggtgcctaagaatatctaatgacattaaagtcattcaattaacctgtttttatttaatgagtaaactgtaaagttctccagagagcttattcacttgaacttcactagcaatttataagtaattttcaggttatatccaggatacattcagaatat

SEQ ID NO: 719042 - DNA, 475 bp, Homo sapiens
aataggccaaaagaaaaacagtctgggcacggtggctcacacctgtaatcccagcatttgggaggccgaggctggtggatcacctgaggtcaggagttccagaccagcctagccagcatgatgaaacctcgtctctactaaaaatacaaaaattagctaggcatggtggcaggtgactgtaatcccagctactcgggaggctgaggcgggagaattgcttgaacccgggaggaggggttgtggtgagcctagattgcgccactgtactccagcctgggtgacagrgtgggactccatctcaaaagaaaaaaaaaaaaagaaaaagaaaatgaaacgacaaaaaaaaagagggggcccaagctctttgtctgactttcagactgggttgaattcaaaagcagctgtgtgactaagagcaattacaaaacctctctgagcctctgttgcccatctacaaaatgcaaagctcccatca

SEQ ID NO: 719043 - DNA, 960 bp, Homo sapiens
agcagaagtcctggacttactgtgaggttgatgaaaagggaaggggaagcgagagcaaagccatcttcatttcccaaaacactccaggtcttattcagtcccatgcgggcctttagtagaaagagcaatgatagtatatcataaattataatgaattcactttctacatcatttaggttgaaaccttttctgttacttataaccacatagtaaaccataagaaattgtcacccatattttctcctagtatttttaaatttaaattttatttaattttaaatttaaatatctgagatgtggatttttttggagggaggtttaatgtaggaattttattttttttccaaattatcaatcaattgtcccagcaccatctgttggtatactatcatatcattttgctataaatagtattttgatattaatttccaacatttgtagctcttatttttcttattttattaaacttcctagtacttacacatcatggtgtggtattaagcatttctatcttcactgagaatgtctcattcattgttttctggtattagrttctgaatttagacgttaagcaatcatgttatatactatgttatatatatttatgttaaatatttttctcttttaatgtattgttttttacaattaggaataaatgttgaattttgtcaaaagtattttttttagattagaagttcagaaatgttcttctttatttctttgacaatttattctaacctgttcctaacttctcctcaaggcagaacaatcctgctgtgcaattattgttttgaaatatctagtgggtcaggctaaggctacacttcacgtgagaccacgatattgcatgataagtatgaaacattctctcatttgactttctggcaagttcgtgaagagagtcacacttgtcaaaatgctccagggatttaatcatctttccaaggcctctcttaatcc

SEQ ID NO: 719044 - DNA, 740 bp, Homo sapiens
tgccttacatgtgccacacatcactggaaaagcccccaccagccgcccactcaccacrgtgctgtctggctcccaccactaagtgcttcttactgctgcagttgggctcactgagccagtgtggagattggcatggaatccttgagatgtgctcatggcatcaatgccactgatggggagaaagaagtgagctaggcccagagaacaggtgggctatggtgcagtcaaatggagcctcagctgatctcagacgaagtcctgaaaatggaagggcttcagagttggctcaattgagggaccatgacttggaacccactcatgaccagtcactggacacaggctgcccccaaagaaggggcacaatcttgggtaagacctgggaccaagggtaacgctcagagagggagtcagctggaagccaccagcagccaccactcctggcagtgagagaaatgagtgtcccatcctgaaggagggtctggacagtgcaccacagcacccactccacccggcctccctggtccttcgtggctttctctctgtacttgccgagcaccccagggtcacacttgcgtgtgtgttggcgggggttgcaggggtgaagatcttaactcgaagtgcccagttcagtggcattaagtacatttacacattcacattgctgtgtaaccgccaccttcatccattcccagaagtttgttcatctccccagactgaaacttcatgaccattaaacacga

SEQ ID NO: 719045 - DNA, 646 bp, Homo sapiens
tctagctccccatgaagtgaatctcaaccaacgcagaaacagaacaccaaaaaacaaaaaacgggagcctggcacataagctccccatcctttctctcttctagggagagtagctccttcttacaacctttctggagaagttcccagatagaataaacacaactgctcctcaacttactactggctcattgtgaagtgagagcccctatagtcgtgtgttactgtatcgcatcatgtcttttyccttgctttccttcccttcctctgttattgcccgctgttacatttccactcctatccagagtgttaccaccttgatacttgtcaagactttattttctggaggctaagatgtgatgctactttttggtaatgatgcaacctatttttggcaatgacacaaatatttttagaaacctctggggatttacaaaccattgaatgagagacttggctttccctctaccctctgagagtgtgataactgtgtctatgaaattaactgacagcaggcagattaataggaaaaaagatagtatttattacatgcatgagggcatcatatgaaagaaaagtgaatactccccaacccagtgagatatagaagcctatataccctcttcatctaggagagaagagggggcat

SEQ ID NO: 719046 - DNA, 1612 bp, Homo sapiens
ccattcaaagcagtagttgtgtgtttcaaatatcttctaatagtcagtttcacacttagctttatcaaattcctaattatgatactcattacatcactctgtgtccagtcagtgtgtttatgccacagagcaattaaagcaaatcaggtgaaccaaattcaatcacctttgtagataataacctacgttgcttaaacttatggccgctcatacaattactgatggattgcctttttcttttatattgccagtattttaaatgtcctagtgaagttggggtagctgttgaacttcaactttatcacaacctcttttttaaaatgtgtaaacgaaaaaaccctccatgaaatgaccaaatacagttttcatgctgggacaaattagatgaataataatcataaattcataatgattatttatgattttatgtttttatagtgagatatgttttgttgaaatgtgttatataagtgatacttaagtttcctattaaaatagaaatgctaaaatggcattgttctctttagctgtgagtctagcttttgacctctgcttaaacggaactgttgttccatcccaaatctgcaactctgaggcctatgctcccttcactgctgtctaatggatacctatcaatttggaaggaggtttcaggcagctattcccggtaatctaatctcagctctgtccttttcaatattttcatcagtggcttggatgaagacatagataacattcttatcaaatcaatgccacaaagcagggagaaatagcaaatatagcagacaagagtatcaggagccaaaaagttttcaacaagttggactggtaggctgaatactgaaagatgtaatgtaaatgcaaggtgctacatgtgggttcaaaagaaacatgaaacaaaaaacccatctaacttagactgggctccctggaaatagactaagatagagagttgtgtgcataaggtttgttgaggagtgttcccatgagatacatgtgtaaggttgtaagataggcaagattgcacagacgaagaagtgcagtgaagcctgcagtgcgttgcggcctcatcagattttcaggggagttctggaaattgcatggccctttagagacacgctgaattgaagcaagggatctggacctttgaacccaatactagagagttaatggtcctgggtcaccccatgggaragagcagactggagtaagattgttacctacagctgaaggcaatttccagggagggaggcagctgtgagctgttagtagtcaatattccaaccagctagggcatgaggtcttggcagagcaacagtgtacccaagaccgcagtgttacccaaagtatggtcctctgactggcagcattggtatcacctatgagctcactagaaatttaaatttgtaggtcctaccccatccaactaaatcagaatctctggggatgggacttggggaacttttaacaagctttcaggcctccaagttatttctatgcatattaaaatttgagaaccactgcctacaccaaccaaaaacattccaaatatggagataacatagagtttttagcaacaataatctccttctgtttcacttctctctttaca

SEQ ID NO: 719047 - DNA, 1407 bp, Homo sapiens
ggggaaagatctgggttaacaaatgttttattcatccaccttgaaaattaaacataataaacaaaactattaaataaataaaccaattaaagaaaatagtttttcttccttttttgtgataaagatgattatgagtaaatatattaaagaattttatactcagacaaagtgagctaataagacaaatacaaacagagatgagcccagaaagagatactctacatgtttataggctagcatttttatcttatgacctacagggtcattgtaactaaagtcttgaatttctgttatattttggtacctgtgggcataaataggaatattactccctgatggcatcatgcattttagataaaactaagccaagggttaaacacgtgccatggactgttcctaaaaaatgctctcagctctcaagttatagaaaattgtagggattattattttgtacctactacttctttctttaccaaaatttacttatacatgatttgaaaattgcttgccacctgtctttattctgttgtacttgtcttaagtaaaacatttataaagtaagtaggaaggattaatagattgtgacctttctacatgaaaaggggaaagcygagcttgttctacttttgtcaggaaagagtttgaatagttacctgttactgtaaaacaatcaccccaaacttagtgtcctaaagtagcaataatcatttattatcactcataggttctgtaggtcaggattcatgcattgcttggttgaggggttctgtctcacgatcactcatgatgttgcactcagatgtcaattaggctgcagtcatatgatggcttgactggggctgaaggattcactttcacagtgagttacttgtatagcttgtgagttggtgctgtctagttggtttccctctaaacgagttcctccatgggactacttgagtgttcttatgatgtggtggctggcttaccccaggacaagcaacctatgagttttgccctgagttttctgaaacatgatcccatgttgctttgaatatccccattagacactcccacaaatgtcaatcatactctttgccctaaaagttgcagactacttgtacatgtcctttatcctacatgtgtacaggaaacacgtgcagaataacatgtgtttttgtttcttgaaagaaacaagaacccaccaaaactttatagctccgggacatgatgataattatctcaggtccactcagcctggctccacatggaaaatatgggtattgtaaagaaagcttttgaattttggaggcctaacaaaaagacctaggaagctaatagttggttatgagataattataacaatggtgatgaaagcaattgcgattattacttttatgttagtgagataaatacataagaatgtcc

SEQ ID NO: 719048 - DNA, 1407 bp, Homo sapiens
ggggaaagatctgggttaacaaatgttttattcatccaccttgaaaattaaacataataaacaaaactattaaataaataaaccaattaaagaaaatagtttttcttccttttttgtgataaagatgattatgagtaaatatattaaagaattttatactcagacaaagtgagctaataagacaaatacaaacagagatgagcccagaaagagatactctacatgtttataggctagcatttttatcttatgacctacagggtcattgtaactaaagtcttgaatttctgttatattttggtacctgtgggcataaataggaatattactccctgatggcatcatgcattttagataaaactaagccaagggttaaacacgtgccatggactgttcctaaaaaatgctctcagctctcaagttatagaaaattgtagggattattattttgtacctactacttctttctttaccaaaatttacttatacatgatttgaaaattgcttgccacctgtctttattctgttgtacttgtcttaagtaaaacatttataaagtaagtaggaaggattaatagattgtgacctttctacatgaaaaggggaaagccgagcttgttctacttttgtcaggaaagagtttgaatagttacctgttactgtaaaacaatcaccccaaacttagtgtcctaaagtagcaataatcatttattatcactcataggttctgtaggtcaggattcatgcattgcttggttgaggggttctgtctcacgatcactcatgatgttgcactcagatgtcaattaggctgcagtcatatgatggcttgactggggctgaaggattcactttcacagtgagttacttgtatagcttgtgagttggtgctgtctagttggtttccctctaaacgagttcctccatgggactacttgartgttcttatgatgtggtggctggcttaccccaggacaagcaacctatgagttttgccctgagttttctgaaacatgatcccatgttgctttgaatatccccattagacactcccacaaatgtcaatcatactctttgccctaaaagttgcagactacttgtacatgtcctttatcctacatgtgtacaggaaacacgtgcagaataacatgtgtttttgtttcttgaaagaaacaagaacccaccaaaactttatagctccgggacatgatgataattatctcaggtccactcagcctggctccacatggaaaatatgggtattgtaaagaaagcttttgaattttggaggcctaacaaaaagacctaggaagctaatagttggttatgagataattataacaatggtgatgaaagcaattgcgattattacttttatgttagtgagataaatacataagaatgtcc

SEQ ID NO: 719049 - DNA, 969 bp, Homo sapiens
ctttatgggacaaataaaatctaactttattcagattttaaagtatctcataaaagagtaatactttagatttgtgctgtgctttatacgaattggatgaggaactcttatacatatataagtggattttattttcacaacagtccctatggtagatattgtccttattaagtaaatgagagaaccaactatcaaagatattaatattttgcataagatcacacagatagcggaaccaggatttaatccaactcctctgattctaaaaataggtgttagatgggtattctttccccaaacctatgctgaaaggaggctacatttggagtcagttattgaaagtttaaatatatgtgtatatatatatatatatgtgtgtgtgtgtgtgtgtgtgtgtgtgtgtattcttatatactcatgcatgtagatagttataaagtacatgcttatatgtcaattttatatatacgactgatatataaactatcaatttgtgatagtttatttcaattaagttcaaacatattgggtatttattgactcatgggacttaaaatttctcagaggcrttaatttctatgcctttaagcaaaataatgtttagcccgttttagaaagataaaaggctaacatatgttttgtttttgtttgttttgttttgttttgttttgttttgttgagatggagttttgctcttgttgcccaggctggagtgcaatggtgcgatcttggctcacagcaacctccgcctcctgggttcaagcgattctcctgcctcagccatctgagtagctgggattacagacacgtgccaccatgcccggctaattttgtatttttagtagagacagagtttctccatgttggtcaggctggtctcgagctcccaacctcaggtgatccacccgcctcggcctcccaaagtgctgggattacaggcgtgagccacggctcctggccgctaacaca

SEQ ID NO: 719050 - DNA, 3001 bp, Homo sapiens
ccattcatatgagaaaagtcagtgattgttatcctcaacctcacagaatccttaacaccttgcttgttgaagcatatagatcatgatcctgtttgaacagtattgttcaaaatttctgttaataattcctcacaaccatgtgactagtgactaaaatgaccttggattctacaaatgaaaaattatcccaaccacacgcgggggtgggaggtaggcaggaggctgccggggccctggcactgtgacattatacccatagccttcctaggcagcttcacttcaaagtctattttaacttcccttgggctatttcttgggtgtgcattcatagaaaacacttcctgtttatttatttttatttatttattttttccaatccaacctcatcaaaaagtagtgctttaggagatgacctttgtgggtttgacatctagatgagtttaaaacaaattaaatcactctctgtacccacaagccccattttatctctcaacttggaggcctgggaggccaagaattcgaagatggctcagagtaatggggattctgcctactctacctggaaggaggctcaaggcgggtccctttggacagtgtgtgagcagcctctccctccagggggttctgaggggagaaatgtgatgaacgccgttgcgtcgttccctgagttgggtctcatacacgttctaaaaacaacacgggaagaaaaatgctctgagccctgggaccagaagcccagtttccaagccccatttcttcccaacatagagcacaatacttaaacctgatttgcttccagtgcaatcttctttcaggaaacccaccaaggaatattagtcttatgctatttaatcaccaaatctgaacaacgaagagttctcttcattaaaggcacgcagaaattctgaccagctgtttcccgccacttggctgaggacgaggtggagaaagacaagccgcccaatccccgggaactctctgcggcgctcgacccccatcacgtgaccgttctttcatcgttctgttcctaaaccggaatcggagtccaagagagggactggacttaggcgtttaacagttgacatgctttaatgcatagtacacacagtgcagtcctggagcttgtagaagtcacttcgagctaggtctttgttttgtcaaccaccttcaccccttaaattcactgaacgtaatgtagcagcatggctggggaaagaaactgtagctagtacgccgtgttcatttgcaactcatggctccttcgcatgcctagtgtctaacacaggctgcagaaacttttcctgccgctttgttttaggagatgaagaattcttttcccgaacaactgctgctccagggcactgtgctcacttttctaggggaagtgactctgaaacccaaaattccctggataccaccagagaatggctgaacaggaagttttcttctttatttaaattagtaaattcgactgttcatgcgagccaaaggcagtgtcataggtgtctgtgtggacccgaaggtgaccttgtcccatgagagggatgctgtccaccagggaagggaccatcccagattgatgggactctgggtttcgctatgagcacccacgtcattttccacaggtaaattcctttggatgtttcttattcttaggcaggttaatggtcactttgtaccacggcaagaagtaactgcgtgagtgcatgtggccggggctttgtgtttctgttttaatcggttaggaatcttctcctgtataatgttctaacgacatgttagtccacgcagtttgctctgtggtggtaaacctggctattcctctcaatcaggaggctccatggccaataaagtgagggctcctcgatgagccaggagatgaggctcagcagtgtgctgagcagggctgcggcatcagacagtccttggacccagagttcaagaacaggctggaaacctcgaactcgtctttttatgtttatatattttccaaattaagtatgataattttctacgactgaaaaatccaataaatgtcaacagtgatcactggatggggttcccggttctctcagcacctgctgggtgaggagctgggaatgcatctgggccagggaggacagtgggggctctggcctgatgtccctgtcaggaagtagggaagtttctgagggggtgacagtcccatgccagcctcccctcctcaggcagcagcacctgcctgggccacacagcccctttagtacctaattcctggccacatagccccttagtaccctgccctagtcacacagctcccttcttagtacccacccctgccttgctgtcatagcccctatagtaccctgtcctcatcacacggtcacttagaaccttgccccaggctcatagcccctttagtaccccacgctggtcacacagccccttagtatcccaccctgttcacatggccccttaaaaccccatcctgttcacacggccctttagcaccccaacctggccacacggcccctctagcaccccaacctggtcacacggcccctttagcaccctaacctggtcacacggttccttagcagcctgctcctggctcctccagggtttctcccattaacatgaaggtgtgggaccttttctgcagtagtctgtcctcccaactctgcatatgcctttcttccaagctccaggttcccttccacccagtgtcaccracatggatgttttggagagagttgggctgagggagaagggaggagggaggaagaagcatataccgggctgtggccacggccggtctggcactggcggtggctcatttctgcaccatagctacagctgttgggagatgggatcgtgtaaggatctggtccttctggtgactcggccctgagccaacccttggacgcaggattctggtggagttgatggccgggattggtcctgtgtgtctctctcggagcagggcacagtcccagctgaaccccagggactgactgcactt

SEQ ID NO: 719051 - DNA, 1858 bp, Homo sapiens
aatttataaaaatacacatatactaataactgataaataacacgttattctaaatataaaataatgaaactgataagaaatatacaaagtaaaaatgcaaacatttcccccaaattgctttactgtccttcctcaaatcctatttcttgcctcagagatacccactgttaattcattcagtgtatagccttataaattttcttttatagacttctttcatatgcctctaaacatagaaagttttgttcatatttcatttttatatgaatataaatatatatgaattcatatatgaatatgaatataaatattcatataaaaattttaaattactattactatatgatacctattacttgatgatatttatcactgaactgtctgttgtagaaaacctgtcttttaaattaaatgtatcgtcatttatctactggaaaacattaatttctaaatttgaattattagaatcaatgcttcagtaagtgttcctatacatactaatatttctattaaaatacagcttaggttggacgggtgtggtagttcctagtactttgggaggctaaggtgggcagattgcttgagctccgaagttcaagaccagcctgggcaacatggtgagacaccatctatactaaaaaaaaatacaaatttatatatatatatggcattgctaggtaaagggtatgcattttctttgttttgtgggttttttccaaatatttttagatattcccttattttctctcttcaatttgaactttataagtaatttgtcagttatatgacaaaactgttcacaatatgattggtaacatcaaactaaaggatttattaaaataatatgctaaagagtaattttgaaagacattttagatacatattatttagatagatattatgaaaatcaggtaataaaaaattttaaagtatagtgtttattgctacagaaataaatttatttatctgtacatacccggaaaaatatatacactaaaacagtactagtaattagaagtggttgatagggacacagatgatttttattttcttatatttttaactcatttttttcattttatattgcactataacatgcaatataaacatttattttttatcaaaatattaaaagaaattatgttcacatacatatctctagaagaagaaatgtcattgaaaaactttttaatataagcaaataaattaaagtacagagtctatttgcttttcagaaataagtataaacgttggctgccaacttttatcatccaattttcacggaaataaaattctttccttaatgcctgaagatactattttggatggcagtaaaaaaaaaaaaagatgaagaaggaattcaataatttttttaatttcaatggaaaagactaatattttactacacataaatgtgctggctgatcacactttaaatttattaccrcaaacctccagtgggccttccgagctacctagcaatcttctcatttctccactcagctcactctccctctttagagcttttctttctcatttcactaaatcattgccatcagaagatagctttcatattcttacgattcctccacgtttaccaacttgcctattatttgtccccatgcactgtacctttctgataggatcgataaattgtctagaatgcctcactacagaaattatctcttcttctttacccatttccattgcagaatgttatgcatatataaagcataaacaacctcaaaatagaaataattagttatacttagattttattttaggttttattctaaatacatatattttgagtattcatagtgaatatagaaaacagaactagcacttgtcctctgta

SEQ ID NO: 719052 - DNA, 1858 bp, Homo sapiens
aatttataaaaatacacatatactaataactgataaataacacgttattctaaatataaaataatgaaactgataagaaatatacaaagtaaaaatgcaaacatttcccccaaattgctttactgtccttcctcaaatcctatttcttgcctcagagatacccactgttaattcattcagtgtatagccttataaattttcttttatagacttctttcatatgcctctaaacatagaaagttttgttcatatttcatttttatatgaatataaatatatatgaattcatatatgaatatgaatataaatattcatataaaaattttaaattactattactatatgatacctattacttgatgatatttatcactgaactgtctgttgtagaaaacctgtcttttaaattaaatgtatcgtcatttatctactggaaaacattaatttctaaatttgaattattagaatcaatgcttcagtaagtgttcctatacatactaatatttctattaaaatacagcttaggttggacgggtgtggtagttcctagtactttgggaggctaaggtgggcagattgcttgagctccgaagttcaagaccagcctgggcaacatggtgagacaccatctatactaaaaaaaaatacaaatttatatatatatatggcattgctaggtaaagggtatgcattttctttgttttgtgggttttttccaaatatttttagatattcccttattttctctcttcaatttgaactttataagtaatttgtcagttatatgacaaaactgttcacaatatgattggtaacatcaaactaaaggatttattaaaataatatgctaaagagtaattttgaaagacattttagatacatattatttagatagatattatgaaaatcaggtaataaaaaattttaaagtatagtgtttattgctacagaaataaatttatttatctgtacatacccggaaaaatatatacactaaaacagtactagtaattagaagtggttgatagggacacagatgatttttattttcttatatttttaactcatttttttcattttatattgcactataacatgcaatataaacatttattttttatcaaaatattaaaagaaattatgttcacatacatatctctagaagaagaaatgtcattgaaaaactttttaatataagcaaataaattaaagtacagagtctatttgcttttcagaaataagtataaacgttggctgccaacttttatcatccaattttcacggaaataaaattctttccttaatgcctgaagatactattttggatggcagtaaaaaaaaaaaaagatgaagaaggaattcaataatttttttaatttcaatggaaaagactaatattttactacacataaatgtgctggctgatcacactttaaatttattaccgcaaacctccagtgggccttccgagctacctagcaatcttctcatttctccactcagctcactctccctctttagagcttttctttctcatttcactaaatcattgccatcagaagatagctttcatattcttacgattcctccamgtttaccaacttgcctattatttgtccccatgcactgtacctttctgataggatcgataaattgtctagaatgcctcactacagaaattatctcttcttctttacccatttccattgcagaatgttatgcatatataaagcataaacaacctcaaaatagaaataattagttatacttagattttattttaggttttattctaaatacatatattttgagtattcatagtgaatatagaaaacagaactagcacttgtcctctgta

SEQ ID NO: 719053 - DNA, 1248 bp, Homo sapiens
ttcaatggactctgtagttgtagaaacaaactcacaacttaaatctaccatcccagtttggggccagcattctattatacatcctattactctattacattgtttcatctgaaaggtattatcctgccttaatttccaattcaaactctccattcctaattcaagagtttgctcaagggtcatattctttacaaagaaaactcacattttctctcttttttgagatccgataacactttctarctaattattattattattactaatcaatgcctaaggtaattaatctttggctgcctcgagtgtgagctcctccaggacatgacctatttttttcttcttcttttatccctagtgcttaattccatgtcccatgcattctaggtcttaaagcttttatgcttaataaatatgaaattaatgagctgggattctggaaatctaaatatggagtaaaaatcaactctaattgtgtaggattgaaacaaaactacataaattagtttatcttattctctgtgtacatgttgaaggttacatgtacattttcaaaagtagatactgatttaaaaggtgagatcataaatatagatgtgaaaaatcatctttatatgtaaaaacaataattttattttaggtttaagcttctttggcagttcattttggtcttcagaataaagtgccaacgtgtaagcatggtggtgtcttgatgtggcgtctcctatttctctgctttcatggtttgtcttttccctatgatgctcctttcactttgaatgtccttacacacggaattctttttttgacttttatagttcagttaaaacattgcctcctccatgaagttgtgttgacaatgcctattttatgcctccagaagaagtcaaactgcttttattactaaacaagaaagaataaaaataatcatgtaggtacccaactcaagatatcattaaaaaggaatctagtgaaagaaaagaggtgttaaagaaaaatagaatcaattagtttaaaagaatgtgaaactgattcttttcaggaagcaattttggtatggcttttaaaaccaggttactgataaagctagggctgctttgtgaagttacatttgattgtcgtataaataagacttttatgtttatttctttcactcagatttttcaaccttgaaacctagagcttctctctgaattactgtataatttcactttcttggtcaatattatatctcagttattttatatttta

SEQ ID NO: 719054 - DNA, 1248 bp, Homo sapiens
ttcaatggactctgtagttgtagaaacaaactcacaacttaaatctaccatcccagtttggggccagcattctattatacatcctattactctattacattgtttcatctgaaaggtattatcctgccttaatttccaattcaaactctccattcctaattcaagagtttgctcaagggtcatattctttacaaagaaaactcacattttctctcttttttgagatccgataacactttctaactaattattattattattactaatcaatgcctaaggtaattaatctttggctgcctcgagtgtgagctcctccaggacatgamctatttttttcttcttcttttatccctagtgcttaattccatgtcccatgcattctaggtcttaaagcttttatgcttaataaatatgaaattaatgagctgggattctggaaatctaaatatggagtaaaaatcaactctaattgtgtaggattgaaacaaaactacataaattagtttatcttattctctgtgtacatgttgaaggttacatgtacattttcaaaagtagatactgatttaaaaggtgagatcataaatatagatgtgaaaaatcatctttatatgtaaaaacaataattttattttaggtttaagcttctttggcagttcattttggtcttcagaataaagtgccaacgtgtaagcatggtggtgtcttgatgtggcgtctcctatttctctgctttcatggtttgtcttttccctatgatgctcctttcactttgaatgtccttacacacggaattctttttttgacttttatagttcagttaaaacattgcctcctccatgaagttgtgttgacaatgcctattttatgcctccagaagaagtcaaactgcttttattactaaacaagaaagaataaaaataatcatgtaggtacccaactcaagatatcattaaaaaggaatctagtgaaagaaaagaggtgttaaagaaaaatagaatcaattagtttaaaagaatgtgaaactgattcttttcaggaagcaattttggtatggcttttaaaaccaggttactgataaagctagggctgctttgtgaagttacatttgattgtcgtataaataagacttttatgtttatttctttcactcagatttttcaaccttgaaacctagagcttctctctgaattactgtataatttcactttcttggtcaatattatatctcagttattttatatttta

SEQ ID NO: 719055 - DNA, 1248 bp, Homo sapiens
ttcaatggactctgtagttgtagaaacaaactcacaacttaaatctaccatcccagtttggggccagcattctattatacatcctattactctattacattgtttcatctgaaaggtattatcctgccttaatttccaattcaaactctccattcctaattcaagagtttgctcaagggtcatattctttacaaagaaaactcacattttctctcttttttgagatccgataacactttctaactaattattattattattactaatcaatgcctaaggtaattaatctttggctgcctcgagtgtgagctcctccaggacatgacctatttttttcttcttcttttatccctagtgcttaattccatgtcccatgcattctaggtcttaaagcttttatgcttaataaatatgaaattaatgagctgggattctggaaatctaaatatggagtaaaaatcaactctaattgtgtaggattgaaacaaaactacataaattagtttatcttattctctgtgtacatgttgaaggttacatgtacattttcaaaagtagatactgatttaaaaggtgagatcataaatatagatgtgaaaaatcatctttatatgtaaaaacaataattttattttaggtttaagcttctttggcagttcattttggtcttcagaataaagtgccaacgtgtaagcatggtggtgtcttgatgtggcgtctcctatttctctgctttcatggtttgtcttttccctatgatgctcctttcactttgaatgtccttacacacggaattctttttttgacttttatagttcagttaaaacattgcctcctccatgaagttgtgttgacaatgcctattttatgcctccagaagaagtcaaactgcttttattactaaacaagaaagaataaaaataatcatgtaggtacccaactcaagatatcattaaaaaggaatctagtgaaagaaaagaggtgttaaagaaaaatagaatcaattagtttaaaagaatgtgaaactgattcttttcaggaagcaattttggtatggcttttaaaaccaggttactgataaagctagggctgctttgtgaagttacatttgattgtcgtataaataagacttttatgtttatttctttcactcaratttttcaaccttgaaacctagagcttctctctgaattactgtataatttcactttcttggtcaatattatatctcagttattttatatttta

SEQ ID NO: 719056 - DNA, 606 bp, Homo sapiens
cactgtatccagccctccggccttcatttttaaaaagaataagttttatttttctttctaattacaaaaacaacatatactcatggtagacaatctaagaaatacagagacctaaaataaataatcaactgtaatcccactaaccactgttgctatttgatgaatatttgaatatttactgaatgctgactgtctgaggcactctaacaatcctaaggctcaggtagtaaaattattcccctttaattaatgaaagaactgagattcagcgaggttaagatttgcctaaaaacacacagctgatacgtggtaaagcctggatttgaacctggttctgtatcccaattttctcacaatattttatttgtcttgatctaccaagatttgtcttggtatttgtcttgataccagagatgatggtacatcatcaaacaatcccaattttcaaatgggaaatacttcaaagcaaaaagatactgcatgaagatgtttcaaaaatgcgttttgtctttcaggtcttgtcacagttattgcaattttgtaaratcattcattgcgaaagtggtgttttgattctttgccctttccggcaacaaaaacagaaag

SEQ ID NO: 719057 - DNA, 511 bp, Homo sapiens
tgcaccatgttgcaaatactccagcttcaaaggctaatgctactcttaaagtcttcctaaccaaattctgttaggaacatccatgctataaccagatccaacagaagtttatgccaaaacttatcctctaataaattaagactaatttatagcagagctgtggagattgatttttactcaatgactacatggacattgggttgggctgagccttttgtcatggagatgtgtgtgcagtccctcctggtctcctagaatacagatggccgaatgcagtttttttctccaaggaaagacaacctaacctagaatagggataaaatctagtaatgccaccaataatgatattaaaaatctgggggtgagggtacttctatagggayggatatgaaaattgttcaaactcatttatccaaatgaataggatggtgttactctactatttgttttattttcttttgttttgtttgtttgtttgtttgagacagagtctcgccctgtcaccgaggct

SEQ ID NO: 719058 - DNA, 599 bp, Homo sapiens
tgctgcctctctctagtgggtgtctcagggtgggttcccctggaggcagaggctgagccaaggacttgagctcacataattcctttgagaggtgacccctggaagcacaaatgaaggagtgatgacatgaatcaggaaagagagacaagctagtaaagagtgcattaatgagagggttacctctgtacrtaactgaggttcagtcccccagacatcctccagtgaaccctgtggaaagcacttgggaaagtgtcccattgagaggtggggaacctggagcattttcctgccaactcccactcctcaatggttgagggttactctaggggggcattaaatctgggaatttccaggctgccctatgtgagggctgataaatgtcccagtgctggagaaagctgtcagggagaggtgaagagagatgcagaggcttgaggtgggcagtagtcagggtgcacggggactgctcaacaccgtagctggtggactccaagagaaacaatggggctgtgggaggggcagcacccacacctgctgcagagatatcatcactaccaggtagcagggatccacatatggcagacactgtggacacttca

SEQ ID NO: 719059 - DNA, 594 bp, Homo sapiens
agaaagagagaggcagacagatggatgacgctaagcacactgagcctccccaagtccaggaatcctgaagacgagcccattcattcctaacaacagccctctaaacaatccagcaatgccaaataccacgttatctacttcaccgtttgtccaatgcactattattttgtgaaccacaagaaatacactgtaataatttataagaagccatcgattgtacaatgcaccctgatttcagagatgttaaaatgtcggaaaatgtgtatcttaggctagataaatttctaagtatgcaactgctctccccttactctctccatgtagacattactaatcaattacggcactgtttctggccaagtctacttctcagcacaccatgacaggcaatcatcagctgatttaagtgggcacatgaatgacacctctgtgtggcttctggtctgtgcctagggtttctcaaatgagattagraagaagtagttccctcactgtggtgggggaccatgggagaaatctcaacttcctgtcccagagaaataagtccataatttaggaaggccacttagaaaataacttgagggctgtgtttca

SEQ ID NO: 719060 - DNA, 591 bp, Homo sapiens
ggtgcagggtagctcattgwgtggtccgcgaagggtggaaaggggaagggtcctctctggagggtgcggcttcatggagcaggtggagcagggtgacacggaggttgctcggtgcaggacaagacaaggtcttggtggtggtctaagagcatgggccctaagcagtgagaatgtggattgacttgagtcctggagtaatattgggggtgctcaacactggcttttttttttttttttgaggtggggtctcgctctttcacccacgctggagtgcagtggcgtgatctcggctcactgcaacctccacctcttgggttcaagggattctcctgcctcagcctcccgagtaactgggattacaggcacacagcaccatgcctggctcatgttttatatttttagtagagacagggtttcgccatgttagccaggctggtcttgaactcctgacctcaagttatttgcccgcttcagcctcccaaagtgctgggattgcaggcataagccatcacaccccgccagcattgtcttttgagacccactcagaagtccctcagtaaaagtgcatcgagtgtgcacaagtgaatttaa

SEQ ID NO: 719061 - DNA, 1712 bp, Homo sapiens
taactgaggtttttctcttatgttcgtatggacaaaaataggcagttacctcttattccctcatacaaagaccatataaattggtccctttgtctttctgtgaaatccagtggtacagctaatgatgacattcacctctgcctagtctaccacttatgtctaagtcaactgtcccccagaggaggaagccccacactaaattccataatacacaatacatactcatgggaagggaatagaccagataggtggttgatgctctggccccatgggttcatatagttcttaaatgttatctcctccttaggccaggcttttatcattaagcattaatactacttaaaaaggataaaagattgtcataaactttgaaagatttccagagcaaataaatgctagcttatcaatttcagagtcaaagaatattaaaattaaatttaaaatatacaattaacctaatacattttgaatttggactaattgtttgaaattcaaaaggaccccaggatatttttcacttgaaacacagaaataaaaaatttatactaaacaggcagagtttgccctcaaggttgaaaacattaatcatcatgcatctaactgttaactgtaaaaaatcatttttcttctgatttaaagggaattatttagtgagtgtttttaacttctctgctttctcaagcacaggcagtaacatggggtcaggttccgggctcctrtgccccttcacgtcccctttctctacaaggagctgcctttgatatacaagggagcttctggccgaaagaatgcacaaagcccaggaagaaatgaggctgctaggaatgtaattgagatttagttattaaattcaggaaataattggagttgaacagtctttctaagaagaaggtatattttagccccacataaaaatgaacttgaggccacagtcagtagggaaaggttttcacaggactctttgaagctttccacaatattcagaagcccataaagctggacacagctttttttttttcctttaaaaaaaaaaaaaagaaaaagaaaaaaagagttttcttaggttgggtgagaatattgagtcccaggaaggaaataggataacccaatatacattatagtctatttacgtaggtttcaccatggagccaaaccaccacaactacctgactggcctgtaatgttattgttgggctcttcagtattgaaatttccttaggtgggatccaagatagctttcctgatacaaaactatattccacaagtaatattaaaataagactcaaaaggattcattatctctgattcttggttacagatttatttcatctgagacaaggaaatttcagattattttttaaactctctggttctggacaacatacctgcccgattttgctttgggaaacaccctttccttttatagatatggattttagaaaaatgtccattattaattgagtttttggttgctgtttttttaacattagtcaaaactttgggcaggggctatctactagaattaatcctcctcatatctttgactagtgaagcaggtcatttttatacttctaaaatggttactatttgcagtgtagtgaatgcagagattgtagcaacatgttcactttctagtcaaattctaggatgtttactttggaaatatggctagaacagatattaatttgtagctaatttcagtgctttttcat

SEQ ID NO: 719062 - DNA, 1712 bp, Homo sapiens
taactgaggtttttctcttatgttcgtatggacaaaaataggcagttacctcttattccctcatacaaagaccatataaattggtccctttgtctttctgtgaaatccagtggtacagctaatgatgacattcacctctgcctagtctaccacttatgtctaagtcaactgtcccccagaggaggaagccccacactaaattccataatacacaatacatactcatgggaagggaatagaccagataggtggttgatgctctggccccatgggttcatatagttcttaaatgttatctcctccttaggccaggcttttatcattaagcattaatactacttaaaaaggataaaagattgtcataaactttgaaagatttccagagcaaataaatgctagcttatcaatttcagagtcaaagaatattaaaattaaatttaaaatatacaattaacctaatacattttgaatttggactaattgtttgaaattcaaaaggaccccaggatatttttcacttgaaacacagaaataaaaaatttatactaaacaggcagagtttgccctcaaggttgaaaacattaatcatcatgcatctaactgttaactgtaaaaaatcatttttcttctgatttaaagggaattatttagtgagtgtttttaacttctctgctttctcaagcacaggcagtaacatggggtcaggttccgggctcctatgccccttcacgtcccctttctctacaaggagctgcctttgatatacaagggagcttctggccgaaagaatgcacaaagcccaggaagaaatgaggctgctaggaatgtaattgagatttagttattaaattcaggaaataattggagttgaacagtctttctaagaagaaggtatattttagccccacataaaaatgaacttgaggccacagtcagtagggaaaggttttcacaggactctttgaagctttccacaatattcagaagcccataaagctggacacagctttttttttttcctttaaaaaaaaaaaaaagaaaaagaaaaaaagagttttcttaggttgggtgagaatattgagtcccaggaaggaaataggataacccaatatacattatagtctatttaygtaggtttcaccatggagccaaaccaccacaactacctgactggcctgtaatgttattgttgggctcttcagtattgaaatttccttaggtgggatccaagatagctttcctgatacaaaactatattccacaagtaatattaaaataagactcaaaaggattcattatctctgattcttggttacagatttatttcatctgagacaaggaaatttcagattattttttaaactctctggttctggacaacatacctgcccgattttgctttgggaaacaccctttccttttatagatatggattttagaaaaatgtccattattaattgagtttttggttgctgtttttttaacattagtcaaaactttgggcaggggctatctactagaattaatcctcctcatatctttgactagtgaagcaggtcatttttatacttctaaaatggttactatttgcagtgtagtgaatgcagagattgtagcaacatgttcactttctagtcaaattctaggatgtttactttggaaatatggctagaacagatattaatttgtagctaatttcagtgctttttcat

SEQ ID NO: 719063 - DNA, 896 bp, Homo sapiens
ctttacatctccccgcgctccaggaaggcgcccgcccaaccactgttattgggttcccaaccccctagtcggagtacctcattggttacatttgttgtctatcttaacggttcctcgcgccagactgtagctccgcccctcgcactctgcggtcacgtgacccaaagtgttgaggtgttgattggacaaaaagtctgccctgtaacggtacttcttgctcagtgacagcagcaacccacctccttatccctttcattggcttataaacccgtcctttaaaccactatttgggaggtcgggccatcagtttcggcgttttttccagagaggcaggctcacagcgatatcgcgagagacggtaagctccctctttcgaccccctttttccaactcctccggcggctaaaagaagtttaaatctgattggatgtcggcaaggaagttgataggctgaaataactgtccatcactcgcttaaaggggtaggcctgtataacggaggaggctgactgaaggtgaaagactagaacacgtgcttgctgtgsgacgtcacttagatgtcgcgagagggtgactgtgcgccagccccgcctccccgcgttttcggcgttctccccacaaacatttgttaagttccgtggggtgtttggctgtgcttcggcccttggagttcgaaacttctgagctccccgccgtcgtacctgtgccggccaaggggcggggcaggctttccggctgtcggggccctccagtccctcaggaagccgtcctgggacgcctagcggacaccattttacgtcgctgtggtagctgagtgaacagccggggggagccccgccccccgcgcgcgggagagcgccgcccgcggtcacctgggcccgcggggcagagagttc

SEQ ID NO: 719064 - DNA, 580 bp, Homo sapiens
cttcagaaaaagaaactgaggcttagagatytaatatattttacaaatatttaagaagaataatatgtgtaccctgattgatcccctggctgccaccacagtctgtgcaaagtatttgattttaagtcatacttccatattgtggatgacactgcttgttgtgtaaccaatatccattctcctgttctttgttgtgaataggtgcaatattttaacgggaaagttgataacaagtggtgcagacaattctatagaaatgtaatgtagaaatatacagtaactatgttattaattgcctgcttcaagaatggtactttaacctcagtagtttatagaaaccacaagagagtatttcacttgattgtggacagtttagaggcaaaatttaggtgttttgcaaaggagatggagattcagggactctcaattattggacaaagcgtctacagtcagagacaataaaagtttgattttcagctgtttattgggtattaggcaaaattctcttgctgtttctagtgtctggtggagatatcaatttaaagagctcttcagagtatattctatgtagtcttcctat

SEQ ID NO: 719065 - DNA, 580 bp, Homo sapiens
cttcagaaaaagaaactgaggcttagagatttaatatattttacaaatatttaagaagaataatatgtgtaccctgattgatcccctggctgccaccacagtctgtgcaaagtatttgattttaagtcatacttccatattgtggatgacactgcttgttgtgtaaccaatatccattctcctgttmtttgttgtgaataggtgcaatattttaacgggaaagttgataacaagtggtgcagacaattctatagaaatgtaatgtagaaatatacagtaactatgttattaattgcctgcttcaagaatggtactttaacctcagtagtttatagaaaccacaagagagtatttcacttgattgtggacagtttagaggcaaaatttaggtgttttgcaaaggagatggagattcagggactctcaattattggacaaagcgtctacagtcagagacaataaaagtttgattttcagctgtttattgggtattaggcaaaattctcttgctgtttctagtgtctggtggagatatcaatttaaagagctcttcagagtatattctatgtagtcttcctat

SEQ ID NO: 719066 - DNA, 580 bp, Homo sapiens
cttcagaaaaagaaactgaggcttagagatttaatatattttacaaatatttaagaagaataatatgtgtaccctgattgatcccctggctgccaccacagtctgtgcaaagtatttgattttaagtcatacttccatattgtggatgacactgcttgttgtgtaaccaatatccattctcctgttctttgttgtgaataggtgcaatattttaacgggaaagttgataacaagtggtgcagacaattctatagaaatgtaaygtagaaatatacagtaactatgttattaattgcctgcttcaagaatggtactttaacctcagtagtttatagaaaccacaagagagtatttcacttgattgtggacagtttagaggcaaaatttaggtgttttgcaaaggagatggagattcagggactctcaattattggacaaagcgtctacagtcagagacaataaaagtttgattttcagctgtttattgggtattaggcaaaattctcttgctgtttctagtgtctggtggagatatcaatttaaagagctcttcagagtatattctatgtagtcttcctat

SEQ ID NO: 719067 - DNA, 2415 bp, Homo sapiens
gcaatttcacttctaggtatatatacaaaagaattgaaaatgtatgcccacataaaacatgcacatattttttaatgaattaatgattttagagaattatttgatttgacgttgtgaatgtacatggcagcattattcatagtaaccaaaaacaactggaaactacgcaaatgaccatcaactgatgaatgaataaacaaaatgtggtatgtctatacaacgaaatattatttgttcataaaaagaaatgacatgctacagcatggatgactcttaaaaacattaggaaatgaagtaaaagaaggcagacacaaaagcccacttatttttatttcattcaaaaaatgtccaaaagaggcaaatctataaagacagaaggtaaattagtggttgctaggaggtggggggaagagggagtggggagtacatgataatggtatgaggtttctttttggggtgatgaacatggtccagaattaaatcacagtgatcgacacataatgttatgaatatacaaaacctattgaattgcactctttaaatgaatgaaatttgtgacttgtgaattatatctcaataaatgtgttattcaaaaaaaagaagaaattcccaggataaagcaacttactctactcattctggttgagtagaatgagtcacactatcctggaagttctaccatgccatcctttaagaaagggtggggaggggcttcatgaaggcactaacatcttccctaaatattcaaggataagtagaaataaagttcatgcaaggagaaggaaagaacaaccaggtaaagggaatgacactagcactttgtagatattgaataaaaaaacaaacaaaaaaataaattagtgattttagagaattatttgatttgacagtcatgagaactccttttccaagggccaagaaaactagggagctgccccaaaactataatgaaactgggacgggaaccactgtttattggcagattgcacaataacaaagttattatcttattagtttcctctgatataaaacatctagcaatttctggattgatctctgatgagatcttagaagaaatctttgctatttcttttatcctagaacatgtctacaagatacaggcgtaaagcatggtaaaatatcaagcaaatgctaatcatctcacatcgtataaataggcaagattaagttgaatttttcctttttaaacttttcaaccaacttttttggaatagaggactatagactcatgtctataaattctatacattttctaaattatagatgatgtttatagaattcacagctaatctttttctatccctagatttcaagaacatttaaacaagctaagtattcaaaatatgttaaagttaaattcaaaaaccacagtttgaatcccaatagggtttcagctatagaaaaatttagttaaaccagtgaaggtaggagatggcaaatggagttgagtgctacataatttaactttaagaaaaacataattaaccagcctatcattttatacaactgatcatttataatgagaagatatggggtaaaagccaggcgtggtggctcatgcctgtaatcccagccctttgggaggctgaggtgtgtggatcacgtgaggtcaggagttcgagaccagcctggccaacatggtgaaaccctgtctctactaaaaatacaaaaattagccaggtgtagtggcgggtgcctgtaatctcagctactcgggaggctgaggcaggagaatcgcttgaacccaagaggcagaggttgcagattgcgccactgcactccagcctgggcaacagagcaatacttcgtctcaaaaaaaagaaaaaagaaaaaaaaaagatttggggttggatgataacaagaaccaacctgagtgaaaaacattttgcctaggtgaaactgtcagtggtttgcaaaagtgaagagaagagaatagatgtctaagagggtgggttagaggtaataggattttgccctactaaggaaacttaagctaaagattgcaaagcttttatgtgatatcgcctttggagtgacaactgccaacaggatatgaacggtggcgaggtcagtatagattttttctaggtctccctgctgccatttcctgtcatgagagttgtcatcttcaaatcacttacatacactcagctattttactgcatcggtatatagcaaaaacattgaggtaggaatatttatttggtttgaaaaattttccattttaatgtataccaggttgggaaatgctctgaacactgttgaaaaattctttctttaaaaataggttaataacctgcaagtaatttttttcaaaggcttggataagtgtattttatgtttcctttaatgaatagaaaattaytcttgtttaaaagactttcatttactcta

SEQ ID NO: 719068 - DNA, 1173 bp, Homo sapiens
aatattaagttgtaccctataaatatgtgcaattataatgtgtcaaataaatacataaataatttttaaaatatattattacacttagtttggagtttaaaatgatacgtgctttattataaagtttagaaagtatcagaggacattaagaagaaaataataattatcccaagttttattacccataaaggggaagggaaagtgaacacatacttmttcacatggcgacagcaaggagaagtgagagcgaagtaggggaaagctccttagaaaaccatcagatctccttagaactcactcactttcaggagaatagcatggaggtaactgcccccatgattcgattacctctcaccaggtgcctcccaagacacatggggatcactggaactacaattcaagatgagatttgggtagagacacagccaaaccatatcaatattatatataaatatattatataaatgtatttaacatttatattatataaaatttaatatgtaaatgtactatatcaaagcatatctttaaatatatagtatatatttatatgtataatatatatttaagtttcaaatttttgcttgtgtaactctgaataaatatcattttactgaaataattttgcacatcttcaactgtttctttaggaaaaattcctgatatgtaattgctgggctaaagggaatgtattatgtttaatgctcttcattcatacttcaaaattacatattagatagcttatattagtttaaactccagccaacagtttttgagagtgcagcttctacatgtcaactcccagccccgttcctcaccacatggttactatatcattaaattgtgcatatatacttgttaatttgctatgtgaaaagtggcattaatttcattgtaatcagactgacattttatgcttaattgatcatttgtatttcttcttttgtaaattactttaaaaatattgctgttttttcattgatttataagattctctctttgcatcaataacgtaaattttgtcatatatgttgtaaatgctttttctaattttcatgggttctttaataccaagtttcaaggtttatgtaacataatatatcaatctttgcctcatggcatcttcccttcttatattttaaatttctatagagagagggtcttgctttgttg

SEQ ID NO: 719069 - DNA, 1173 bp, Homo sapiens
aatattaagttgtaccctataaatatgtgcaattataatgtgtcaaataaatacataaataatttttaaaatatattattacacttagtttggagtttaaaatgatacgtgctttattataaagtttagaaagtatcagaggacattaagaagaaaataataattatcccaagttttattacccataaaggggaagggaaagtgaacacatacttattcacatggygacagcaaggagaagtgagagcgaagtaggggaaagctccttagaaaaccatcagatctccttagaactcactcactttcaggagaatagcatggaggtaactgcccccatgattcgattacctctcaccaggtgcctcccaagacacatggggatcactggaactacaattcaagatgagatttgggtagagacacagccaaaccatatcaatattatatataaatatattatataaatgtatttaacatttatattatataaaatttaatatgtaaatgtactatatcaaagcatatctttaaatatatagtatatatttatatgtataatatatatttaagtttcaaatttttgcttgtgtaactctgaataaatatcattttactgaaataattttgcacatcttcaactgtttctttaggaaaaattcctgatatgtaattgctgggctaaagggaatgtattatgtttaatgctcttcattcatacttcaaaattacatattagatagcttatattagtttaaactccagccaacagtttttgagagtgcagcttctacatgtcaactcccagccccgttcctcaccacatggttactatatcattaaattgtgcatatatacttgttaatttgctatgtgaaaagtggcattaatttcattgtaatcagactgacattttatgcttaattgatcatttgtatttcttcttttgtaaattactttaaaaatattgctgttttttcattgatttataagattctctctttgcatcaataacgtaaattttgtcatatatgttgtaaatgctttttctaattttcatgggttctttaataccaagtttcaaggtttatgtaacataatatatcaatctttgcctcatggcatcttcccttcttatattttaaatttctatagagagagggtcttgctttgttg

SEQ ID NO: 719070 - DNA, 1173 bp, Homo sapiens
aatattaagttgtaccctataaatatgtgcaattataatgtgtcaaataaatacataaataatttttaaaatatattattacacttagtttggagtttaaaatgatacgtgctttattataaagtttagaaagtatcagaggacattaagaagaaaataataattatcccaagttttattacccataaaggggaagggaaagtgaacacatacttattcacatggcgacagcaaggagaagtgagagcgaagtaggggaaagctccttagaaaaccatcagatctccttagaactcactcactttcaggagaatagcatggaggtaactgcccccatgattcgattacctctcaccaggtgcctcccaagacacatggggatcactggaactacaattcaagatgagatttgggtagagacacagccaaaccatatcaatattatatataaatatattatataaatgtatttaacatttatattatataaaatttaatatgtaaatgtactatatcaaagcatatctttaaatatatagtatatattyatatgtataatatatatttaagtttcaaatttttgcttgtgtaactctgaataaatatcattttactgaaataattttgcacatcttcaactgtttctttaggaaaaattcctgatatgtaattgctgggctaaagggaatgtattatgtttaatgctcttcattcatacttcaaaattacatattagatagcttatattagtttaaactccagccaacagtttttgagagtgcagcttctacatgtcaactcccagccccgttcctcaccacatggttactatatcattaaattgtgcatatatacttgttaatttgctatgtgaaaagtggcattaatttcattgtaatcagactgacattttatgcttaattgatcatttgtatttcttcttttgtaaattactttaaaaatattgctgttttttcattgatttataagattctctctttgcatcaataacgtaaattttgtcatatatgttgtaaatgctttttctaattttcatgggttctttaataccaagtttcaaggtttatgtaacataatatatcaatctttgcctcatggcatcttcccttcttatattttaaatttctatagagagagggtcttgctttgttg

SEQ ID NO: 719071 - DNA, 604 bp, Homo sapiens
tgaacaatactattaacatatttggaacaatttgcatttatagaatactacatttaatgtcagaattcatattgttttaattgcacttgaaaatatatatgccaaaagcataaatctcaatctcaatatatttcacaatattgaaaccacacaggatatactttctcaccacaatgtaatcaaagagaaataaaaatctccaaaattaggtcataagcaaatatttattttaataagtagagaaacaaaatttgacaaacaaaacctatccataataaaactctcatcaacatcaaaacaaacccaaagagcctattaagaaagtgaaagcacatgctacagattgggagaaaattacttgcaatacatatatccaaaaagggactaatatcagaataaaarcaatctacacaaatcaataaataaaatcagacactctaattaaacatgagagaaaactatcatgaaaagtacacttcacaatcaagatatgctaaccatagggtgctaaccatagagagatgctcagcatcattaattctcaggaaaatggataaaaatgagaagaatgacaatatggcataatgaggaggaggcagagcaa

SEQ ID NO: 719072 - DNA, 1271 bp, Homo sapiens
gcatttcttaaaactcagaaataagaaagtgctttccaggcatggaaggaagggctgaagctcagccaacaccaacacttaactacttctctttttcaggaatgattttcttcatttccagtgtactggagagccactggtaacttttgcttccttgctcaacccagagtactactcattaattgatgagcattgaaaagcttttgaaggctgtctgaaacagagcttatgctataaaaattggggttccctctgggggatgtatcactgcgccattaaacttggccacttggtggcaccaaaaagtaagagcagcactgtacggaggtaaccagtgtctactgcgttacaaagaaaaagtaaaaaataaacaatcacttcttggaaaaaaaaaaaaaccctctgaattaaattgttttcttcctttgtaaaattaggggtggccagtggtggaggaagggggattgtaccaaagagaaagtcccttaaattcctttaaccttgacattctatgaccctcatgtactgtgagttcccagtatgctctttgttaatgagactgaaaatgatggtaacaggcaacacttaccatgtgcttattatgtggcagggcactgaactacgtgtgtcatagagattagcatgagtttatttttctttcttattttacatgagaattgtataaatcctcacaacactataatagttattattattattattttacacataaggaaaatatatagaggcagaaggacttctacatagccagtaagcagtgcagctgggatttgaactccacagtcagtcttcagagtcagggacttcattgcaacactctatttctgaatgactcttcttatttataagggggaggtttacttccattcttctggcccttaagaaaggaaaaactgttaaggaaaagcctccaacacatgcatatcctacacagwtatgtaatccatttgaaaaataatgcttattactacagcattaccattggggaataaaaaatgatgttcacttactgtacttatttccaaattttaagttgcaaccctgtctttaacaattcagaagcaccagagttttggtcagggactccctttggagttcaacagtgttagtaacattttattgttagcccatggtccctggagagcgtaattacagacctgcagtttttaaacaatggaatgaaatgatttaatacggggagaagaggggaaaaggacaatgagaattagaaagtgctggaaatcacaaga

SEQ ID NO: 719073 - DNA, 1271 bp, Homo sapiens
gcatttcttaaaactcagaaataagaaagtgctttccaggcatggaaggaagggctgaagctcagccaacaccaacacttaactacttctctttttcaggaatgattttcttcatttccagtgtactggagagccactggtaacttttgcttccttgctcaacccagagtactactcattaattgatgagcattgaaaagcttttgaaggctgtctgaaacagagcttatgctataaaaattggggttccctctgggggatgtatcactgcgccattaaacttggccacttggtggcaccaaaaagtaagagcagcactgtacggaggtaaccagtgtctactgcgttacaaagaaaaagtaaaaaataaacaatcacttcttggaaaaaaaaaaaaaccctctgaattaaattgttttcttcctttgtaaaattaggggtggccagtggtggaggaagggggattgtaccaaagagaaagtcccttaaattcctttaaccttgacattctatgaccctcatgtactgtgagttcccagtatgctctttgttaatgagactgaaaatgatggtaacaggcaacacttaccatgtgcttattatgtggcagggcactgaactacgtgtgtcatagagattagcatgagtttatttttctttcttattttacatgagaattgtataaatcctcacaacactataatagttattattattattattttacacataaggaaaatatatagaggcagaaggacttctacatagccagtaagcagtgcagctgggatttgaactccacagtcagtcttcagagtcagggacttcattgcaacactctatttctgaatgactcttcttatttataagggggaggtttacttccattcttctggcccttaagaaaggaaaaactgttaaggaaaagcctccaacacatgcatatcctacacagatatgtaatccatttgaaaaataatgcttattactacagcattaccattggggaataaaaaatgatgttcacttactgtacttatttccaaattttaagttgcaaccctgtctttaacaattcagaagcaccagagttttggtcagggactccctttggagttcaacagtgttagtaacattttwttgttagcccatggtccctggagagcgtaattacagacctgcagtttttaaacaatggaatgaaatgatttaatacggggagaagaggggaaaaggacaatgagaattagaaagtgctggaaatcacaaga

SEQ ID NO: 719074 - DNA, 618 bp, Homo sapiens
ggatctctaaaagtactttatttaacatctgcttattatttaaactgtgctaatcgaggtaattcttagataattaataaaggttagctctctacttgacaacactaattattctttcctttaattggagaaagtttagaaaaatcaccagacatgccatccagagagaattcttatttgtatgttggcacatttgctttcaatatttttttctgttctgttttttcaatttttttctattattattttacacataaggaatatatatagaggtggaaggacttgtayatagctagtaagcagtgcagctgggatttgaaccccaaagtaagccttcagagcctgggacttcattgcaacactctattcctgaatgactcgtcttatttataagggggaggtttacttccatgattctggcttttttttttttttttttttttgagatggtgtctcgctctgttgcctaggatggagtgcggtggcgcgatcttggctcaccacaacctttgtctcctggattcatgtgattctcctgcctcagcctcctgagtaactgggactacaggcgtgcgccaccatgcccggctaatttttgtatttttagtagagacgtgg

SEQ ID NO: 719075 - DNA, 1000 bp, Homo sapiens
agcatttgtatcctagcccggcatcctggggacattgtagcctctgacaaggagtgcctcatgtgttcacagcaagcagagattaagaatatcccccaagatctagagtcaagacactgctgcctgtaaggaactcagagttcttgcgcgaagaacttggagagaaagaataatatggtaacgtgccctgtttgttagaagatccagctatggtcggaatcgcaggcagagaaaggagtttgttctgcccctagatgggttcctggtaacaaggggctggtgataataatcaaagagcagcctacactatgtgctagacactaygctagtaacccattttaaggatgctgaggcccagagagtttgagtaacttgacctgcacagctagacggtagccaaatgaggatttgaattcaggtggtctaactctctacagtgctaagctgtgctccccaccacagagaggtttcctgaagcagactggcaatgagatgtttagaataacaccaagggtacttacgatcagggggcttcccagtttactcagttgcctcagtcctggagtgatacagtagaaagggcttggattttggagtcatgcatttgggcttcaaatcttacaatggtgtgagtctgtacatatcgctttgcctctctgagctcagttttctcatctgtaaaatgggaatcataatacctgccttgccaagttacagggaaaattagaggtaatgacataagtccattgccctgcgtattgtgtgtggtcagtagttgttgctgctattaatctaccaccatgaaaacagtgctggacccaactttaggtcaataataacactagacaataataagctcctcaagggagagacctgtgttttatttgtctccgcagccctacacaaggggtcagcaaactctagccctgggggccaaagtcagcccactgcctgcttctataaatgaagtttagttggaacacagccatacctatttatt

SEQ ID NO: 719076 - DNA, 683 bp, Homo sapiens
ttttgagctacactccagagctattgactcagtaggtcctttttctctgagacagagtcttgttctgtcacccaggctggagtgcagcggcagtctcrgctcactgcaacctccacctcctaggttcaagtgattctcctgtctcagcctcctgagcagctgggactacaggtgtgtgcctggcctggaatctgaatttttcaaagtcccagagattccgatcccttgtgagtctgcaagttggctgaaataccaaagaggcaatagggcatggtggagactgcagtgagcagaagaacctaggtgctgtctaaaggaacagccaccacccttcagctttaaccagttgttaccatgtggagtgtgggcctggggttgccagatctattgctgtttaaagagaagccaaaagaatttccgtgaactctttcatgttttaaatatggctagctaaaatacatctgcaggctgtatttatttgccctagattactagcctgtgacctgtacctaaatgatgtctgagatccatcccagctattaccatctaaaattatttagtttatttaacagacatctaaatgatgcttactaagaaatgatgcttactaagtgcctatcattgctttagatgttctgcacagattaactcacacccttattataacccattttacagatgtt

SEQ ID NO: 719077 - DNA, 643 bp, Homo sapiens
ggatggggagaacagctgccggtgagccctatatgggatgcagagaggagagctgagaagcaggaggggaggctcagggtacagagtgggggtccttcttcctctttagggatctgcaatgcaatgccaccctatgctttctctcttcctttgcccaaaactcatctaacgccaccctcctagcgtgcgtggcatttccaatccaagctgtgctttactttctcagataccagatatcctatgtacccaatgattttactsattcttcatgctacatatatatactttagaaggaagctttttgtcaccatatcatatgtagcatttgtcttaagtggaaggtacaaaactttttttgatggaaaatgtcaaagatgtacaacatagaacagtggaaccccatgttcccgtcacccagccccggcagtttccaactcggggctgatcttgtttcattttcatcttcacccaccttccgcctcctcccggatcagtttgaagtcaatcccagacatcctatcatttcagccatcaatattttaataatgtatctctgaaaaataactcttttaaaaacattcaccataatgtcatcacacctaaaaatatcacaaagaaaattaataggcagaactattgttga

SEQ ID NO: 719078 - DNA, 2605 bp, Homo sapiens
  misc_feature 2145, 2146, 2147, 2148, 2149, 2150, 2151, 2152, 2153, 2154,2155, 2156, 2157, 2158, 2159, 2160, 2161, 2162, 2163, 2164,2165, 2166, 2167, 2168, 2169, 2170, 2171, 2172, 2173, 2174,2175, 2176, 2177, 2178, 2179, 2180, 2181, 2182, 2183: n = A,T,C or G
  misc_feature 2184, 2185, 2186, 2187, 2188, 2189, 2190, 2191, 2192, 2193,2194, 2195, 2196, 2197, 2198, 2199, 2200, 2201, 2202, 2203,2204, 2205, 2206, 2207, 2208, 2209, 2210, 2211, 2212, 2213,2214, 2215, 2216, 2217, 2218, 2219, 2220, 2221, 2222: n = A,T,C or G
  misc_feature 2223, 2224, 2225, 2226, 2227, 2228, 2229, 2230, 2231, 2232,2233, 2234, 2235, 2236, 2237, 2238, 2239, 2240, 2241, 2242,2243, 2244: n = A,T,C or G
tccctaaatatagaactttggggataaaattttgaaatttttagccccagggagcagagaaacaggcttattaaacttattttttcgattttaatgatgtttgagagttatcagccctgctgggaaaaataatcaatggattttatttccctttaaagttaaagttggacattaatggcacttggcacttaaggtgggataatactagacaatcagtctcagctctgtacatgggaaccatttaattttaagtgtaggaaagactttgtggaaaatctgaaagacttcctggaataagaatgtcaggagaccatcttactctctttggaaaattcatcttaaacgtgacagaattgatagaaatgtgatttttttccagttatttcatgtgttatttttcctttagatgggcttgtctttttttcctaaatagaaatgattaattgttttcttcagcttttcctctcttcctggtttattttctgtacagctgtaagaggatagtaatcataagaaaatttacatgcattagctattcaatagagaagaaatgttcatacatgggaacacttatgggtatatataaatacaattgatgagcatgattttccactttgtttgaatgacaatggtttaaaatatatcaaccaaatgagtttaaatttggcacagaaatgaatccttctataaatagtcacaacgagttcttaagagaactcaggatatgttttttaaacgaatttattattaggaatagtttttagcattattagggctgtgtctataaacacagagaaaaatgttagtacagactattccgtccaaagatgttggttgaaggagtaagtctccatttgtttgtattagttcttctcagcccttgttgcacattaaaatcatcatttcagtttttaaaataatacaaatattcaaccagaccaattggatcagaatttcagcctgagaaaaggagtagcaggcatccacacttttaaaaagctttgctggtgattctaatttgtagttggggtttagaactgctggctacagaatgataagaagtagcaatttagaatgtaactctttttgataactatcgggacaagagagtgagtgtgagatggatcacctctgtcattgcagacaaatttagaaagaaaatgaccccaagggcctgtttcattttcctgaaacactcaacaaattcaagaatgtaaacatgggacagagaaaagatgtaaggagaatgttagtggagacctctttggagcgagcagatgctgtgctgcacttcccatgttccccaagtgaaggaaacatggtggatgctaccttttacactaccttaattaggcctgtgatttccaatgcattttaacacacaattcatcaaatgcaaataaaactaaatttgcaatcattttaacacacaattcgtcaaattcaaataaaactaagtttgcaaccatagaattttgctgagcttagaatgtactttgtaatttcattccggtgagtactggtacactacatgattgagctctatacactgtgttgctctttgttgtttgtctacgtctaaacatacaaagaaagacttcaatgggtatattcagagagtcatggtaaatgtttcttgccactaagagacygaagactgtcgtctgatctatgcaagagagagcttaattaggcatagactggagtctgttttctaccagccaaatgttctgttggtggacaacggtattgtagcatgagattcagtctgtttctcagaatttatcaggaagccaaaagtgtttacctgtagaaaatggcagtgtcatgggagagagggcctgcatagttcctgaaccaaatggttgacaggtgaagtgagccaaattcagcagagagaggttagaggtgtatcatcagaaggaatgtagggttacaggtgataacctagagtagagatacatcctcctgggtcagcagaagagcaaaaccccaaatagcccacaaaaccacccataagaaggagttaaccaaagctatctcccaggtctccattttaaccaattgcaagaaagagagagagagagaaagaaaaaaagagagacagagtgagcatgaagccattcagctcggtaaaaattggcnnnnnnnnnnnnnnnnnnnnnnnnnnnnnnnnnnnnnnnnnnnnnnnnnnnnnnnnnnnnnnnnnnnnnnnnnnnnnnnnnnnnnnnnnnnnnnnnnnnnactggaaagaaacaataacaaaaatatgtgtctagaaacatctaaacatttttgaaaataattcaagaggtcaagtaaggaaatgttaatccaaagtgaagaaaaaataactagagaaatgagtacttaagctagtttattttgagagcatttgcagaacctggtaatgttatttttaatcttgatagccttaccaagtgataaggacagaaataaaagcagaagacaccttccacctgcccacacacacggaagaaccaaaggaccatggtaaggtaagggttaactgaatattcccatgaatcatttaaaatccttttgggggccaggtacaatggctcatgcttgtaatcctagcact

SEQ ID NO: 719079 - DNA, 2605 bp, Homo sapiens
  misc_feature 2145, 2146, 2147, 2148, 2149, 2150, 2151, 2152, 2153, 2154,2155, 2156, 2157, 2158, 2159, 2160, 2161, 2162, 2163, 2164,2165, 2166, 2167, 2168, 2169, 2170, 2171, 2172, 2173, 2174,2175, 2176, 2177, 2178, 2179, 2180, 2181, 2182, 2183: n = A,T,C or G
  misc_feature 2184, 2185, 2186, 2187, 2188, 2189, 2190, 2191, 2192, 2193,2194, 2195, 2196, 2197, 2198, 2199, 2200, 2201, 2202, 2203,2204, 2205, 2206, 2207, 2208, 2209, 2210, 2211, 2212, 2213,2214, 2215, 2216, 2217, 2218, 2219, 2220, 2221, 2222: n = A,T,C or G
  misc_feature 2223, 2224, 2225, 2226, 2227, 2228, 2229, 2230, 2231, 2232,2233, 2234, 2235, 2236, 2237, 2238, 2239, 2240, 2241, 2242,2243, 2244: n = A,T,C or G
tccctaaatatagaactttggggataaaattttgaaatttttagccccagggagcagagaaacaggcttattaaacttattttttcgattttaatgatgtttgagagttatcagccctgctgggaaaaataatcaatggattttatttccctttaaagttaaagttggacattaatggcacttggcacttaaggtgggataatactagacaatcagtctcagctctgtacatgggaaccatttaattttaagtgtaggaaagactttgtggaaaatctgaaagacttcctggaataagaatgtcaggagaccatcttactctctttggaaaattcatcttaaacgtgacagaattgatagaaatgtgatttttttccagttatttcatgtgttatttttcctttagatgggcttgtctttttttcctaaatagaaatgattaattgttttcttcagcttttcctctcttcctggtttattttctgtacagctgtaagaggatagtaatcataagaaaatttacatgcattagctattcaatagagaagaaatgttcatacatgggaacacttatgggtatatataaatacaattgatgagcatgattttccactttgtttgaatgacaatggtttaaaatatatcaaccaaatgagtttaaatttggcacagaaatgaatccttctataaatagtcacaacgagttcttaagagaactcaggatatgttttttaaacgaatttattattaggaatagtttttagcattattagggctgtgtctataaacacagagaaaaatgttagtacagactattccgtccaaagatgttggttgaaggagtaagtctccatttgtttgtattagttcttctcagcccttgttgcacattaaaatcatcatttcagtttttaaaataatacaaatattcaaccagaccaattggatcagaatttcagcctgagaaaaggagtagcaggcatccacacttttaaaaagctttgctggtgattctaatttgtagttggggtttagaactgctggctacagaatgataagaagtagcaatttagaatgtaactctttttgataactatcgggacaagagagtgagtgtgagatggatcacctctgtcattgcagacaaatttagaaagaaaatgaccccaagggcctgtttcattttcctgaaacactcaacaaattcaagaatgtaaacatgggacagagaaaagatgtaaggagaatgttagtggagacctctttggagcgagcagatgctgtgctgcacttcccatgttccccaagtgaaggaaacatggtggatgctaccttttacactaccttaattaggcctgtgatttccaatgcattttaacacacaattcatcaaatgcaaataaaactaaatttgcaatcattttaacacacaattcgtcaaattcaaataaaactaagtttgcaaccatagaattttgctgagcttagaatgtactttgtaatttcattccggtgagtactggtacactacatgattgagctctatacactgtgttgctctttgttgtttgtctacgtctaaacatacaaagaaagacttcaatgggtatattcagagagtcatggtaaatgtttcttgccactaagagactgaagactgtcgtctgatctatgcaagagagagcttaattaggcatagactggagtctgttttctaccagccaaatgttctgttggtggacaacggtattgtagcatgagattcagtctgtttctcagaatttatcaggaagccaaaagtgtttayctgtagaaaatggcagtgtcatgggagagagggcctgcatagttcctgaaccaaatggttgacaggtgaagtgagccaaattcagcagagagaggttagaggtgtatcatcagaaggaatgtagggttacaggtgataacctagagtagagatacatcctcctgggtcagcagaagagcaaaaccccaaatagcccacaaaaccacccataagaaggagttaaccaaagctatctcccaggtctccattttaaccaattgcaagaaagagagagagagagaaagaaaaaaagagagacagagtgagcatgaagccattcagctcggtaaaaattggcnnnnnnnnnnnnnnnnnnnnnnnnnnnnnnnnnnnnnnnnnnnnnnnnnnnnnnnnnnnnnnnnnnnnnnnnnnnnnnnnnnnnnnnnnnnnnnnnnnnnactggaaagaaacaataacaaaaatatgtgtctagaaacatctaaacatttttgaaaataattcaagaggtcaagtaaggaaatgttaatccaaagtgaagaaaaaataactagagaaatgagtacttaagctagtttattttgagagcatttgcagaacctggtaatgttatttttaatcttgatagccttaccaagtgataaggacagaaataaaagcagaagacaccttccacctgcccacacacacggaagaaccaaaggaccatggtaaggtaagggttaactgaatattcccatgaatcatttaaaatccttttgggggccaggtacaatggctcatgcttgtaatcctagcact

SEQ ID NO: 719080 - DNA, 637 bp, Homo sapiens
tgattggctcacaagagggcatgtgatagaagaagcctcatcagagcgaaccttagggtttttgcagagaaggctgggacagagaactttcctacttcccccactgcacattatcctaaaggacttcaccctggaaacttatggaggtcttcttgagagaaaagagaatgttagaatggaggtaacataaaggaagaagagctaaaagatggagagagcaaaaccagatcccaagaacacagccaaagccagatgtcctcctggcatctcagttgtacaagctaatctgttgtctcccacattcccaaccatgtgaactttttttttttttttggctgagtctgatctatcacttgcgacaactggcactagtggggccccatgcacacgcacacaaccacactcaatatttctttccacatgyggaaagcaggatggtgtcacagcagaagcccaggcctggaaggcaagagatctaggtctgtctgtggctttgtctctttgacattcaacttcttcagctataaggtggctggggaagggggaggttggacaaataagctcaagatgccttcctgctctgacactctctgaatctgtcaacctgaacgtcttggtgctcctggggccattgaga

SEQ ID NO: 719081 - DNA, 637 bp, Homo sapiens
tgattggctcacaagagggcatgtgatagaagaagcctcatcagagcgaaccttagggtttttgcagagaaggctgggacagagaactttcctacttcccccactgcacattatcctaaaggacttcaccctggaaacttatggaggtcttcttgagagaaaagagaatgttagaatggaggtaacataaaggaagaagagctaaaagatggagagagcaaaaccagatcccaagaacacagccaaagccagatgtcctcctggcatctcagttgtacaagctaatctgttgtctcccacattcccaaccatgtgaactttttttttttttttggctgagtctgatctatcacttgcgacaactggcactagtggggccccatgcacacgcacacaaccacactcaatatttctttccacatgcggaaagcaggatggtgtcacagcagaagcccaggcctggaaggcaagagatctaggtctgtctgtggctttgtctctttgacattcaacttcttcagctataaggtggcyggggaagggggaggttggacaaataagctcaagatgccttcctgctctgacactctctgaatctgtcaacctgaacgtcttggtgctcctggggccattgaga

SEQ ID NO: 719082 - DNA, 940 bp, Homo sapiens
catttttatcattgtacattggcaagtcactttatcttccataacttcaaaggttcccctttcctcgtttttaaggaatggtgagcagattaagtgagaagccctttgaaaaccgccatgtctgtggtaatcattgcttagagagagagccagggcaggccttgacatttgttccatccaccccagatggcattttaatctctttgctctcctgctgttacatggagaagaaaagactggtccacatgcaggaccagaggcctgagtggatgtgtcagctctgctctgtgtccctgggcaaattaatttacatttctggctttggatctcttttcaccattatcctcaaaaggtagacatgagctctaatatccctttcagttctaacaccttgcaaaaccaagattcctcaggctgtactctactaactgagcaagggccaaaagccatgaaaatgagggttgtagctggtgttcctgtttccttacctstaaattgaaaagaacacttactttgtggagtctttggaaggattagatatgatatactcaaatctgctagcacagtgtttggtacccagtgggtgctccataaatggtttcctaaatcaaaactacaagatatccagtataagactctgccaacctgatctcttgtcttctcaattccaggcatcttcatggcttgagcacacggcctctgagttacagctgactcctgtgaacttgaagtccaaacattagaacaatctttgaggctttctgtttttttccagaggacatatggaaagcctgtgaacttttctgtttcttttagctggaaccttgtgcccctgagcaccagtttgctccaggtgtctgtgaaagactccaagggaaattgttcctaagaacaactatttgcttcactgcgttcatgcctgcaaatgttttgtgcaccc

SEQ ID NO: 719083 - DNA, 940 bp, Homo sapiens
catttttatcattgtacattggcaagtcactttatcttccataacttcaaaggttcccctttcctcgtttttaaggaatggtgagcagattaagtgagaagccctttgaaaaccgccatgtctgtggtaatcattgcttagagagagagccagggcaggccttgacatttgttccatccaccccagatggcattttaatctctttgctctcctgctgttacatggagaagaaaagactggtccacatgcaggaccagaggcctgagtggatgtgtcagctctgctctgtgtccctgggcaaattaatttacatttctggctttggatctcttttcaccattatcctcaaaaggtagacatgagctctaatatccctttcagttctaacaccttgcaaaaccaagattcctcaggctgtactctactaactgagcaagggccaaaagccatgaaaatgagggttgtagctggtgttcctgtttccttacctgtaaattgaaaagaacacttactttgtggagtctttggaaggattagatatgatatactcaaatctgctagcacagtgtttggtacmcagtgggtgctccataaatggtttcctaaatcaaaactacaagatatccagtataagactctgccaacctgatctcttgtcttctcaattccaggcatcttcatggcttgagcacacggcctctgagttacagctgactcctgtgaacttgaagtccaaacattagaacaatctttgaggctttctgtttttttccagaggacatatggaaagcctgtgaacttttctgtttcttttagctggaaccttgtgcccctgagcaccagtttgctccaggtgtctgtgaaagactccaagggaaattgttcctaagaacaactatttgcttcactgcgttcatgcctgcaaatgttttgtgcaccc

SEQ ID NO: 719084 - DNA, 605 bp, Homo sapiens
tcagaaagaagttaatgaatgcagtttggaatatgttcagtttaggatgactctgaaatatccaagtgaaaaaatttagtcactagttaatatgcgcttgcagttcaaaacaaggaatgagatggaaatataagaactttttttcattagatgtaaaactcttgctaaagacatattcattactcttctaatgaatatactcagrtaatgtactcagtgatacattccttttcaaaattaatattaggaaaaatgtctctcaaataatcaggacacatacttcaatcagaaaaagaatattatgtacgtcatcatgtttacttttttgtcctgcctgccaggaagctcagtttatatttcatgctcagttgcagtaactacaccaagccttagaacataacacattggctttctcgctattgttctagttttatcttcttatttgcagtgtaacatcccattgcatgtcccgtatattgaaagctgcctctacttctctctggtaataaaaagtatgtatgttttcacttgatattattaagttaaggttgagccctatttatttcaaatatttttaaggctcccaaaaagcagctttttttttt

SEQ ID NO: 719085 - DNA, 2024 bp, Homo sapiens
gtaggaaaaggctttataaattgtgatacattcatatgaagggatattatatcaaatttaaagtgagtgaactgaaactaacgtatcaatattgatacatctaaaataataatgttgaatacaaaagcaatttttagaataatcaatattattcatgcaaattttagtaacatgaagtaatactatatattgtgttgtacacatacttacggagtaaatctaccaaacatggacaggacagacgcatacatctttgagacggtagctattctggggaggaaggaaaagggctggaaggaggcaagcgacaaaggatacagttatttttggatttcgcttctttaaaaagctgaaccaggtataaggaaatgttaacattctcaaaaaatcatggtggtgggaatgtgaatgtaagggtcagtataagttaggttttgctgcaataacagaaaccccaaatctcaatggcttaaaagagcaaagatttctttttttatttcatacattgtaggttggcagaaggtgctgcttgttgttgccactcagggaccaaggctgacagagcagtcaccacctccttgctggcagctgcaccagaaggaaagagagagcaattacatgctccagattggaagtgacacacgctgtctcctttcacagctaagtggcccagactagcacctggatttaccttgctcaagggccaggagtgcaattctaccatgttcccagaaatggaaagaactggaaatatttagctaacagcgtgaaacttcactacgatggatgtttgttacagtacttgtcatccttttttacatgtttggattatgcttcatattttacacaatgggaagaaaagccctggtttttaaatcaggaagggtgagttttagtctgagaaacagaaggtgaaagagtcagtgggtggtggacagcagtggacagaggctgtcagtcccatatatctgcctattcccaggcctgtctccatgactgtaatatccacaatgatgctgcaattatcccttctccagaaatgcatgtccatgtaaatgaccccaagcaggttgaccttctttgcttttgtttctatccactgaggctgagtaggcaataggaaccctgatacaaagagatgtggtatgcaggtcacggattataaggtccaaagacttcactaagtcagtcccagctctgccactcacacttcctgtcaccttgggcaaattgccatagtgcccatgtctattttcctcctctgtaaaatgggcataacaataacactaagtctctgaatagttgtgataaacaaatgaagtatgtaaagtgttttgtaactgtaacgtgctgtacagaaggtcactgttactaaagacccaaatttcactgcaagggaagcctcagtccagatttacatttctggccgacaatgactcacacaacttccttcaccagagccacctggttgacaaaatagacccaggcatcattctgtggtccaactacttgaagaatctattgatttccccttgcgaaagtgagtctgggagcggggattaagcattactgcagattccccaggggagaataaagggagaggctatkattcctgtgaacacggcctgaatggggagatgctctaggcctggactgaagcctgggtctctgggacccatggaatattggagctggaagagcacacaagggaaacagtgatctttcccatcatttttgaaatgaagaaacttaggccaggagggccaaaaaggatggcccttctcaaacagcaagagaaagataatcaagagatctgagatttatcccgggatcttctattaactcagggcaagcccctttttaccaaatgcctgtttcctcacaggcaattcagggattgaacctgacctccatggtgatttctaatgcctgttaccttaagtgacactcagttctattacatgtaaaatgcagtagagttctcctgaaaagtgagctttctggtccaggtattgactttgtag

SEQ ID NO: 719086 - DNA, 1023 bp, Homo sapiens
ggtaatcctttctataataaaatatagaaactgactgaactatatagcctgtaaatctaggtacttggacctcacacaatttgttaatttgccactttcgagggttggtcaaaatcccaatcaaattatttgtatctctgattctacctgtgcctacaccctgttctactcttcaggtatataagctcagaaattacttcccattattaagcttgtttcagatggtttattccagggccagcaggaaattactaaccaatataaacatcattaaaacagataagagatcaggatgattagcatgttgagaaacatgtaaattttcacatgccctggattattaatgagggcgatgactaaaacagttgaagaagatacatacgtctactacaaataagtaaataatccatggattcccattaatttatagtcttcttctatcactagtcaatattcttgaatatggctcagcctctgaagattactaagtctcttcaggagaaaatagccacctaggcataaaatcagctatggaaaaaaatcattattattattatgatttttttttttggacagggtgtggctctgtcacccaggctgaagtcccatggcacacaatctcaactcacggcagcctctgcctacaaggttcaaatgatcctcccacctcagcctcccaggtagctgagactacaggcgtacaccaccacacctggctaatttttgtatttattgaggagatgggattttgccctgtttctcaggctagtctcaaaactcctgggctcaagagatccacctgcctcagcctcccaaagtattgggatcacagacatgagccaccatttctagccgaaaatatatcattcttatattattctcactggagcatcagattttgttatccacgtcctccttgaaactttctcctttgtctactatgatttcacttccacttgattctacgccctctgcagaattttaatttcaaactctctgtgaagtyccagttttctctttccc

SEQ ID NO: 719087 - DNA, 630 bp, Homo sapiens
caggcaaggtggagcgcacctgtagtctcagctactcaggaggttgaggtgggaggatcacttgagctcgggaggttgaagctgaagtgagtcaagatggcatcactgcactccagcctggatgacagtgagaccttgttgcaaaaataaataaataactaagtaaatagattgagctctagctctacacttatgatttcggaccttttctgtacatatattataacttttaaaaagcttacttaaaatgattaataggagtctcattctgcctgccttcaaaaagccccatgatatttaataaattcttgactttccttgccagtgattcaatctctcagaagttgaaagatgcaatgaaggacagttactctccactgaccagtttgctctccactgaccaaaactgaggaactgggaagaaagatgagaaattgacagcaatgtcatatacaagggaccatcatattatagtataggaagaaaatgtttgttgaagtgcyaacatctaatttaggttttaagaaaatagaattcaaaaaagtttggagaaaaaatagctgtgaccatgtagtctgatttcaaaaagaccgagtgacttaagaggaatggcaggttctaaacagaaat

SEQ ID NO: 719088 - DNA, 566 bp, Homo sapiens
ggacagtagaattgcaatgcaaaaaagatttgacaggctgaaacaatggaccagatctaacaagattatgtttaatggggataaatgtaaagtcttaacatttggttaaaataaacaggcaaataagatggaataagcagcagatgggaaagatgtggtttgataggagcctgtgtgaaaataatagagatgtttcagctgattataagcccagaatgaatcaytagtgcactgtaagctcaggctataatagaaatgtggagtatactataaggaaggcagcaatcctttcatagtctaaaataacggctcatatttacagagtgagttctgtatggcaaatatatttatatggattctctcagttattctcacttctggcctttgagtaggaaactggagctcagagagattaagttacctgtccaaagtcacattactagagccaggatatggacacaggtgttctgactgcacacagatgctccgtcctggagggcagagccattgccaatgaggtgaagagacaaagaggtacatttgggttccaacaagactgaactttc

SEQ ID NO: 719089 - DNA, 566 bp, Homo sapiens
ggacagtagaattgcaatgcaaaaaagatttgacaggctgaaacaatggaccagatctaacaagattatgtttaatggggataaatgtaaagtcttaacatttggttaaaataaacaggcaaataagatggaataagcagcagatgggaaagatgtggtttgataggagcctgtgtgaaaataatagagatgtttcagctgattataagcccagaatgaatcactagtgcactgtaagctcaggctataatagaaatgtggagtatactataaggaaggcagcaatccttycatagtctaaaataacggctcatatttacagagtgagttctgtatggcaaatatatttatatggattctctcagttattctcacttctggcctttgagtaggaaactggagctcagagagattaagttacctgtccaaagtcacattactagagccaggatatggacacaggtgttctgactgcacacagatgctccgtcctggagggcagagccattgccaatgaggtgaagagacaaagaggtacatttgggttccaacaagactgaactttc

SEQ ID NO: 719090 - DNA, 2339 bp, Homo sapiens
  misc_feature 1628, 1629, 1630, 1631, 1632, 1633, 1634, 1635, 1636, 1637,1638, 1639, 1640, 1641, 1642, 1643, 1644, 1645, 1646, 1647,1648, 1649, 1650, 1651, 1652, 1653, 1654, 1655, 1656, 1657,1658, 1659, 1660, 1661, 1662, 1663, 1664, 1665, 1666: n = A,T,C or G
  misc_feature 1667, 1668, 1669, 1670, 1671, 1672, 1673, 1674, 1675, 1676,1677, 1678, 1679, 1680, 1681, 1682, 1683, 1684, 1685, 1686,1687, 1688, 1689, 1690, 1691, 1692, 1693, 1694, 1695, 1696,1697, 1698, 1699, 1700, 1701, 1702, 1703, 1704, 1705: n = A,T,C or G
  misc_feature 1706, 1707, 1708, 1709, 1710, 1711, 1712, 1713, 1714, 1715,1716, 1717, 1718, 1719, 1720, 1721, 1722, 1723, 1724, 1725,1726, 1727: n = A,T,C or G
gaaccaatccaaatgtccatcaatgatagatggattaagaaaatgtggcacatatacaccatggaatacagccataaaaaaggatgagttcatttcctttgtagggatatggatgaagctggaaaccatcattctcagcaaagtattgcaaggacagaaaaccaaacaccacatgttctcactcataggtgggaattgaacaatgagaacacttggacatagagtggggaacatcacacaccagggcctgttgtggggttaggggaggagggagggatagcgttaggagatatacctaatgtaaatgacgagttaatgggtgcagcacaccaacatggcacatgtatacatatgtaacaactgtgcatgttgtgcacatgtaccctggaacttaaagtataataataaaaaataaaataaaataaaataaaataaaataaaataaaataaaaataaataaaatccaattgttgatgagaagagaaaaaaataattgtgccatgaaaaagtagttttgtgtatttaacattatcagcatcgtgaactcgtatagactgtttacatattgatttttatatattcagagttctagctactctgaatatattaaaaatgtatttatttggtagaatagcagcttgttcagttgcatttataaagtatgtatgcaccacaagaaaatccaagtacatatatttcagctccataagtttcttaaatttactataaaaataatggtttataccatgcctgttgtccttcaccaaatttgtatttctcttatcacaaaataattccttgtacaaagttgaacttttaaactaaatttgcaatagcaatcacaatgatgccaaccaaatgaacttccaaaaaaagtttactttggttccatgaattatatattttttaaaaagggaacattattggaattggtttctattatttaaagcatctgataataccagcataaactggtatcatttgactcagaatttttcttctattaatggagccaatatattaagaattttcacttcacttggtaagttcactagaaaacttggaaatgaagatgagcagagtagttatttgctgtaatacaaagtcatgtttcatggagtaataaggaaatgcactttctgcatctgtacaaattaaattgttacacagttttcttataaatattaaattttgtaatagatttttcagcagacttttcatttggttagtgatatcattttatgcaagttatccaatcaccatctactttctcaagaaacaattcactacttaattcttcattgaacataggtttttgactatttaaactcatggctgctgaaagcattttttgctaaataaaagagcaccatcaaacaatgaaactaagtaaataattgtagacttataccctctaataaatggcaaacccactgtagtaaatattgagatttctctttttatgctttacagaaagaccacccaactgctacttcctgctcattatttcatgtacatttaacctttactgaccatgatggtttcctgtgtctcatagactggcataactggctggcacatcagatagagaagtttcaaatacttctcccaccactgcccaaaacttnnnnnnnnnnnnnnnnnnnnnnnnnnnnnnnnnnnnnnnnnnnnnnnnnnnnnnnnnnnnnnnnnnnnnnnnnnnnnnnnnnnnnnnnnnnnnnnnnnnnacagataattaaaggaattctcagtcctcaaggggttgaaggattcaacaacatggatttcaaccgtggtattatcaagtaactcaagatgtaataatctcaagaacataaatttaaaacttgaatataaaacaagacataagcactccagtgaagtcaatcttttttctcattttgattaaaagtatgacctggggccaggtgtggtggctcaagcctgtaatcccagcactttgggaggctgaggcgggcagatcatgargtcaagagatagagaccatcctggccaacatggtgaaaccccatctttactaaaaatacaaaaattagctgggcatggtggtgtgtgcctgtagtcccagctactcaggaggctgaggcagaagaattgcttgaacccggaatgtggaggttgcaatgagccaagattgtatcaccacactccagactggtgacagcgtgagactccatctccaaaaaaacaaaaacaaaaacaaaaacaaaaacaaaacaaacaaaaaaaaacagtgtgacctgggagttaaaattaaacatatgcttatatcagatccagttcatagcaaaaattcacaaatgggatctaattaaact

SEQ ID NO: 719091 - DNA, 599 bp, Homo sapiens
ggtctttggaggtggggagtgtcattccctctcatctaagccatctccttcccagccccacgtccaggactctgcctggatgctccttagccaactggttccatcaggcagtcgaagaatcatttaaagaagtaatagagcgccagggttgaaaacttctgagtggccagccctagyggatctacctcattccctggcaaggaacagcaatatagctcagcacacataggcccaaaacaagcatgttatgtcctggctctgaaactcccaaggacagaattcaaaggcccccatgccctctgctgactgtgaattaagcagatcacacattactgtggagaatactaggcaagacttacaaaagtgagtatcatgtatggccagcatcgttatgacctttggaagtttctgaaaacatctgctgtgtcagtgttcatatcagggaaaagtgcccaggagacagcccgaccacatgtccacgttaatgatgaccatgacaaccacaatttctcattcctagcctcacctgagccagtctttgttgacgctctgcatctccaggtgcaatcagggcctgcttggcctcttgaatgagcatg

SEQ ID NO: 719092 - DNA, 698 bp, Homo sapiens
aggatgaagactggagatgccaggacacatataacgcctgagaatcgctgaacagcttaccctagagctcatctcatgaaatttcacagatgaagcctggtgctgagacatatcttgcccacaaacacttccagaggtggcaagagagctagatctgagctttcctcactttgaggtcaaatattctttatagtgctctttgcrgtagagaactatgagccctttctgttagaacatataagatctacgtgaaaaatacgcaaatcagtgtctctctcgcactgaacttttgaaatgactgttttctacaggactgagctggaaggtctctcggcaccagtgagtgtagtctttaccagccactgcttcagctgagtcagcacctccacagcaggtggtcttttcctcactgagggtgaggctctgagatacaatagagtgtgaaaggcctcagatccataaaaccagatgggtttgcagtgctgcagacttgctaatatgtaaatatttagtaaatcacacagctgggatataaaactacgatctaatcaaggtaaatgacaaagctgccaatctatcatttatcccatggcacttctgagtacagctggcagaataaaagaattttaaactaagtgctttttatggcagaggagaagcccagaagagaaagcacaaaggtgaacaaagctaaggtg

SEQ ID NO: 719093 - DNA, 1706 bp, Homo sapiens
tagttttttgtttttgtttttttttaattatgaagcataagatacacacagagaaaacacgttatgtttagagttcagtgaattttctcaagtggaacaccccttggtaactctagccagattaagaaacagaatgttattgacacccagaagctttccttatgctctctccggtcttatctgctcttctaacaccctagattaggagggtcacctgtgtttgcacttggtactaatggaattgtacaggaggcacccatttgtgggtggcccgttttgttaaatatgatgtttgtgagatttatttgtatggctgggggtagttctcatctattccttctcattagattccattgtgttcatttcagaatgatgacagttatgcctgccttgcctccatcagtcattagggaatatccaggtaaaacttagaaaaagttaaaagtactgctttaaaatacaatacggtatgtttattgtttggaagagaatagatttaatctgagtaaaatgaaggcaaagatcccaaggattgtagtctcaaaagtgaggaggaaagtagtcccgctgcatagtctggtgcagggggtcacggggcgttgaagagcagggtgctgtttaaatctgtgtctctgcttcctgggagtggaaagttgactgtggagtcagttgtcctgtgagctacacatttaattctccacaacatctaactgggcccctctgcttgatggcaggggtctctttcatcagttcctatttattgtttatgaagtcaccagagattttcagtgttccggttgaaccaccttctttcactaagaggtgattactgtggttcagaaataatttgtgcttctcaattgggcagaatctccctgttttctcccatcaggccctggatggggatttctctgaagacaaccgcaataagtgtcgcatcgccaccgcacccttgattgaagctgtggagaacctgacagcgttcgcctcaaaccctgagtttgtcagcattcctgcccagatcagctccgaggtagggagtgtttacaggaacatcatactaaggtctttggctaactttgtgtggcaccaaatgagttactagttaaaactccaacagctctctctgtcaacatgtaggctactgttactcttgtcaatgatggcatgtgcacagttagtgaaacacaatgactacacctctgttgagagataacatatatgtagagaacaatcttactgcctaggtttggggcgattcttgggatgtgtcacactcaaaaaatgctatttaaggggcaaacatgggcttgagtccccgccatgcagacccctggtaatccagtcttcatggttccctgccctctttgtctccttcaaagggcagaggtggtgatttggcaaagaacaggacctttcagggcccacgtcattcactcatgtcttcgaccstgactttgatttctctgctgtttggtctcagggttcccaggcacaggaaccaatcctggtctcagccaagaccatgctggagagttcatcgtacctcattcgcactgcacgctctctggccatcaaccccaaagacccacccacctggtctgtactggctggacattcccatacagtgtccgactccatcaagagtctcatcacttctatcaggtcagtttcccatccggaggttgctgccagcctgcatctca

SEQ ID NO: 719094 - DNA, 759 bp, Homo sapiens
attgacagggtgttggatgagaacctaatgggccgggtatgagaattgtggatgtctgatgactagctgctggcttcatacatttgacctgtcattctctttaatgatacatatatttctgttcaaattgtgataaaataagtctatgttttcatgacattggttgaattggcaaagagggagaaagttggtagattactggatgtcatttttacactgggacagcaataatttaactggatacatgaaattcttggaaaactacacaacaatattccagtaagtcaaaaagggaagttggactgggaaaactcttggacttaataaatcgaagtcaaaatagcttcctattgcaaactttacagagccattatcaccatggatacacattgctaaggctcttccctgggcctgggaatagtcccatgaatgtgagggtttctgcattagcttcatgtaaagccatctctgctactgaaacaagcaactttctgcaataaggacaatgatgtgaaattctgagtgtctctatattagttcattctcacgctgctaaaaaaaagacatacctgagactgggtaatttataaagaaaaagaggtttaaatggacgcacacttccacayggctggggaggcctcacaatcacggcataaggcaaaggaggagcaaagtcacatcttacatgatgcagggccatcaggcaagagaacaatcagtgcccagcaaaagggaaaccccttataaaaccatcagatc

SEQ ID NO: 719095 - DNA, 621 bp, Homo sapiens
gtttagagaactgagaatagagaggggcattttacacagagtagaagcttttagaggaaagaatatgacataatttggaagtggtggatgtacagttgtgtgtcacaaaagggcgtgtttgtcaatgccagactgcttatatgacagtggtcccagaatataatgccacattttactataccttttctatgtttagatacacaaataccataaaacctagataattctttaaccaccgtctttacccaaaacacagaatagcatttctccaaatgtgtgtaggggtatataagaggctaattycaatggaaaaaaaaaagttctattttcaaaaattgttgggaaaccatgtgtggcaatcacctattcaccccattggtggaagagggactccccactttaaatagcacaaaaggcggccaaacacagaacacttaacactgggcagatgggctgcacatcagtttattagtcatacatgctcacagccagggcaggaaggcatcacacactgtgatgggccacatgagagctgcactcaggggcagaggaagccagaggggctgtgggaagcagagccatgtataccaggagggtgaggtgacccctggttcccatggg

SEQ ID NO: 719096 - DNA, 903 bp, Homo sapiens
atgagtgttaatgactacctggaagtgaaagagtactagcctagatatagcagtatggaggcaggaaaacattctgcacccactgtactgtggttcaagtggataaggcaagtgaatgggaagggatttcctgaaaaccataacgtggttggggagttggcttacatcgacagctccagaatgaaactggaaagatgtgagaggaatgggagttcgaacrtgtaaacccaggacagtgcagtaggtgggggatgagggtctggaaaggatgggggtgagtgggtgggtgagaagcccaagaagtggctgactttagataccttaactgtaagcccaggattctttggggacaggaatgactcaaggtctcaggctgtttctggcctgatactaaaagaagggtgagatggtatgaaatttacggagggtttctgtggtcagttatgggatgactgtttcagggagcttgggccacccaaagagcaaagcttctggggaataagagtctgaggtgtgtccatgtagctgcttcttaaacatccctccacacataggaagttcccacaaaagacacttgccgtgattgtccattacataccaaggtggaatcttcccaaaacaaagacacttatttttaatacaatccccattagaattgttcatgctcagggaacagttatgaaacaaaattgagatatagcataaattttggcaaaataatgttttaaaaattattttacccatcaaaattattatatatatatagtaattatagaaatgtatttaaaaatgatctctatttagagatgtttaccatgtatatattcaatttggaggtttcagatcaatcatatgctctttaaaattaagtgaccataaaactaactttatggcaccctgggc

SEQ ID NO: 719097 - DNA, 903 bp, Homo sapiens
atgagtgttaatgactacctggaagtgaaagagtactagcctagatatagcagtatggaggcaggaaaacattctgcacccactgtactgtggttcaagtggataaggcaagtgaatgggaagggatttcctgaaaaccataacgtggttggggagttggcttacatcgacagctccagaatgaaactggaaagatgtgagaggaatgggagttcgaacatgtaaacccaggacagtgcagtaggtgggggatgagggtctggaaaggatgggggtgagtgggtgggtgagaagcccaagaagtggctgactttagataccttaactgtaagcccaggattctttggggacaggaatgactcaaggtctcaggctgtttctggcctgatactaaaagaagggtgagatggtatgaaatttacggagggtttctgtggtcagttatgggatgactgyttcagggagcttgggccacccaaagagcaaagcttctggggaataagagtctgaggtgtgtccatgtagctgcttcttaaacatccctccacacataggaagttcccacaaaagacacttgccgtgattgtccattacataccaaggtggaatcttcccaaaacaaagacacttatttttaatacaatccccattagaattgttcatgctcagggaacagttatgaaacaaaattgagatatagcataaattttggcaaaataatgttttaaaaattattttacccatcaaaattattatatatatatagtaattatagaaatgtatttaaaaatgatctctatttagagatgtttaccatgtatatattcaatttggaggtttcagatcaatcatatgctctttaaaattaagtgaccataaaactaactttatggcaccctgggc

SEQ ID NO: 719098 - DNA, 620 bp, Homo sapiens
gacaggtttcactatgttggccaagctggtcttgaaatcctgacctcaagtgatccacctgccttggacttccagagtgctgggattacaggtgtgagccaccatgcccaaccctagttacatttttgaggaagcagtaatggatatttgttgcacctgtcccccaaagtgcatgccaatgggaatgaaaggataaacgtagaggggaaccactctgcaagaaagtttagtataaggcttctttcctgtctgagtttcccctcctgttcttatctgaaaacccagtcaaaataactggttgcttctatcagccttcccagagaacgcattcatttaaaaaatggattgaccgcaggatgtgtaacattgrtgacactagaacattgtcatattgtgcaaagacacttaataagtatcatttcatgattggttaatgactcgtagatggctgttaacacgtcaccattaccatctttatcacattttattttagtgcatccaactggtttaccacattctcatcaaatgccctgtaactgaatttaacatagttgaatgtattatcaaaaatatttctaaattattctcttttttggcattaagtagtgagctgtgattca

SEQ ID NO: 719099 - DNA, 2589 bp, Homo sapiens
gttctgagctctatctctttgggccccagttcctcatctgtaaaatggggataatgacacaaagcttgccgggttgctgtcaggattagataacgtgtatgctttggcgcatgggaagtcacttgggacatgtgactaagtgactgagtctcagtaactaaggctaatggttctggagactaggttttagacttcagaattgtttttaatgatgaccctgaagttagctgcttagcacgataattctggttagatttttaggaggggcaccaccagcgagcgaccagcttctctgtgccagtcccagttcacctggattacagcacagtgcaccatgcagaaggtcaaggaatagcctgtgcatcagtcaggaaacagacagcacactccaattaggacagatcaagaatgtcatagaggaactatttatggcagtatggcagggtatagggaagccacaaagaatgttgtacaaccctggagctaataacagagaaacttctttacctttcctagccctgaaggaatggggaaggagtggtaactggaaccagaaaaagacaaggctgtatggaaagtcccccttacagcagcagagacctgcaggtgagggatccagccagcctgcagtaaccagaaagagcaggagctgcaggaataaataccccaatttctcttttctcttctcctctagtcttctgatcatatttcccattgactagagggaaagaaagcccactgatgtagtctatacaagttaggcaccagggatagagagccaagtctagagagatggatagaaggccaagtatagagtagtgaagaggcatgggtcagctggcatattggcgtgtgaccttgtttctgcctttagtttgttggagatgggagcaataatttagcacagagaaaaagagtcagtatactgcactgatatactctcagtgcaaaccaggggctgttgcagactgaggaagggctgtgggtaggagaaggcaggtgaacccacccgggtccaaaacagaccaactgataaaaaggagagtccacattaatgaatagattctgccttttggaggaggtgaggttggagttgaggagctggatggtctatctgcagttctgagtggtcttaaacatacaggttgcctgagttcaaattctaactcttctagctgtgcagcttttggagagttacttaaactctctgttcctcagtttcttcatttgtaaaatggaaatcatgctattaccagcctgatggggtagtgctgctgattaaatgagttaaaacattcaaagcacttagaataatatctagtacatattaaatactcactaaatcttagctgcttttattgttattattatcggaaagagtactgaatgaagaatcttcaaacttctataccagtattcattctgccatgacttgcttcatgaccttgggcaagttactttccctctttggctttgtttcctcttctctaaggttaagaggtgggatctgacacattttggctagaaaattctacattctgcaagtcccaagtccattacagattttgcaaaagcccccaaaggcaaagtgtgtttccagggcctctctggcttctgccaaagagagctccggtttcttctgttagcattggctggaggagttcccaataagggaccagtaaggctcctccctacaggtgtctcaggggctgtgctaatctctttttgatggcctccatctgcagtggatcccctggaagcactggctgccagtgggaggggcaagccctttgctgctggtccttggggcaaatcactcatctctgatggtctctcccttggggcctgaagcctgagagttgggataggaggtcccctgagtggctgggggaggtgcagataggcttggaggccattacaccaaccctggctgggaaggatggcctgattccatgtaaggctctgatatcccatcttgggatttttaactgccaatatgatctcaaatggcttaaactcaggaaatttgccttccaattcttttttcctgcttcctcattgtgtttcttctattctcttctcttgataaaatgtgagcccctcagcacagcccatgcattttggctcctagctgcctctaagctctccttgttgccattgaagtcctttgtttttgagcyccagttactctggggtctcagttccttggttataccaagtgttttgtatttctggaacttagcacatgcctggaacacctctcctttctatttcccttagctaattcctctcacccttaaatctccgggatgtcatttcctcctcagagccttccctgacacctgaggttacaagtgatgataggtattgagcatgttgcctatgaccggcttctctatgagaccctgagggcaggggctgtttctgccctaatcaagctggattccccaagcctaggacagtgtctgattctcagaatctataattaatggaaacgtctccatccattactctttcttgtctttcttcttacttttctttcaaaaatgtaaatttgctgatgttgctcacccatttaagattgtctga

SEQ ID NO: 719100 - DNA, 599 bp, Homo sapiens
tcaaatgaaatcctatggtgcttaccagagtacctcctctttaatggctcctgatctccaattcttgtcatctcagccctgtaagctctcttcagctttwgggcttctcagttgctgattaggaatcagcaaaaacattaaaggaaaagcaataccaaatgatgggttcacctctctgtacttcctttctctttgggattggtcctttgagttcacgttttcttagaaactttccagtgccttcaaactggtatttcctgtattcttcccagcttttctagttgttctcagtaggagggatggtcttaagcaagctgatctgtattgctggctcacagtggccaggggagtagaaagagctcaaagagaagtgactggttgggtcccaggacttctagtctcagaaaatccctcagtctctagcagggcagggcagaggagccccagaaccacctttcctcaaagtactttagcctatgcaagcttagactgttgtcctttcactgttaaccagtattaaccagttaaccagttcttctgcagacaaaagcatcaggaagtacccaccatgtaccagtgggcccttcttgatgctcttg

SEQ ID NO: 719101 - DNA, 599 bp, Homo sapiens
tcaaatgaaatcctatggtgcttaccagagtacctcctctttaatggctcctgatctccaattcttgtcatctcagccctgtaagctctcttcagcttttgggcttctcagttgctgattaggaatcagcaaaaacattaaaggaaaagcaataccaaatgatgggttcacctctctgkacttcctttctctttgggattggtcctttgagttcacgttttcttagaaactttccagtgccttcaaactggtatttcctgtattcttcccagcttttctagttgttctcagtaggagggatggtcttaagcaagctgatctgtattgctggctcacagtggccaggggagtagaaagagctcaaagagaagtgactggttgggtcccaggacttctagtctcagaaaatccctcagtctctagcagggcagggcagaggagccccagaaccacctttcctcaaagtactttagcctatgcaagcttagactgttgtcctttcactgttaaccagtattaaccagttaaccagttcttctgcagacaaaagcatcaggaagtacccaccatgtaccagtgggcccttcttgatgctcttg

SEQ ID NO: 719102 - DNA, 599 bp, Homo sapiens
tcaaatgaaatcctatggtgcttaccagagtacctcctctttaatggctcctgatctccaattcttgtcatctcagccctgtaagctctcttcagcttttgggcttctcagttgctgattaggaatcagcaaaaacattaaaggaaaagcaataccaaatgatgggttcacctctctgtacttcctttctctttgggattggtcctttgagttcacgttwtcttagaaactttccagtgccttcaaactggtatttcctgtattcttcccagcttttctagttgttctcagtaggagggatggtcttaagcaagctgatctgtattgctggctcacagtggccaggggagtagaaagagctcaaagagaagtgactggttgggtcccaggacttctagtctcagaaaatccctcagtctctagcagggcagggcagaggagccccagaaccacctttcctcaaagtactttagcctatgcaagcttagactgttgtcctttcactgttaaccagtattaaccagttaaccagttcttctgcagacaaaagcatcaggaagtacccaccatgtaccagtgggcccttcttgatgctcttg

SEQ ID NO: 719103 - DNA, 997 bp, Homo sapiens
taaagggtcctgtcatttgcaacagaatggataaacctggagagcattacgttaagtgagaaaagccaagcacataaagacaaatagctcatgacttcacttacatgtggagcgtaaaaagtcaaattcacagaaaaagagagtaacgtgttgattaccagaggctaggatagtagtggtggtgtggtggggaggcagctggggagatacttgtcaaaggatgaaaaattccagttggatagaaggaatgaattaaagaaatatattgtagaacacggtgaccatagttaatagcaatgtcttgtgttcttgaaaaatgtggaaaaaagcccactaaaggtatataaaagcatttgttcttcagtgtcctccctagccataaacttgtaaacttgcatagtaagtgactattgtaagtgtgtccccataaagggacacaaagtgtgtagggatgtgtgtgtgtgtgtctgtgtgtgttcaggggataagagattgggaaataggcaaagaaaattcgaaaaatggaaaaaaaagatctagagatcagtctgcagctaccttgtataactgtgccattgaagaaactaccccaaattccctttttacaatacagtaaattttatttaataaaagtttgatgaatcaacaataaacaaataaaataatatggctattattaatatgttgaagagaatatgagatgaaaatagagatgagagatgaaaagatgcagatagaaaaaactagaaatattagaagtaaatacatatgtctaaaattaatattcaatagaattataaaagcatgaaatactctacctgaagttaacagctaatagtttgggattgacggaatgttagatccagtagacgatcggattacttgcttgaatatgagttaataaaaaatatttaaagagaagaaacataattggaaggtacaacacgtaagataaaaaccatagtgaaaagttctagcatrcatgttattttcaccc

SEQ ID NO: 719104 - DNA, 1070 bp, Homo sapiens
ttttcatggtggaaacactgtatacccactctcttagtatttttaagagtacagtatatatggttttctacagagataggaaagccacaatgtcatacaggaaaaagcaaattttgtacaaagagaaataattacaatatactatatttctctcatgagttccttaaattatattttatggttgaaagaaaaattataacaacattagttggtataaaaaaactatacattgtgatgtaataaaaatgctatacataagttagaatccttaaaaatcttaaagaaaacatcagaaaatcaataaatgaaaagcagagaaataaaagacagaagaaacaaacacaaaacaaattaaaaagtcgacaaattgtagcatattaatgattaccttaaaagtaaatgatgcaataatatatgcaaattgaaagacagagattggacactggataaaaatacataattgaactataaactgtctatgagaaactcacataaagtaacaaaacaagtaggttgaaagtaaaactacagaagaagtcatagcatgttatgtcaacaaaaaggagaagtatcaataacaacaaacatagaagggtgatcaatgcacaggctttacttcccaacagtttcaccagatagccataaatgggtattttattccatttacacaggttacaaataatataatgaaaatactgtcatttaaatcttacatatttgataacaatatcagaaaaatttccaacatagatatatctttatcatataataggttatgttgaccactttagcttattcccccagccttaaggtatagtttacacmcacacacacacacacacacacacatatacatatatttatagtatgcaatgtgatgcttttatataggtataaactgtgaagttatcaaacaaaatgaatttacatatccatcacctcacataattatcttttattgtgattacatttaagattcactctcttagcaatttccaagtgtaaatgaacaattaaaagaaaaaaattaaagaaaacacctacagctagattaaatacaggttgaaagc

SEQ ID NO: 719105 - DNA, 1070 bp, Homo sapiens
ttttcatggtggaaacactgtatacccactctcttagtatttttaagagtacagtatatatggttttctacagagataggaaagccacaatgtcatacaggaaaaagcaaattttgtacaaagagaaataattacaatatactatatttctctcatgagttccttaaattatattttatggttgaaagaaaaattataacaacattagttggtataaaaaaactatacattgtgatgtaataaaaatgctatacataagttagaatccttaaaaatcttaaagaaaacatcagaaaatcaataaatgaaaagcagagaaataaaagacagaagaaacaaacacaaaacaaattaaaaagtcgacaaattgtagcatattaatgattaccttaaaagtaaatgatgcaataatatatgcaaattgaaagacagagattggacactggataaaaatacataattgaactataaactgtctatgagaaactcacataaagtaacaaaacaagtaggttgaaagtaaaactacagaagaagtcatagcatgttatgtcaacaaaaaggagaagtatcaataacaacaaacatagaagggtgatcaatgcacaggctttacttcccaacagtttcaccagatagccataaatgggtattttattccatttacacaggttacaaataatataatgaaaatactgtcatttaaatcttacatatttgataacaatatcagaaaaatttccaacatagatatatctttatcatataataggttatgttgaccactttagcttattcccccagccttaaggtatagtttacacccacacacacacacacacacacacatayacatatatttatagtatgcaatgtgatgcttttatataggtataaactgtgaagttatcaaacaaaatgaatttacatatccatcacctcacataattatcttttattgtgattacatttaagattcactctcttagcaatttccaagtgtaaatgaacaattaaaagaaaaaaattaaagaaaacacctacagctagattaaatacaggttgaaagc

SEQ ID NO: 719106 - DNA, 856 bp, Homo sapiens
gactgaaaattggcgttgagtgttatagtgaaaattttccagtttgataattgatggtcagagccagcactggaatttgaaaacaaataaggtgattatctattttaggtaccgtatcacattttctatagcatgcacacttgttgctaccctcattttgtaaccaatttatttgccttatgaatgtgattgcagctttgaacattctgtactrtaatggttgctaagaagaataagtccttctgttttctctttaacatttaaaatatctcaatgcacatgatataattaaacactaataataccatgactgcatagctaatattagctgctattgcatgctcctagatgctagaacttattgggcatgtggtatactgaagcaatacccgttagacaaggatattttacttcttccagacaccagaagaaatggccttcaattatttgaaaagagacacagagacacctctggctacctagagttcttcctgtcttgacccaatttatgagaaagctcccagttgggactttatctcacaagtggaatcacagtcaagacggatcaataatatggtttggctcagcaaagccagctgtgctcttttagggtttaaacaagccacacgttagaaagcaacactgtttttatgtagttcatatatattaccatgacatttaacatcaatatcgtatatgttgaaggaggtataataaactcagtcatatatagtgaacagttcaaatgggaaagtgttctaaaacatattatttgagatttgtcatattcatctttggtttactaaatttacttagaaatatttgaaatgcaaaattgtgtgaaatcaccttatca

SEQ ID NO: 719107 - DNA, 856 bp, Homo sapiens
gactgaaaattggcgttgagtgttatagtgaaaattttccagtttgataattgatggtcagagccagcactggaatttgaaaacaaataaggtgattatctattttaggtaccgtatcacattttctatagcatgcacacttgttgctaccctcattttgtaaccaatttatttgccttatgaatgtgattgcagctttgaacattctgtactataatggttgctaagaagaataagtccttctgttttctctttaacatttaaaatatctcaatgcacatgatataattaaacactaataataccatgactgcatagctaatattagctgctattgcatgctcctagatgctagaacttattgggcatgtggtatactgaagcaatacccgttagacaaggatattttacttcttccagacaccagaagaaatggccttcaattatttgaaaagagacacagagacacctctggctacctagagttcttcctgtcttgacccaatttatgagaaagctcccagttgggactttatctcacaagtggaatcacagtcaagacggatcaataatatggtttggctcagcaaagccagctgtgctcttttagggtttaaacaagccacacgttagaaagcaacactgtttttatgtagttcatatatattaccatgacatttaacatcaatatygtatatgttgaaggaggtataataaactcagtcatatatagtgaacagttcaaatgggaaagtgttctaaaacatattatttgagatttgtcatattcatctttggtttactaaatttacttagaaatatttgaaatgcaaaattgtgtgaaatcaccttatca

SEQ ID NO: 719108 - DNA, 1463 bp, Homo sapiens
tcttaaccttgacactaagaaaggacaagatggcacaagaaaaataaaccaagtgggctttacttatgatgcaaaactcttaaataaaatactaccaaatagaatcctacagtctatctttaaaaggataatatattgtaaccaaayagggtttatcagaggaatgcaaagatgattcaacttttaaaaatatatcaaatgtaacctactacatcaacagctaaaaaaaaattcacttcatataaaagtcatactagaaatagatagaaatgtctctaacttataaacaatatatcagaaaactataacaaacaccatatttgatagtgaattattagaaacactagggtaacaatggggactattaaccaaatcagtgaccataggagaatgagtgggatgaggagggagagaggccagccgaatggagagttccaacacgtctgcaactctggaaagaagtaagcttggtgggaaagaatctgtgggtgacccataggcgagagtggaaggcaggaatcagatgagatcaattagggagagagagtagggtgagaagagaaccaagaagagaagccaggaacactatcttaaaggagccatgacactggggagccagagactgagtctggaagggagcagacagaggaacagaagcaaagggaaacctggagggaaatggcactgaggaggagggtgttcttcacagagtcaaagtagagggcaaggatttaggagtcacgatttgctactgagaggctactgttaaccttggccaaagctgtttctgtggagcagggagagctaagggccgtgctgggtgggtattcaatggtaaaatcagaagtagaaggagaaaatgagcacttccatcaggaaggggaagtgagctgtgtgtaggcaccatgagaaggaggtgaagttccaggggagttttatgaggttgtggtgaaatcagcatttttgtaagtctgaaggggagcaagcagtggagagcagagagactgacaagagacagcagaaagcagatgactgatggggcaagttcctgctgaaggtgggaggaaagagatgctcataaaagtgaattactgtttcaccgtggagaaaacataaatgaaatcatttacactgccattcacttattaattcagtaagtattgattaagtttctactatgtcccaggcactgacctggtgctggaaataagatagaaaaaattcccaccctatattatgtaagttcattaacttaaaacaaaaggaaaaccaaatccagaaacaaacaaaaatttggcccctgtcaggccagcgctaagggaggcatggtcttggaggaagtgtgtgtgactgccaggcactggagtccctcagcaggaatgctgctcgtctcaaaggcaacacaaagtggcagctgggaccagggatccagaatttgaataccctcccaccacattctatca

SEQ ID NO: 719109 - DNA, 1463 bp, Homo sapiens
tcttaaccttgacactaagaaaggacaagatggcacaagaaaaataaaccaagtgggctttacttatgatgcaaaactcttaaataaaatactaccaaatagaatcctacagtctatctttaaaaggataatatattgtaaccaaacagggtttatcagaggaatgcaaagatgattcaacttttaaaaatatatcaaatgtaacctactacatcaacagctaaaaaaaaattcacttcatataaaagtcatactagaaatagatagaaatgtctctaacttataaacaatatatcagaaaactataacaaacaccatatttgatagtgaattattagaaacactagggtaacaatggggactattaaccaaatcagtgaccataggagaatgagtgggatgaggagggagagaggccagccgaatggagagttccaacacgtctgcarctctggaaagaagtaagcttggtgggaaagaatctgtgggtgacccataggcgagagtggaaggcaggaatcagatgagatcaattagggagagagagtagggtgagaagagaaccaagaagagaagccaggaacactatcttaaaggagccatgacactggggagccagagactgagtctggaagggagcagacagaggaacagaagcaaagggaaacctggagggaaatggcactgaggaggagggtgttcttcacagagtcaaagtagagggcaaggatttaggagtcacgatttgctactgagaggctactgttaaccttggccaaagctgtttctgtggagcagggagagctaagggccgtgctgggtgggtattcaatggtaaaatcagaagtagaaggagaaaatgagcacttccatcaggaaggggaagtgagctgtgtgtaggcaccatgagaaggaggtgaagttccaggggagttttatgaggttgtggtgaaatcagcatttttgtaagtctgaaggggagcaagcagtggagagcagagagactgacaagagacagcagaaagcagatgactgatggggcaagttcctgctgaaggtgggaggaaagagatgctcataaaagtgaattactgtttcaccgtggagaaaacataaatgaaatcatttacactgccattcacttattaattcagtaagtattgattaagtttctactatgtcccaggcactgacctggtgctggaaataagatagaaaaaattcccaccctatattatgtaagttcattaacttaaaacaaaaggaaaaccaaatccagaaacaaacaaaaatttggcccctgtcaggccagcgctaagggaggcatggtcttggaggaagtgtgtgtgactgccaggcactggagtccctcagcaggaatgctgctcgtctcaaaggcaacacaaagtggcagctgggaccagggatccagaatttgaataccctcccaccacattctatca

SEQ ID NO: 719110 - DNA, 1021 bp, Homo sapiens
tattcccttcaaaaatgtctgaaattttgagaaattcatcagtacttgcaagtgagttggagttttagcagcaagctatgtattttawccagagtcaaattttaagtttttagcctgggacctgggaaacatagtgaaaccttgtctgtataaaaaataaaaaagaattaaccaggtgtggtggtgcatatctgtagtctcagctacttgggaggctgaggcaagaggattgcttgatcccaaaactttgaggctgcaatgagctgtgattgtgctactgcactccagcctgggtgactgagtaagactctggctaaaaaaaaaaaagaaaaaaaaatttttattttagttttttttccccaagaaacatatctttgaaatgtaatgaaaatagtgacaaaatggggataacattttaaaagtttctaaaatcattttttttccaagacggacttgctacctgttgcccaggctggtgtgcggtggcaatctcagctcactgaaacctctgcctcccaggttcaagcgattctcctgcctcagcctcccgggtagctggattacaggtgtatgccaccacgcccagctaatttttgtattttagtagagacagggtttcaccatgttggccaggctggtctcacactcctgacctcgtgattgcctgcctcggcctcccaaagtgctgggattacaggcatgagccactgtgcccggccagatatataaatttttaacaaaacccaaaaacatttggaatatcctggcattgggctgtgtttaaaaagtatattagactttacacatgtgtactgatgaaaatattttacttctgaattaatagaggaaattaaagttgttaagatccttttattacaattaaaatttgggggatttaaccacgatggtgatcaccgaattctcgctattaattcaatttaaaaaatttttatctctctcctgctcctttttattaaggaacattggttgatctagacctcaggttaagtacaagaacttc

SEQ ID NO: 719111 - DNA, 1021 bp, Homo sapiens
tattcccttcaaaaatgtctgaaattttgagaaattcatcagtacttgcaagtgagttggagttttagcagcaagctatgtattttatccagagtcaaattttaagtttttagcctgggacctgggaaacatagtgaaaccttgtctgtataaaaaataaaaaagaattaaccaggtgtggtggtgcatatctgtagtctcagctacttgggaggctgaggcaagaggattgcttgatcccaaaactttgaggctgcaatgagctgtgattgtgctactgcactccagcctggktgactgagtaagactctggctaaaaaaaaaaaagaaaaaaaaatttttattttagttttttttccccaagaaacatatctttgaaatgtaatgaaaatagtgacaaaatggggataacattttaaaagtttctaaaatcattttttttccaagacggacttgctacctgttgcccaggctggtgtgcggtggcaatctcagctcactgaaacctctgcctcccaggttcaagcgattctcctgcctcagcctcccgggtagctggattacaggtgtatgccaccacgcccagctaatttttgtattttagtagagacagggtttcaccatgttggccaggctggtctcacactcctgacctcgtgattgcctgcctcggcctcccaaagtgctgggattacaggcatgagccactgtgcccggccagatatataaatttttaacaaaacccaaaaacatttggaatatcctggcattgggctgtgtttaaaaagtatattagactttacacatgtgtactgatgaaaatattttacttctgaattaatagaggaaattaaagttgttaagatccttttattacaattaaaatttgggggatttaaccacgatggtgatcaccgaattctcgctattaattcaatttaaaaaatttttatctctctcctgctcctttttattaaggaacattggttgatctagacctcaggttaagtacaagaacttc

SEQ ID NO: 719112 - DNA, 891 bp, Homo sapiens
  misc_feature 313: n = A,T,C or G
ggactcctggagggggagggcgcagctacctgctgtggggcagcgactatacaggagagaggatttgaattagaaaagccccgatgccgcccatcctggcgagagatggggtttaacccaagggagggaagcaaccagagacaccaaagcaggtyccccagaagacaaatggtgatggagcccagaacatgcggaaggcagccagacagggggagcagagaacgcaggaatgcgattctcctccacagagttatggcgcctaatgagattggaatcgtaagtgcttttatttccttagctcttttctctgaanacttattctgcaaattgtgccttgtgtcatccatcctcccagatggctttttaagtgaggctgtttgttaagtgggagaagaacagggagattaatcaggaggagcgaacaggaagagctgctgcaaaccctggggaaggagacacaaccggaccagcaagtgcgatgagagtgtgcagagagagcccgtggtgggccggtggggttgggggggcggtccccagaagacatggagcacgtccttccaggatgagaccattgggcacagctgagtccacatgaccagggttccagtgacagtcactgacagatactgggctccagtgtgagccctgggtgagcacttcggagtcactggtcccaaacgtcctcccacatccccaagcagcaggtactatgactgtcctcagtcaccagaagagctcagagaggggcaggcacttgtccaaggtcacataggtggtgagaggctgactagggattggagcccagggctgccggactccagagccccagctcttgacagggatgtcacaacacacagctgcagactgacagtcagaacctctgggcttagg

SEQ ID NO: 719113 - DNA, 891 bp, Homo sapiens
  misc_feature 313: n = A,T,C or G
ggactcctggagggggagggcgcagctacctgctgtggggcagcgactatacaggagagaggatttgaattagaaaagccccgatgccgcccatcctggcgagagatggggtttaacccaagggagggaagcaaccagagacaccaaagcaggttccccagaagacaaatggtgatggagcccagaacatgsggaaggcagccagacagggggagcagagaacgcaggaatgcgattctcctccacagagttatggcgcctaatgagattggaatcgtaagtgcttttatttccttagctcttttctctgaanacttattctgcaaattgtgccttgtgtcatccatcctcccagatggctttttaagtgaggctgtttgttaagtgggagaagaacagggagattaatcaggaggagcgaacaggaagagctgctgcaaaccctggggaaggagacacaaccggaccagcaagtgcgatgagagtgtgcagagagagcccgtggtgggccggtggggttgggggggcggtccccagaagacatggagcacgtccttccaggatgagaccattgggcacagctgagtccacatgaccagggttccagtgacagtcactgacagatactgggctccagtgtgagccctgggtgagcacttcggagtcactggtcccaaacgtcctcccacatccccaagcagcaggtactatgactgtcctcagtcaccagaagagctcagagaggggcaggcacttgtccaaggtcacataggtggtgagaggctgactagggattggagcccagggctgccggactccagagccccagctcttgacagggatgtcacaacacacagctgcagactgacagtcagaacctctgggcttagg

SEQ ID NO: 719114 - DNA, 891 bp, Homo sapiens
  misc_feature 313: n = A,T,C or G
ggactcctggagggggagggcgcagctacctgctgtggggcagcgactatacaggagagaggatttgaattagaaaagccccgatgccgcccatcctggcgagagatggggtttaacccaagggagggaagcaaccagagacaccaaagcaggttccccagaagacaaatggtgatggagcccagaacatgcggaaggcagccagacagggggagcagagaacgcaggaatgcgattctcctccacagagttatggcgcctaatgagattggaatcgtaagtgcttttatttccttagctcttttctctgaanacttattctgcaaattgtgccttgtgtcatccatcctcccagatggctttttaagtgaggctgtttgttaagtgggagaagaacagggagattaatcaggagragcgaacaggaagagctgctgcaaaccctggggaaggagacacaaccggaccagcaagtgcgatgagagtgtgcagagagagcccgtggtgggccggtggggttgggggggcggtccccagaagacatggagcacgtccttccaggatgagaccattgggcacagctgagtccacatgaccagggttccagtgacagtcactgacagatactgggctccagtgtgagccctgggtgagcacttcggagtcactggtcccaaacgtcctcccacatccccaagcagcaggtactatgactgtcctcagtcaccagaagagctcagagaggggcaggcacttgtccaaggtcacataggtggtgagaggctgactagggattggagcccagggctgccggactccagagccccagctcttgacagggatgtcacaacacacagctgcagactgacagtcagaacctctgggcttagg

SEQ ID NO: 719115 - DNA, 1395 bp, Homo sapiens
tggaaccaacccaaatgtccatcaatgatagactggattaagaaaatgtggcacatatacaccatggaatactatgtagccataaaaaatgataagttcatgtcctttgtagggacatggatgaagctggaaaccatcattctcagcaaaccattgcaaggacagaaaaccaaacaccacatgttctcactcataggtgggaagtgaacaatgagaacacttggacacaggaaggggaacatcacacaccggggcctgtcgggggtggggtgaggtgggagggatagcattaggagatatacctaatgtaaatgacgagttaatgggtgcagcaccacaccaacatggcacatgtatacatatgtaacaaacctgcacattgtgtacatgtaccctaaaacttaaagtaaataataataataataaaaagatttaaaaaaatcttagagataaataaaacaattgtgtgtcttacctttagtgatatttcaggttaaatgaaaaatggtagtttccagcttacacagaacaaaattttgctactaacaccaatagtttggaaatattcaatatcttagaatttctttttgaaacataaattactttgttttaaactaatgccaacctttaaaaatttattatgtcaataaaaaagatctatttaatattttaaattttaattttaaattactgttaagctggtatttttattttttatgaaatttaaaaaaacactttcctacacagaacatagtaaattaggtaattcaacaactatttaacatagtagaaaatagattagagactgtttctaacttggaaggtcacataggctgtcattcaaatggctcattgtttggcatgggatttttaaagtaggatcacttcatagcagggaattatcacatgggtcaatttacctgtttctcttgtgatagctaaatgctttaacatcagtttgaaattttataaccaatcaatgtatttgaccaattttattttctggtttatgttttaagtaagccagtaatatgtttttaagtccttaaaaaagctctgatacctaaaaagttatttctttcattaaattgtcatttttcttgaattttcaaattgataaaaataataaaaataatttttaaataaaattaaacattttgcyacaaaattcactctgctagtaattccatatcagttgttacagtgagttttgattaataataactgaaggtcccaatagtagctttattcatacaagaaaagtgttggctatagcttaccttggacagatggctaatgaatgcctttactttaggactccatggttagtctcattcaaagtgatggccatttcctatttttgtatatgactatcagctaccacgggacattgac

SEQ ID NO: 719116 - DNA, 1395 bp, Homo sapiens
tggaaccaacccaaatgtccatcaatgatagactggattaagaaaatgtggcacatatacaccatggaatactatgtagccataaaaaatgataagttcatgtcctttgtagggacatggatgaagctggaaaccatcattctcagcaaaccattgcaaggacagaaaaccaaacaccacatgttctcactcataggtgggaagtgaacaatgagaacacttggacacaggaaggggaacatcacacaccggggcctgtcgggggtggggtgaggtgggagggatagcattaggagatatacctaatgtaaatgacgagttaatgggtgcagcaccacaccaacatggcacatgtatacatatgtaacaaacctgcacattgtgtacatgtaccctaaaacttaaagtaaataataataataataaaaagatttaaaaaaatcttagagataaataaaacaattgtgtgtcttacctttagtgatatttcaggttaaatgaaaaatggtagtttccagcttacacagaacaaaattttgctactaacaccaatagtttggaaatattcaatatcttagaatttctttttgaaacataaattactttgttttaaactaatgccaacctttaaaaatttattatgtcaataaaaaagatctatttaatattttaaattttaattttaaattactgttaagctggtatttttattttttatgaaatttaaaaaaacactttcctacacagaacatagtaaattaggtaattcaacaactatttaacatagtagaaaatagattagagactgtttctaacttggaaggtcacataggctgtcattcaaatggctcattgtttggcatgggatttttaaagtaggatcacttcatagcagggaattatcacatgggtcaatttacctgtttctcttgtgatagctaaatgctttaacatcagtttgaaattttataaccaatcaatgtatttgaccaattttattttctggtttatgttttaagtaagccagtaatatgtttttaagtccttaaaaaagctctgatacctaaaaagttatttctttcattaaattgtcatttttcttgaattttcaaattgataaaaataataaaaataatttttaaataaaattaaacattttgccacaaaattcactctgctagtaattccatatcagttgttacagtgagttttgattaataataactgaaggtcccaatagtagctttattcatacaagaaaagtgttggctatagcttaccttggacagatggctaatgaatgcctttactttaggactccatggttagtctcattcaaagtgatrgccatttcctatttttgtatatgactatcagctaccacgggacattgac

SEQ ID NO: 719117 - DNA, 3173 bp, Homo sapiens
ggatccaacatttatctacttttgtatcaatattaatgataatatttttattaatataagtaatttataattacttttaattttaagtaaaatcataaagagaaactacaaagtgcttcataaccagtgccttgatttttctctttagtatattcttctctcttaagacttgtcagttatgatctagttcttaataccatggtttcaaggacaatttttcaagatatgcggtgattcatttgatgtagttcaccaatgagtttttctctagtctgagaaattttctcatcctacagcatgtcagtttcttaaatgcaggagctaaaggagaaagaagttctccagatggaagacaggctgagaaagggcagggaactgccaaggaactgggaatgcttcctctgaaatgttggctattgcgagtccttccttccaataaccaaattaaaaaagaaaaaagaaaaactagcctgttttctgaaggtctcagtgagactgagggtcatggaggacttctgtttataaactggagcctacatgcccatagcagtgcttggcctgaaaggtctatgaagtccttcaccatctgatgtgtgatatgagctgtcatgttctgaaagatacaactccctgaactgggaacccagggatattataaaccaacttccttccttctttctctaagattgtttttagaaactcctgttagaaaatacatttttctggcttaggagtcattgggtttatgtttaacaaatatgtgtttatggagtgttttgtctaagtatggctataaacatatttttaagagttaaccagttaaaacaattttcaggatgaaaactactagaaaaataaccatttattagatttcacagaattgtgtgtgtgtgtgtgtgtgtgtgtgtggtggtgcaatcatggctcactgcagcctccacttcccaggctcaagcaatccttctacttcagcctctcaagtagctggaactacatgtgtgcaacaccatgccttgctaattcttgtattttttttttttttttttttttttttttttttgkagagatgaagtttctccattttgcccaggctgatcttgaactcccgggctcaagtgatctgcctacttcagcttctgaagtgctagaattacaggcatgacccgctgcgcctggcagaatgatttttaaatatgtaatattttctacatgaaggcagtttttgctcattaaaactgttcaaaagatagccatattttatttttaattttggtataaaatattaagtttgaaattgttatataaacatgttactcaatggaggatatttgagagctatgtttgggatcatttgtgtcttaagtgatgcaagtggtaggtggaaaacatttagataaatattagtgctatttagcagacagaatcaccctcagcttttctgcactgctatgacatttagagtggtacattttcatcctctgattttttttctgctgcttcccttaggtttgtatttatctcagttttcctgatgtaaacaaatccagcagttttggttacctggacatggttttatttgggtaacaggatatattaaggttgctagtgttatggttcacaaggcatttctcttatgatttcctatgaagagcttaagatactttattaaatctggagataattctcataactcagtgaaggtaggttaagtatattttaaaaaatcttagtagccgatctatctatatttcattttaatctcttttaccaacagctatcccagtgagctttcccaaattttaaaaattcaattaatgaataatcatttcaattaaagaaataaacaaaattgaaagtgcaaagtaattcaacattaacacaagtattagggtcatgccatatctttcaacccaacttatgctcttagaacaaaattgattattaaggagaacttagtaatttgctaataaaaggattatcttactctatgatttgatatcaaattccagagcttattaaagtaacttaacctgtttcctctatctgtctttggctctagaatttgttttgatttgctttttaataattcttaccgttaaataagaaatatagaaagcttcataaaacaaatgggtaggttactaaattaccaaaaggtgtacactcttgtaactctcacttatgtcaggaagtaaacctcaccagcttcctcaggacagtgctgtctgcttcctcaatcacagctcttttctttccactaagaattgccctcctgacttttaattgcctccttattttattgtccaattgtgcttccatagacactgacgttcagttttgcttgttattttttaaagtatttttaaatttataggatccctctgcatcacttgtcttttctgaaatctgtttatgaaagagccagagtcatgtgtcctgtcaattttcacaggctggattttgctgattgcgttcctgtatagtttaacacgttcctctgccttttctgataattggtagtcatatctagagacttaaactcaggctagctttattttgtatttatgttattttttaggtaaatttacttcctacttggtgtgtgcccctcatgaggagtcataggagggattcaatgacaaattgtcacttttgataaagttagaagctcttaaagttcagtacttggatcttttttattccttaggatttgcaaaatgttgatactatattctgtctgtcattcttcttttatctgttcattgaaatatttctgtaaggagccacattccttcctctactctttggtcacccaattctacagatcatataagaaaagcagaataaatgcttgattgtttccttttatttatacccagtttatgttttgaagctgtgttgactgtaattctcgtatactttggaacacaagatctataattcatctttaaataccacagctgtgcttttcaaaggagaaatatgcttattttaattttggccacatatctgagttattcaaaatttgcttttgagatattacactctgaactatataatgagccaatgctgtgtaaactccacttctttcaaaattccaccttcaccagatgtgtagtcagattgccactcactttaattcattttccttatagatgttctactgtgctttg

SEQ ID NO: 719118 - DNA, 644 bp, Homo sapiens
ttttaaaaattcaaaattatcctctgcaaaaacaataattttaaaaaatgttttttaaaaaacctcagcatggtagctcacgcctgtaatcccagcactttgggaggctgagcagggtagatcacctgaggtcaggagtttgagaccagcatggccaacatggtgaaaccttgtctctaccaaaaatataaaaattagccaggtgtggtggcgtgagcctgtcatcccagctattcgggaggctraggcaggagaatcacttgaacccgggaggtatagtaagccaaggtcgcgccactgcactccagcctgagtgacaaagcaggacttgatctcaacaaaaataaaaaataaataaaataaattttaaaaattcttattataatagagatggggtcttgctatattgcccaggctggtctcaagtgtcctggactcaagtgatccttttgcctgtgcctcccaaagtgctgggatttcaggccaaaaccagatttttaaaatttaaagaaagagaagaatctacagtgaaaagaaaactttacaaatgtcctaaatacacagtgctaatcattacaacaccaagtttttcattttctctttttactttttttgagacagggtctcactctgtcacacaggct

SEQ ID NO: 719119 - DNA, 677 bp, Homo sapiens
agaacatgttggtgcacacaggagcctaaggcaggaggactgcttccatccaagagttcaaatccagcctaggcaacatagcaagaccccactataagaaagacatttttaacgactttaaaattcaaaatttcaaactgacccaagaaatgtttttgtattttttttttttttttaagacggagttttgctcaatcctcctgactcagcctcctgagggactactggcatgtgccaccacattggtctcaaactcctggaatcaagcgaccctctcaaagcgctaggattacaagagtaagtcaccaagagccgggcgcggtggctcacacctgtaatcccagcactttgggaggccgaggcgggtggatcacaaggtcaggagatcaagaccatcctggctaacacagtgaaaccctgactctactaaaaatacaaaaaattagccrggcgtggtggcaggcgcctgtagtcccagctactcgggaggctgaggcaggagaatggcatgaacccaggaggcggagcttgcagtgagccgagatagcgccactgcactccagcatgggcgacagagcaagactctgtctcaaaaaaaaaaaaaccaaaaaaacccaaaaaaacaaaaaagagtaagtcaccacgcctggctacaaaataatactttaaatataacc

SEQ ID NO: 719120 - DNA, 1130 bp, Homo sapiens
tttttaggtttagctacagcctcttacagtgtgattgaaagtatatgatcagatctatcaacaggcagtctttcttccttgcttggtcagtagaagagtattggtgatagattaagccacaacaacttttttttttttttttgcgtatcattcctgtatacaaaaatgttttgcagagtctttgagaccaatgttatttctaagtgttgaagttatataaatccagcctggtaaatactagccaggcagtggttcatcaccatcacttggccaggacattttacctgaattacagaatatctgtgatcaggcygaagtcagttcagagtcaagctaagtttcagtttctcttctctgcgctctttgacttccagggcccggattactcactcaatgagggtcttatccggaacttgacatcactccaaattcccccatcttcaaacatgtgaactcttgaaattctaccactacctctcccttcaccctgttttaccataatttctattttttttattttttttattggtttactctctactccttattggtttactttctaattatgctcctcatgtcaactccttatgtccttcttagtctctctgtgaccaattaaattggttccagtaaacatttattgatgtgacattctgattttcagcatgactattattagttatgaacagattaccaccatgacagtttaatattgcaggctttctccaggcaccatggctcatgcctgtaatcccagcactttgggatgctgaggtggaaggattgcttgaacccaggatcttgagtgtagcctgggcaactttgtgagaccctgtctctacaattaaaaacaaaattagctatgcgtgatggtacacaactgtactcccagctactcgagagactgaggcaggagaaacactcaaacccaggagtttgaggctgaaacatatatttatattttagactttgctgaaaaatgtgactacagatattgaaaaaaatgaatttttttaacctttaactttgctttaccttggtatctatcaagttctaccatgaatacaaaaatgctttggaaatcaaatctgtttatttcatttatctccagtcttcgctatcactgaaag

SEQ ID NO: 719121 - DNA, 1130 bp, Homo sapiens
tttttaggtttagctacagcctcttacagtgtgattgaaagtatatgatcagatctatcaacaggcagtctttcttccttgcttggtcagtagaagagtattggtgatagattaagccacaacaacttttttttttttttttgcgtatcattcctgtatacaaaaatgttttgcagagtctttgagaccaatgttatttctaagtgttgaagttatataaatccagcctggtaaatactagccaggcagtggttcatcaccatcacttggccaggacattttacctgaattacagaatatctgtgatcaggctgaagtcagttcagagtcaagctaagtttcagtttctcttctctgcgctctttgacttccagggcccggattactcactcaatgagggtcttatycggaacttgacatcactccaaattcccccatcttcaaacatgtgaactcttgaaattctaccactacctctcccttcaccctgttttaccataatttctattttttttattttttttattggtttactctctactccttattggtttactttctaattatgctcctcatgtcaactccttatgtccttcttagtctctctgtgaccaattaaattggttccagtaaacatttattgatgtgacattctgattttcagcatgactattattagttatgaacagattaccaccatgacagtttaatattgcaggctttctccaggcaccatggctcatgcctgtaatcccagcactttgggatgctgaggtggaaggattgcttgaacccaggatcttgagtgtagcctgggcaactttgtgagaccctgtctctacaattaaaaacaaaattagctatgcgtgatggtacacaactgtactcccagctactcgagagactgaggcaggagaaacactcaaacccaggagtttgaggctgaaacatatatttatattttagactttgctgaaaaatgtgactacagatattgaaaaaaatgaatttttttaacctttaactttgctttaccttggtatctatcaagttctaccatgaatacaaaaatgctttggaaatcaaatctgtttatttcatttatctccagtcttcgctatcactgaaag

SEQ ID NO: 719122 - DNA, 876 bp, Homo sapiens
tcagttgttttaggcttaaccaaagaggctggactaaatcgtttagacgccaatggtcctgcccatgtagaataaaattatgacagtatctacacaatgattctcttggttaaataagcttttctcccctctctattaaaattgatgtttgttctgaatttttataaattgcttttatgaatatgaactttttagatcacttggttttaattgtaatgacaatctatggcagtaccttgaaaataaaaatgaacactgaatgctgtacatttagatcatgctttataatttgaaaattatttatacatataaataatttgcatgtattttttttcctcatttgatttctattttaactgatagtgagagtaattaagtaacttacaaaamattactcaatgacagctcaagttttctgattttactttcagaatcattcgacccttattaatcacaactacaggtatacaggtatataactaccaggtacattaaaaataacctttaaatatttcataattgtattctgttttttgttttttgttttttgtttttttgttttttttgcgatggagtcttcctcttgttacccaggctggagtgcagtgacgtgatccgggctcactgcaacctccgcctcctgggttcaagtgattctcctgcctcagcctcctgagtaactgggattacaggcacacaccaccacatccagataatttttatacttttagtagagacggggttttgccatgttggccagcctgatcttgaactcttgacctcaggtgatccacctgcctcggcctcccaaagtgttgcaattactggcgtgatccaccgcacccattccataattgaatattctcataatttaaa

SEQ ID NO: 719123 - DNA, 876 bp, Homo sapiens
tcagttgttttaggcttaaccaaagaggctggactaaatcgtttagacgccaatggtcctgcccatgtagaataaaattatgacagtatctacacaatgattctcttggttaaataagcttttctcccctctctattaaaattgatgtttgttctgaatttttataaattgcttttatgaatatgaactttttagatcacttggttttaattgtaatgacaatctatggcagtaccttgaaaataaaaatgaacactgaatgctgtacatttagatcatgctttataatttgaaaattatttatacatataaataatttgcatgtattttttttcctcatttgatttctattttaactgatagtgagagtaattaagtaacttacaaaacattactcaatgacagctcaagttttctgattttactttcagaatcattcgacccttattaatcacaactacaggtatacaggtatataactaccaggtacattaaaaataacctttaaatatttcataattgtattctgttttttgttttttgttttttgtttttttgttttttttgmgatggagtcttcctcttgttacccaggctggagtgcagtgacgtgatccgggctcactgcaacctccgcctcctgggttcaagtgattctcctgcctcagcctcctgagtaactgggattacaggcacacaccaccacatccagataatttttatacttttagtagagacggggttttgccatgttggccagcctgatcttgaactcttgacctcaggtgatccacctgcctcggcctcccaaagtgttgcaattactggcgtgatccaccgcacccattccataattgaatattctcataatttaaa

SEQ ID NO: 719124 - DNA, 1311 bp, Homo sapiens
cacgggtgctcatgcctgtaatcccagcactttgtgaggccgaggcgggtgaatcacgaggtcaggagatcaagaccatcctggctaacacggtgaaaccctgtctctactaaaaatacaaaaaataattagctgggcgtggtgcaggcgcctgtagtcccagctactcaggaggctgaggcaagagaatggcctgaacccgggaggcggagcttgcagtgagcggagatcgtgccattgaactccagtctgggtgacaggagatgatccgtctcaaaaataaaaaaataaaaaaattaatattacttgctacagactaaaccattatattttaaaataaatcaaattttctttttcttctagtataagaaacttctcagctgggcacggtggctcacgcctgtaatcccagcactttggaaggccaaggtgggtggatcacctgaggtcakgagttcgagaccagcctggccaacatggtgaaaccctgtctctattaaaaatataaaaattagccaggtgtggtggcgtgtgcctgtagttccagctactcgggaggctgaggcaagagaatggcatgaaccccagaggttcaggttgcagtgagccaagattgtgccacagcactccagcctgggtgacagagcgagactctgtctcaaaaaaaaataaaaaaagaaaagaaacttctcacagatgcataaatttcacagaaacagaagaatgtcaaggatcttagtaaatgatgaacttacttgctgcttctcagaactttaagagcctgtatatgcctacattgattgcagtacgttgttcttgtgtttacgaggaaactaggttaattgtgccaggctccaatattaaaattaagtcagtaagaggggtagcatggttgactatctgtaggaaactgctcttctgtatttatagttgcctccctggctgattgatgcttttaccataccaagaaagggactgaatgcagcaacatctaggaaaataaggtcctattttgttaagatgtgacaaacatctgataattacttttgcattcttacacgctgaaaaaatgtacttctttccttacaataaaagaaaaaaattgcaaaacaaaacaaaaataaactattacaaaactgatgttgtgtaggaatacatatgttaagaaaatatagttgacagtcattcctggccaggcgtggtgggtcacgcctgtaatctcagcactttgggaacccgaggtgggtggatcacgaggtctggagttcgagaccagcctggccaagacagtgaaacctgtctctactaaaa

SEQ ID NO: 719125 - DNA, 1311 bp, Homo sapiens
cacgggtgctcatgcctgtaatcccagcactttgtgaggccgaggcgggtgaatcacgaggtcaggagatcaagaccatcctggctaacacggtgaaaccctgtctctactaaaaatacaaaaaataattagctgggcgtggtgcaggcgcctgtagtcccagctactcaggaggctgaggcaagagaatggcctgaacccgggaggcggagcttgcagtgagcggagatcgtgccattgaactccagtctgggtgacaggagatgatccgtctcaaaaataaaaaaataaaaaaattaatattacttgctacagactaaaccattatattttaaaataaatcaaattttctttttcttctagtataagaaacttctcagctgggcacggtggctcacgcctgtaatcccagcactttggaaggccaaggtgggtggatcacctgaggtcaggagttcgagaccagcctggccaacatggtgaaaccctgtctctattaaaaatataaaaattagccaggtgtggtggcgtgtgcctgtagttccagctactcgggaggctgaggcaagagaatggcatgaaccccagaggttcaggttgcagtgagccaagattgtgccacagcactccagcctgggtgacagagcgagactctgtctcaaaaaaaaataaaaaaagaaaagaaacttctcacagatgcataaatttcacagaaacagaagaatgtcaaggatcttagtaaatgatgaacttactygctgcttctcagaactttaagagcctgtatatgcctacattgattgcagtacgttgttcttgtgtttacgaggaaactaggttaattgtgccaggctccaatattaaaattaagtcagtaagaggggtagcatggttgactatctgtaggaaactgctcttctgtatttatagttgcctccctggctgattgatgcttttaccataccaagaaagggactgaatgcagcaacatctaggaaaataaggtcctattttgttaagatgtgacaaacatctgataattacttttgcattcttacacgctgaaaaaatgtacttctttccttacaataaaagaaaaaaattgcaaaacaaaacaaaaataaactattacaaaactgatgttgtgtaggaatacatatgttaagaaaatatagttgacagtcattcctggccaggcgtggtgggtcacgcctgtaatctcagcactttgggaacccgaggtgggtggatcacgaggtctggagttcgagaccagcctggccaagacagtgaaacctgtctctactaaaa

SEQ ID NO: 719126 - DNA, 1311 bp, Homo sapiens
cacgggtgctcatgcctgtaatcccagcactttgtgaggccgaggcgggtgaatcacgaggtcaggagatcaagaccatcctggctaacacggtgaaaccctgtctctactaaaaatacaaaaaataattagctgggcgtggtgcaggcgcctgtagtcccagctactcaggaggctgaggcaagagaatggcctgaacccgggaggcggagcttgcagtgagcggagatcgtgccattgaactccagtctgggtgacaggagatgatccgtctcaaaaataaaaaaataaaaaaattaatattacttgctacagactaaaccattatattttaaaataaatcaaattttctttttcttctagtataagaaacttctcagctgggcacggtggctcacgcctgtaatcccagcactttggaaggccaaggtgggtggatcacctgaggtcaggagttcgagaccagcctggccaacatggtgaaaccctgtctctattaaaaatataaaaattagccaggtgtggtggcgtgtgcctgtagttccagctactcgggaggctgaggcaagagaatggcatgaaccccagaggttcaggttgcagtgagccaagattgtgccacagcactccagcctgggtgacagagcgagactctgtctcaaaaaaaaataaaaaaagaaaagaaacttctcacagatgcataaatttcacagaaacagaagaatgtcaaggatcttagtaaatgatgaacttacttgctgcttctcagaactttaagagcctgtatatgcctacattgattgcagtacgttgttcttgtgtttacgaggaaactaggttaattgtgccaggctccaatattaaaattaagtcagtaagaggggtagcatggttgactatctgtaggaaactgctcttctgtatttatagttgcctccctggctgattgatgcttttaccataccaagaaagggactgaatgcagcaacatctaggaaaataaggtcctattttgttaagatgtgacaaacatctgataattacttttgcattcttacacgctgaaaaaatgtacttctttccttacaataaaagaaaaaaattgcaaaacaaaacaaaaataaactattacaaaactgatgttgtgtaggaatacatatgttaagaaaatatagttgamagtcattcctggccaggcgtggtgggtcacgcctgtaatctcagcactttgggaacccgaggtgggtggatcacgaggtctggagttcgagaccagcctggccaagacagtgaaacctgtctctactaaaa

SEQ ID NO: 719127 - DNA, 1311 bp, Homo sapiens
cacgggtgctcatgcctgtaatcccagcactttgtgaggccgaggcgggtgaatcacgaggtcaggagatcaagaccatcctggctaacacggtgaaaccctgtctctactaaaaatacaaaaaataattagctgggcgtggtgcaggcgcctgtagtcccagctactcaggaggctgaggcaagagaatggcctgaacccgggaggcggagcttgcagtgagcggagatcgtgccattgaactccagtctgggtgacaggagatgatccgtctcaaaaataaaaaaataaaaaaattaatattacttgctacagactaaaccattatattttaaaataaatcaaattttctttttcttctagtataagaaacttctcagctgggcacggtggctcacgcctgtaatcccagcactttggaaggccaaggtgggtggatcacctgaggtcaggagttcgagaccagcctggccaacatggtgaaaccctgtctctattaaaaatataaaaattagccaggtgtggtggcgtgtgcctgtagttccagctactcgggaggctgaggcaagagaatggcatgaaccccagaggttcaggttgcagtgagccaagattgtgccacagcactccagcctgggtgacagagcgagactctgtctcaaaaaaaaataaaaaaagaaaagaaacttctcacagatgcataaatttcacagaaacagaagaatgtcaaggatcttagtaaatgatgaacttacttgctgcttctcagaactttaagagcctgtatatgcctacattgattgcagtacgttgttcttgtgtttacgaggaaactaggttaattgtgccaggctccaatattaaaattaagtcagtaagaggggtagcatggttgactatctgtaggaaactgctcttctgtatttatagttgcctccctggctgattgatgcttttaccataccaagaaagggactgaatgcagcaacatctaggaaaataaggtcctattttgttaagatgtgacaaacatctgataattacttttgcattcttacacgctgaaaaaatgtacttctttccttacaataaaagaaaaaaattgcaaaacaaaacaaaaataaactattacaaaactgatgttgtgtaggaatacatatgttaagaaaatatagttgacagtcattyctggccaggcgtggtgggtcacgcctgtaatctcagcactttgggaacccgaggtgggtggatcacgaggtctggagttcgagaccagcctggccaagacagtgaaacctgtctctactaaaa

SEQ ID NO: 719128 - DNA, 987 bp, Homo sapiens
aaaatctgaataggaaaaaactatacacgtatctaaatytccacacagagataatgatagacgtagaagatggtgtcatgttacatcccactttttcagctcttacagaattgctacagtaattcacaagtatggtgagggagggagagtagctgaaacaggttgttgttgttgttgttgttttttatctgttattttaggttttactaatggaagtattgagactagaacaaaaagcacatactagatagatacttacctgaccaatcctggcaagaggactattgtctcactcacatggaattttaaaaatctgaaagtcttacataaaaatccaggtttccagtttgtcttgagtagtcagaaaagctgacaaatccagccccacattcctatgggaaatcatcagctggtgtgctggtaaacgttaacaactggctctctatagaagaaaaacaaaagcaaaagcccctgatctgtatagcatttgccatggtgtaaatacacccatcatggctgatttcaagctcccaacgtgatgcctggaaatgacaggcacaatcagctcatggacaacagtggccagagctgagtggtggctgccccttggacaggagttacgggccttccgtcctcactgctccctatagtcttacagtggctgctacctgcactgcaccagcccgccccacccctttctctctcttcacccccaagaattcctgagccagatccaagctggtggtagtgctgggcacaatgtcctcctaatcctcatcagaccacatggaaaaatcattgcttaggtaccacattttaggaggggcactgccaagcctgagtaggtaaagacagcaatgagctcagaagacatctccaacacaggatggctgacagcactggagatgttcacaccagatactgaccggggcagtgactctcaaagtggagagagaagagatgatgggtagggagaagtgcaccaaa

SEQ ID NO: 719129 - DNA, 987 bp, Homo sapiens
aaaatctgaataggaaaaaactatacacgtatctaaatctccacacagagataatgatagacgtagaagatggtgtcatgttacatcccactttttcagctcttacagaattgctacagtaattcacaagtatggtgagggagggagagtagctgaaacaggttgttgttgttgttgttgttttttatctgttattttaggttttactaatggaagtattgagactagaacaaaaagcacatactagatagatacttacctgaccaatcctggcaagaggactattgtctcactcacatggaattttaaaaatctgaaagtcttacataaaaatccaggtttccagtttgtcttgagtagtcagaaaagctgacaaatccagccccacattcctatgggaaatcatcagctggtgtgctggtaaacgttaacaactggctctctatagaagaaaaacaaaagcaaaagcccctgatctgtatagcatttgccatggtgtaaatacacccatcatggctgatttcaagctcccaacgtgatgcctggaaatgacaggcacaatcagctcatggacaacagtggccagagctgagtggtggctgccccttggacaggagttacgggccttccgtcctcactgctccctatagtcttacmgtggctgctacctgcactgcaccagcccgccccacccctttctctctcttcacccccaagaattcctgagccagatccaagctggtggtagtgctgggcacaatgtcctcctaatcctcatcagaccacatggaaaaatcattgcttaggtaccacattttaggaggggcactgccaagcctgagtaggtaaagacagcaatgagctcagaagacatctccaacacaggatggctgacagcactggagatgttcacaccagatactgaccggggcagtgactctcaaagtggagagagaagagatgatgggtagggagaagtgcaccaaa

SEQ ID NO: 719130 - DNA, 1262 bp, Homo sapiens
ttctattgtgatgtactacatattacaatgtgttgaaacattttgatactgtaggaggtcttggacttggaacttttgatgcttgtttaattagtgaagaattggcttatggatgtacaggggttcagactgctattgaaggaaattctttgggggtaagtgacttagaaaattaactacctaactcagctcttgttaatgagatagttactcctgaagaagttggatttttagaagaaaaaaaaaggaaagtcagttactactaggtaaggttagtgggtacacacagttttctttaaagaggaacacaagattcagcagtgaagcctggagttctgatttcgaggcttgataactctggccttgtctctagtactcggagttctgactgtcctttggaggaaactgtatactttggctgcagcttcagtggcaattcttaggtaaagccaagggttaaatccagaattcaggagcaggattgggatggtttgctgccactatggcgttactgaaatttagcaagcaattctttgttgtctcactctgtcgcccaggctggagtgtagtagcgcgatcttggctcactgcaacctgcacctcctgggttcaagcaattctcctgtctcagcctcctgagtagctgggattacaagtgcgcaccaccacgcccagctaaatttgggacttttgtttttttttttttttgagacggagtctcactctgttgcccaggctggagtgcagtggcgcgatctcagctcactgcaagtccgcctcccaggttcacgccattctcctgtctcagcctcccaagtaactgggactacaggcgcccgccaccatgcccggctaattttyttttttttttttgtatttttagtagagacggggtgtcaccctgttggccaggatggtctctatctcttgacctcgtaatccgcccacctcggcctcccaaagtgctgggattacaggcgtgagccactgcgcccggcctaacaagcaattcttaggcctgatcatacatactgtgtcacatattctaaacataattttttattagtgcatttcactatagtagattttcacagattataatgccacaggtcctacatataacctaattttatgaaaatacttagattagcagatttatttcctcattctaacttagaggcaaggtataggccagttctttggacttacctgttaggtgaaaaatagttattttttcattttgaattatagcatctctgaat

SEQ ID NO: 719131 - DNA, 1006 bp, Homo sapiens
ggcaagagataggggtctactttcattcttctgcatatggagatcctgttttcctagctccaaatattgaagagactttcctttccccagtgaatgttcttagcacctttgtgaaaaatgagttcactgtagatgtcccataggaatttttaggggtgtgcattcagctattcctgtatgttttcccatggcttcagcttctatcttattttgtgtctttcaatttacatgctttttatttgcttcttttttcttatttcacatttttaattggattgatttctttttaattctattctttttttccctgaactagcatgaagttaagtatacatcatgcactcttaaaatctagaactcagtaaaatccctagacttttccaaaccaatacaaaatcaggtgttttcgttcaatcttgttttttgttgttgttgttgttttgttttktttgttttgttttgttttggtttgctttggtttttttgagacagagtttctgtctgttgccaggctggagtgcagtggcgtgatctcagttcactgcaacctttgcctcccgggttcaagcgattctcctgcctcagcctcccaagtagctgggactacaggcacatgccaccacgcccagttaatttttatatttttagtagagatggggtttcaccatgttggccaggatggtctcgatctcttgacatcgtgatccacccgcctcggcctcccaaagtgcttggattacaggcgtgagccaacacgcctggcctcaatcttgttttaaaacccccaaaatagtaattattattattattactatagtaatcaatacttatttaaattcaccaacacatttaccagcttctttgttcactttactgcttcccacccttcttctgggattttttctaactgatttattgaaatacaattgacaaacaataaactgcccatacttaaagtgaacaattttgagaggttgttatgtatatatgtatgcatctgtgaaat

SEQ ID NO: 719132 - DNA, 1006 bp, Homo sapiens
ggcaagagataggggtctactttcattcttctgcatatggagatcctgttttcctagctccaaatattgaagagactttcctttccccagtgaatgttcttagcacctttgtgaaaaatgagttcactgtagatgtcccataggaatttttaggggtgtgcattcagctattcctgtatgttttcccatggcttcagcttctatcttattttgtgtctttcaatttacatgctttttatttgcttcttttttcttatttcacatttttaattggattgatttctttttaattctattctttttttccctgaactagcatgaagttaagtatacatcatgcactcttaaaatctagaactcagtaaaatccctagacttttccaaaccaatacaaaatcaggtgttttcgttcaatcttgttttttgttgttgttgttgttttgttttttttkttttgttttgttttggtttgctttggtttttttgagacagagtttctgtctgttgccaggctggagtgcagtggcgtgatctcagttcactgcaacctttgcctcccgggttcaagcgattctcctgcctcagcctcccaagtagctgggactacaggcacatgccaccacgcccagttaatttttatatttttagtagagatggggtttcaccatgttggccaggatggtctcgatctcttgacatcgtgatccacccgcctcggcctcccaaagtgcttggattacaggcgtgagccaacacgcctggcctcaatcttgttttaaaacccccaaaatagtaattattattattattactatagtaatcaatacttatttaaattcaccaacacatttaccagcttctttgttcactttactgcttcccacccttcttctgggattttttctaactgatttattgaaatacaattgacaaacaataaactgcccatacttaaagtgaacaattttgagaggttgttatgtatatatgtatgcatctgtgaaat

SEQ ID NO: 719133 - DNA, 1006 bp, Homo sapiens
ggcaagagataggggtctactttcattcttctgcatatggagatcctgttttcctagctccaaatattgaagagactttcctttccccagtgaatgttcttagcacctttgtgaaaaatgagttcactgtagatgtcccataggaatttttaggggtgtgcattcagctattcctgtatgttttcccatggcttcagcttctatcttattttgtgtctttcaatttacatgctttttatttgcttcttttttcttatttcacatttttaattggattgatttctttttaattctattctttttttccctgaactagcatgaagttaagtatacatcatgcactcttaaaatctagaactcagtaaaatccctagacttttccaaaccaatacaaaatcaggtgttttcgttcaatcttgttttttgttgttgttgttgttttgttttttttgttttgttttgttttggtttgctttggtttttttgagacagagtttctgtctgttgccaggctggagtgcagtggcgtgatctcagttcactgcaacctttgcctcccgggttcaagcgattctcctgcctcagcctcccaagtagctgggactacaggcacatgccaccacgcccagttaatttttatatttttagtagagatggggtttcaccatgttggccaggatggtctcgatctcttgacatcgtgatccacccgcctcggcctcccaaagtgcttggattacaggcgtgagccaacacgcctggcctcaatcttgttttaaaacccccaaaatagtaattattattattattactatagtaatcaatacttatttaaattcaccaacacatttaccagcttctttgttcactttactgcttcccacccttcttctgggattttttctaactgatttattgaaatacaattgacaaacaataaactgcccatacttaaagtgaacaattttgagaggttgttatgyatatatgtatgcatctgtgaaat

SEQ ID NO: 719134 - DNA, 621 bp, Homo sapiens
ccacacctggctagctaatttttgtatttttagtagagatggggttttaccatgttggccaggctggtcttgaactgacctcaggtgatctgcctgcctcggcctcccacagtgctgagattacaggcatgagcaccgtgcccggccagtctcctgatttctaatccaacatcacttctagatgtgaggctgcttgtaatcaatagcaacagtagcagcataatactaaaaataatgctaatcttaacactatactaatactaatgctgcaattttttgatctcttactatgtttcaggcaygatgctaggcaccttacatacaatctttatgatatctatctagtaaagcatttataatgcctaatgctttactcttcagaaggttgactcattacttctgaggcccacctccctcaaaagaggatgaaacaacaaaactcagcgcacatacaatatgtaaccgtatctgatgctattccactatggtgatggaaaaggataatcaaatcaagttaccaattagctaaccttctcttcttcatgaaatttcctgagttatggtcatgaaaatgaactgtttttcattccaagtctaccatttggtgaaagaatgtaacaa

SEQ ID NO: 719135 - DNA, 621 bp, Homo sapiens
ccacacctggctagctaatttttgtatttttagtagagatggggttttaccatgttggccaggctggtcttgaactgacctcaggtgatctgcctgcctcggcctcccacagtgctgagattacaggcatgagcaccgtgcccggccagtctcctgatttctaatccaacatcacttctagatgtgaggctgcttgtaatcaatagcaacagtagcagcataatactaaaaataatgctaatcttaacactatactaatactaatgctgcaattttttgatctcttactatgtttcaggcacgatgctaggcaccttacatacaatctttatgatatctatctagtaaagcatttataatgcctaatgctttactcttcagaaggttgactcattacttctgaggcccacctccctcaaaagaggatgaaacaacaaaactcagcgcayatacaatatgtaaccgtatctgatgctattccactatggtgatggaaaaggataatcaaatcaagttaccaattagctaaccttctcttcttcatgaaatttcctgagttatggtcatgaaaatgaactgtttttcattccaagtctaccatttggtgaaagaatgtaacaa

SEQ ID NO: 719136 - DNA, 2706 bp, Homo sapiens
  misc_feature 1117, 1118, 1119, 1120, 1121, 1122, 1123, 1124, 1125, 1126,1127, 1128, 1129, 1130, 1131, 1132, 1133, 1134, 1135, 1136,1137, 1138, 1139, 1140, 1141, 1142, 1143, 1144, 1145, 1146,1147, 1148, 1149, 1150, 1151, 1152, 1153, 1154, 1155: n = A,T,C or G
  misc_feature 1156, 1157, 1158, 1159, 1160, 1161, 1162, 1163, 1164, 1165,1166, 1167, 1168, 1169, 1170, 1171, 1172, 1173, 1174, 1175,1176, 1177, 1178, 1179, 1180, 1181, 1182, 1183, 1184, 1185,1186, 1187, 1188, 1189, 1190, 1191, 1192, 1193, 1194: n = A,T,C or G
  misc_feature 1195, 1196, 1197, 1198, 1199, 1200, 1201, 1202, 1203, 1204,1205, 1206, 1207, 1208, 1209, 1210, 1211, 1212, 1213, 1214,1215, 1216: n = A,T,C or G
tcctctcacctcaggctcccaaagtgttgagattaaaggtgtgagccttgcacctggccagtcttagccattctaagtgtacagttcagtagtgttaagtattttcacagtactgtgcaacagatctctaaaacattttcatcttgcaaaactgaaagtttataaccattcttacttttgcaaattttatgaagacatataatcccggccgggcgcggtggctcactccggtaatcccagcactctgggacgccgaggtgggcggatcacctgaggtcaggagttcgagaccagcctgaccaacatggtgaaacccccatctctactaaaaataaaaaattagctgggtgtggtggcacacacctgtagttccagctactcgggaagctgaggcaggagaatctcttgaacccgggaagcagaggttgcagtgagctgatatcrtgccactgcactccagcctgggaggttgcagttagctgagatcatgccactgcactccagcctgggcaacagagtgagactccatctcaaaaaaaaaaaaaaacaaacaaaaggtcgggcgcggtggctcacgcctgtaatcctagcactttgggaggctgaggtgggtggatcacaaggtcaggagatcaagaccagtctggctaacacggtgaaaccccatctgtactaaaaatacaaaaaattagccgggcgtgatggcgggtgcctgtaatcccagctacttgggaggctgaggcaggagaatggcgtgaacccgggaggcggagcttgcaacaaaccaagattgcgccactgcactgcagcctgggcgacagagcaagactcagtctcaaaacaaaaacaaaaacaaaaacaaaacaaaacaaaaaccatataatcccatgcaggtgatgagttctgaagtttaagcttcagtgggcttcatgataaattcattcttgctgagggaagatttgagtctttttggagttccccaaggtacagatttggacatcatacactgtaggaaatcaaggttgcatcaaatgaccgctccaggagggagagctgttagggaataataggtccagaggtgtttgttttgggtttttttttttttttattttatcgnnnnnnnnnnnnnnnnnnnnnnnnnnnnnnnnnnnnnnnnnnnnnnnnnnnnnnnnnnnnnnnnnnnnnnnnnnnnnnnnnnnnnnnnnnnnnnnnnnnncatttcatttttaaaaattatgctattttaggctgggtggggtggctcactcctgtaatcccagcactttgggaggccgaggagggaggatcacctgaggtcaggagtttgagaccagcctggccaacgtggtaaatcctcatctccactaaaaatgcaaaaattaccctgcgcgtggtgacacacgcctgtaatcctagctaatggggaggctaaggcaggagaatcacttgaacctgggaggcagagattgcagtacactgagatcgtgccattccactccagcctgggagacgagcgaaattctgtctcaaaaaaagaaaagaaaatatgctattttatttatttgggcaattaagtctagatttatttgtattattttgactaaattgaagaaaatctgtttactaaaatgattactgagctaatttttatttttcaaactgtacatatacattttatatatacttttattaaaaaacaacattaaaacaaatacttgtgtaccaagcaatcattgagaataaaaatatttcagccaggtgcagtggctcacgcctgtaatcccaacactttgggaggctgaggcgggcagattgtgaggtcagtagatcgagaccatcctggccaacatggtgaaatcttctctctactaaaaatacaaaaattagctgggtgtggtgacacgtgcctgtaatcccagctacttgagaggctgaggcatgagaatcgcttgaacccaggaggtagaggttgcagtgagccaagatcgcgccactgcactctagcctgccgacagagcaagactgtctcaaaaaaaaaaaaaagaataaaaatatttccagtagagttgaagtcccatattccctttagtgattgcatcagtcttgatttttatttatttatttttttgaggcagagtttcactctgtcccccagacaggagtgcagtgacacactgcaacctctgcctcctgggttcaagcgattctcctgcctcaggctcccgaatagctgggattacaggcatgtgccaacatgcccgactaatttttgtgtttttagacagatgggttttcaccatgttggccaggtgtgagccaccgcacctggcctgtttttattttttaatttaatttaatttaactttttctttttcatgagacagagtcttgctctgtcacccaggctggagtgtgatctcggctcactgcaacctctgcctcctgggttcaatcgattcacttgtgtcagcctcccaagtaggtggactgcaggtgcgcaccaccacacctgcttaatttttgtattattagtagagacagggcttctccatgttttggccaggctggtcttgaacttctggcttcaagtgatctgcccatcttggcctcctagagtgctatgattacaagcatgagccactgtgcccggcttcagttaatttttgtaatttaagactaacataaaaatcagcttatggcaatagt

SEQ ID NO: 719137 - DNA, 646 bp, Homo sapiens
tgggagaaatcacttgagcctagaaagttgaggctgcagtgagccatgattgcactattgtactccagcctgagcaacagagcaagatcttgtctcaaaaaaaaaaaaaaatctgggttacataaatgtaaataatttctttgttgcagacattttcagagcgttaaatgagctaattttaaaatgaatttmcatgagagaaatactacgtgcagcattgctcagacttcttagtgcatttatttttggaatatattataagattagtgtttcatggaactctttattaaaattgttttcttgtgattctgagatattaggactgtatgcctttattataagctctaagagaaatagggtcaactttgttctgttcacagatacatttgcaatcttttatgtacttttgggaaggcaatattctattaatgaatagttatggaatggttgactgaggaaacaagtaggaaagatgtgtttgttcctgaggaaactatagtactgtggctaatctctaatatcaacaaaattacattaaaacccatgacatagccaaggacccagtattctgacactgtaaccctaagcttcctccatgagattctaatttctttcaggctgccaacttagcttgcaggaatcattc

SEQ ID NO: 719138 - DNA, 646 bp, Homo sapiens
tgggagaaatcacttgagcctagaaagttgaggctgcagtgagccatgattgcactattgtactccagcctgagcaacagagcaagatcttgtctcaaaaaaaaaaaaaaatctgggttacataaatgtaaataatttctttgttgcagacattttcagagcgttaaatgagctaattttaaaatgaatttacatgagagaaatactacgtgcagcattgctcagacttcttagtgcatttatttttggaatatattataagattagtgtttcatggaactctttattaaaattgttttcttgtgattctgagatattaggactgtatgcctttattataagctctaagagaaatagggtcaactttgttctgttcacagatacatttgcaatcttttatgtacttttgggaaggcaatattctattaatgaatagttatggaatggttgactgaggaaacaagtaggaaagatgtgtttgttcctgaggaaactatagtactgtggctaatctctaatatcaacaaaattacattaaaacccatgacatagccaaggacccagtattctgacactrtaaccctaagcttcctccatgagattctaatttctttcaggctgccaacttagcttgcaggaatcattc

SEQ ID NO: 719139 - DNA, 3045 bp, Homo sapiens
  misc_feature 107, 108, 109, 110, 111, 112, 113, 114, 115, 116, 117, 118,119, 120, 121, 122, 123, 124, 125, 126, 127, 128, 129, 130,131, 132, 133, 134, 135, 136, 137, 138, 139, 140, 141, 142,143, 144, 145, 146, 147, 148, 149, 150, 151, 152, 153: n = A,T,C or G
  misc_feature 154, 155, 156, 157, 158, 159, 160, 161, 162, 163, 164, 165,166, 167, 168, 169, 170, 171, 172, 173, 174, 175, 176, 177,178, 179, 180, 181, 182, 183, 184, 185, 186, 187, 188, 189,190, 191, 192, 193, 194, 195, 196, 197, 198, 199, 200: n = A,T,C or G
  misc_feature 201, 202, 203, 204, 205, 206: n = A,T,C or G
cggttctcgaactcttgacctcaggtgctccacgagcgttggcctccaaagtgctgggaatacaggcatgaaccactgcggcatggctaatttccaattttaaggannnnnnnnnnnnnnnnnnnnnnnnnnnnnnnnnnnnnnnnnnnnnnnnnnnnnnnnnnnnnnnnnnnnnnnnnnnnnnnnnnnnnnnnnnnnnnnnnnnntcagcacrtagagtagtacttaatagccaataaatatttgtgtaagtcgataagcaaatgaactattgtcttcttctcaataacattccctcttcatccaaattcccttattttatttttacttcttagaatagtttgtcttatttggaggtaaccaataaaagactatccttaatgattggacttcatttctctaaggcagcatttaaacctctggtgataatttaaatgaatttagatagaaaaaatttttttttaacagctatagatgaattttttgtgttataacctgtaaagaaagtaatgttggtttcacgttttggttgagacttataatacccgctccttaagcttttctcttcttcctctagaggtatttattccccacgtcctagcccaccaacctttgtaatctgtcagaactatgtgactatttctcaccaaggagctgagacattatgtgagtcattcctaggataaagccagtaattgccttcatgagacatttcagaaatatctttttttgctataacaactgagaagttctcctgttctttctgttgctaagaatattggagtctttgtcagcctggatccttgactgacttcatacagtagaattccccctcctctcactgattcccctgggatatcaagaataagcacaatatatacagtttcattctagacattttgtttaaacaacagggtctacatcatagctcactgcagcctcaaactcctgagctcatgcaatcctcctgcctcagcctcccaaataggtaggactacagatgtgtgccgtcatacccagctaatttttaaattttttttataaacatggggtcttgctatgttacccaggctggtctcaaacttctggcctaaagcaatcctcacaccttggcctcccaaagcacacaggtgtgagccaccatgcccagcctggaattgtttattacttcagtataaccaagtctattctaactatatcaatgacaataaagtatcctttaaacttacttatttaatttatatgaggtgatttttggaaatattttaagcaaataataaatagtttggtttactatatgagccagaaattccactttttggaatataccccaaataattgaaatcagggatttaaacagatatatgtacaatcatgtacatagatcatcatttatattagccaaaggtagcaattacccagatgtctatgatggatgaatggatgaacaaaatgtggcatatacgtaacaacaaaatagtattcagcctttaaaaggaaattctgatacatgctaccatataaatgaaacttgaaataagccagacacaaaagaaaaaaacatattgtatgattctgcttatatgaggtaccaagaatagtctaattaatagagacaaaaagtaaaatagtggttactagagcctggcgagaggaggtacttgagaggtactgtttattggatttgcagtttcagtttaggttgatgaaaaagtccagaagatggatgatgatggttgcacaacaatatgaatgcacttactgccattgaattgaatactttaaaaaggctaaaatattaaattctatgttatgtgcactttatcacaattaaaaaagacagttcaggtgatttctatctacagtagaactcattaagatgataattaaatgttgagaaatattgattgggaataagcatgagttttgggatccagcagaccttggatttgaaaaagacacttccccatgcttgctgagaacctctggcatttgttgacctttctcggcctcactttcattgtctagaaaatagggtcattgtaaagggtccaggtaacatgcaaaacacttagaagaaaatggacacattgaagaaacccaaataatggttgcagttgtgctgccattgtttttgttattattaatatgtttcaaaatgaaataggagactgaagtgttttctatgcagtttttttttcacataacataaatttggttagaaatcaagttatgaaaaacaagatttttgtcccagtagagttattgaatatttcatcattttagaagtccaattttcttcactcattctcagtgtctcctgcctttatgagataaggaacagattcaatttatactgtcaaatactagctacctagccatctagaaaactactccttttaaccttcttttatgtttaccttgctgaaatatagttaaatgctttcaataaaatataaaaccaacagacaaaacctaccaaagacttctgttcctctgcatataagcagaccttttgagacaaatgaactatttaacttaataacattttacacacttgactttgtagacaacctgtaagtaagcagggccatctcaattttgttgaatgcatttctgtagaatgcttattatgtgaccataatatgtttaagattgtgggaaagaaaaaaattaaaaggatatttctacacacccagctctcaagaggctataaaatttgtgggctaactgatgttaattttctcctctaaacatagccttcactggtgaagtttaaaagtaggcaataagtgactgaattaataagttaagccttatgcaacactccctaaaacaaaacttgtgctatgtagtaaagttcccatacaatattattgcagacgtgttgccgcttggcttcttgcttgtgttcccattgtgccactgtctggagggttcatctctcttaaacacgcctaattttatctaacatcatctctaaagttcccctctctgaagtcagtgccacctatagcactctacactatcacctttaccatacaa

SEQ ID NO: 719140 - DNA, 1788 bp, Homo sapiens
tcccttagccacattccagctgtgatatagataacctagcaccggactttagtactaatttgaaatatgatttcctatgttgaaaaaaagtcccaaactattttttgcttaaactttcaactgtcatttagtaaattgctaaatgcgtaaatgaatgtttggtgcctaataaatattattgattcagaatatcaaatatcaaaaagatattttgtcttttttgagatcttataatttcctctctatacacattggtgtacatgcttcaacctaagtttaaaatgtcatttcagctttttcttcttttttttccagcctgtgacttatgcatttctggaaacagtattactgacatcgtatcaatttttaaaacttgaagcatttctcattacttctgtctttccatcatctcagcacctatccagtgccaatgtgtctgggattctcaattcacaatgtgtttgttcctgtttgggaagccaaattacaaacaactcatgtttagcaacagattttaattctttaactgtcaataaagattgaattaatacacttttattcatacttcgtcattcttctttacttcctttcaccaccgtgatctccactgtaaaagtgtaatcaatttgaatatcccctatccaaaatgtttgggatcaaaaatgtttaaaagtttagatttttgaatatttgcattttacttactggtggagcactcctaatatgaatatctgaaatcaaaatgctccaatgagcatgttctttaagcatcatgtcaactttcaaaaagtttctgattttggagcatttcagatttcagattttcatattagggatacttaacctgtattatttttacaggttatttgcgtgcttttaaacaggtaacttttcaaagtccccttttccccctaatgatttcggttttccttgcaaagtcaactacctaaggttatttctaactgggttcattctgttcggactatctacttgatttattacaactttgtatattttagttattttggtacttgatcaatcttgacataaggtaaatatggatttgctaataaacatcaagatggaaagtgaagtcatcagtattctgtctcctttttactgagtatatagaattcacatatgttttctcagatttaagtgtcttattgagaaggtttttttacgtcttctaggtagagatggtgctacagcttgaatgtgtcccctaaattcatggtttggaagtttgatttacaatgtaacattattggaaggtggagactaacaagaggtgatkgtgtcaggagggtggagtcctcatgagtggattaacattgttactgaagtagtgggctagttataaaacgagtgggttgttataaaaagagatctgcccgtgctttctcttttgcatgctcacttccaccttcagcccttccaccatggatgacccttgctagatgctcttggacttcccagcctccaaaaccatgagccaaataaatgtctgttctttataaactatcctgtctcagttattctgttatagaacagaaaacagactaaaacaaaacatttggtatctagaagtgggttgttactctaacaaatacctgagaatgttaagtggctttggaactggataatgggtagaggctgaaagaatttggaggaacaagctagaaaaacacccatactgcagtgaataaagtgttaaaggcaattctggtgagggctcagaagacaatagaactagagagagcctgaatctacttatagatgatttaa

SEQ ID NO: 719141 - DNA, 550 bp, Homo sapiens
attcctccaaccagcagctgcataacagaccatgacagtgtggccacaatgattctcagagctatttcctccctacagctgcgtgccttcttcgttaaggagttgcctatgataaaagtgaggttgactgtctttttactgctagcatactcttcatgtgcttgtcctgccttaaatgatagattttcatctcccgaaggcatctctttccctttcccacctcacactgccattgtgctgagcccgaagggggcgtaccataaaagattgttgaacagagctgaccaccaattgatctaatccccataataaccaytcaaattagtttccataaagtggaatcattcctttggcaaaattcagaaagggcattcggaacagcaacttgacttctcagatctttcccccaaatcctgtagaactcatttgtatcattcagagttgagtctggggcctctcaggatatcaagtaatctgctcttagggaaaggaatttgtggtgacgtgtggagggtttaggtgtgtctcctttccattctggcttgagaca

SEQ ID NO: 719142 - DNA, 677 bp, Homo sapiens
tggcattcacacctcccaccactgcagtcacttcttccgtttacctagcatccagcacccactcatcacccgctctagtctgacggcccacagggtattgtggctggagcctagcatttccttttcaactgtttaagggatgcaacctgcttctcttttgttcttacacagacgcattctatgggcagcttccrtatctttggacctcagtgtcattaagtatcacatggcctcacaacaataaatggaaaacctaatcctcgtgtatgtgtttttaaaagtccgttccatttaaatgagtcataccattaagtcaacacacagtttcgctttaaaccctaagtcacttacataaatccccaggggttcactgtgaccctgtgtaaggcttcttccttttctgtaaactttcgttcttggattacacatttccagggatgactgccaactccttcttttgccttcagtcctctgagagtgtgtgtgcgtgtgtgtgtgtattttatgtctgcatcctggtactccaaataaaagccacctttcctgttttctcagcgacttgaatcaattccagttttccattttcccattagtgtttggtgtgtgtgctttgctggattggtcaaagaagctccccactctgcagaatttttgaaggctcctaaggtagagagcat

SEQ ID NO: 719143 - DNA, 713 bp, Homo sapiens
ttttcagtagagatggggtttcccatgttgcccaggccggtcttgaactcctgggctgaaacaatcttcccaactcgacctcccaaagtgctaagattacaggcatgtggcaccatgcccagtggtatttttctttaaatataatttttggtgtgttttaggtcaaatcactttatatttgaggtcatttggctcagaagtcctatacctcagcaatatatgttggaaacaggatgcaagtaactcaaacaggtgattaaagattaaacattttttaattccttaagttttcattctgtttccatattcataacacattctgatagctattaatttatatatgtggctatctgtgattctgtttatcaaaatttaggtactgtaactcccaattctgtgatgccagctgatcatttcctaatcaattcctagagaaatttcagattttacagaggctcctttccttaagcaaatcagtaatttccrctgtggtcattattttccagggctaaaatcctaagactcctaatatctattgtgtatattaggagctactaagaaaaaaaaatattctttttttaaaaatttatttattttcaagacaagagtcttgctctggctgtcgcgcaggctggagtgcagtggtgctatctcagctcactgcaacctctgcctcccaggttcaagtgattctcttgcctcagcctccctag

SEQ ID NO: 719144 - DNA, 2222 bp, Homo sapiens
  misc_feature 1540, 1541, 1542, 1543, 1544, 1545, 1546, 1547, 1548, 1549,1550, 1551, 1552, 1553, 1554, 1555, 1556, 1557, 1558, 1559,1560, 1561, 1562, 1563, 1564, 1565, 1566, 1567, 1568, 1569,1570, 1571, 1572, 1573, 1574, 1575, 1576, 1577, 1578: n = A,T,C or G
  misc_feature 1579, 1580, 1581, 1582, 1583, 1584, 1585, 1586, 1587, 1588,1589, 1590, 1591, 1592, 1593, 1594, 1595, 1596, 1597, 1598,1599, 1600, 1601, 1602, 1603, 1604, 1605, 1606, 1607, 1608,1609, 1610, 1611, 1612, 1613, 1614, 1615, 1616, 1617: n = A,T,C or G
  misc_feature 1618, 1619, 1620, 1621, 1622, 1623, 1624, 1625, 1626, 1627,1628, 1629, 1630, 1631, 1632, 1633, 1634, 1635, 1636, 1637,1638, 1639: n = A,T,C or G
ttcatataaattatcattttgatatacatatcttatggtttatgagaaaagagaaaaaataatacatcggttttgctacactttaatgggttttttttttaagggattttttttcaggtcttgtcagcaacatcaaacaaaaggtactgagtactccacagggtacagagtgctgccaagcaccttagaaaaattacatgacacggagaaaatgcgcctcttgctccttgaagagcttacagtctagggatttgacaactcacagtcttaggaactgggcaaagtaaggcaaattcttcatcccctagagctattgtggactgaatcattttagaatttggaattaatccaatcaagatgagagacaagactaaatttggctgagaattcattcaggctcgcatagtttttattaacatccgtctagtaaacagaatggacctaacagacaactgaaagtaaagactagatctcttgaagtgcaagggctacaacaacttaattgtggttacttattttaaaaagcaaacatactgaatggtatgactagggtgattacactagtttaaaaataggccaggtactgacactgcattcccctcatgcattgctcatttaaaatagtgaatattaaaatatgtgggctttacatctaacccacagaaagcccaccgcaaatgttctgtgtatcaaatatccacctcatgtgtactatgaaagttttatttatgccccattaagtcaaaagtaaattatagtaagctaatgacctgcatattttcatatggatgaatgtcagtatatctaaataggaaataaatggcgatcctatctacctatataaaaaaaatagaatatctttccagattttgcatactcctcactgtaagaagaggtatgcaggttttaaggtttcacaatcagttgtcagaaaaacagcasttatgcctgcagtatctcgttagcatctgactcaattatttttagattacattgtttagaagacattgtaaacccatctaaaactttgtaattattttgagatggttccaatgttaaccctagaatcatcatcagaaagagtaacaatgtgatgtagaagaacagctaatcgacatgactaaaaatatgctcattttcagaaaaacaatctggtcatctggaaacaatcacagctacaacctagggaacactcccatgtgggatactgatctggccaaggcacactttctaagcaggaaaactatcagatcagggtgaatttaggccacttcagaggtgctgcctataaacatccagacagaccttcttaggcagcagaactggtcccattcctctcaaagcagtttgacactaccctacccacatcaacccaaagcttgacgttaagtcaaaagagcatattggagcaaaagtgaacagatgtgtaaactctagcacattcttattgctgtattaagtctgaagatgagcacatcctacccacaacagtattgttccaggaagcagggtaggagtagtggtaaattagaaaatagannnnnnnnnnnnnnnnnnnnnnnnnnnnnnnnnnnnnnnnnnnnnnnnnnnnnnnnnnnnnnnnnnnnnnnnnnnnnnnnnnnnnnnnnnnnnnnnnnnnaaattaaaaaaattagccaggtgtggtggccaatctggaggccaacgcaggaggatcacttgagcccaggagttggaggctgtagtgagctatgattgtgccactgccctgggcaacagagggagactcggtctctaaaaataatgatagtaataaaaataaagaaaaggtattctgtgacagcattcattgtatttacaacacatgaacaaagaagtgtgcacatttgcctgagcataccatcctctcaacacacacacacacacacagacacacacactttttaaacacaagattcatccatatctttgctttacaacacagcatgttttgagtagtcagattcctatcttgtcaatgtgggacaactaatttgtaattgtctggaaattaactagtagacttgtggttttgtttgtttgttcttatggggatggaactgggatttatgtagttgtgttggcccacttgactcttgtcagaatctataaatgactaatgtatcagatttccaggacatatgtgaccagcacagcatagaaacaaatgtactttgtttttcacttgagattagaatatctca

SEQ ID NO: 719145 - DNA, 606 bp, Homo sapiens
tctgtttaaaaaacaaagcaaacccacaaatggaaaaagcaacaataataaagatttcccttgaacttctgtctttctctagttastatcaggtctttgaaataagggttacagtttctgtctgaaagagtgataagccctcctcccttctttaaactttctacttttcctcacccttctgcccctaccatagcactgttttcactgagatcatgaagggtactcctgagcaaagctcatgttgacttcttagtttcatgtcttaccatatcactccggtgcatttgatactttttaaaaaaaattattcctatgacctgccctcctacatctctgaccctttttagttccatgtctttcactgacttttcttcctgggtatgcgtctttgacattggtttactaaacttccatatttggccgtcttctcatgcctaatcagcctcatctaatcccacagtttcaaatagcattaataggctaatgactccaatatttttatctgtatgtctgagttctagatcttttccaactgcatactcaattctcttgagtgtccatcagccattcaggtcaacatgtcccaaaaagctcatttcactcttt

SEQ ID NO: 719146 - DNA, 606 bp, Homo sapiens
tctgtttaaaaaacaaagcaaacccacaaatggaaaaagcaacaataataaagatttcccttgaacttctgtctttctctagttagtatcaggtctttgaaataagggttacagtttctgtctgaaagagtgataagccctcctcccttctttaaactttctacttttcctcacccttctgccccyaccatagcactgttttcactgagatcatgaagggtactcctgagcaaagctcatgttgacttcttagtttcatgtcttaccatatcactccggtgcatttgatactttttaaaaaaaattattcctatgacctgccctcctacatctctgaccctttttagttccatgtctttcactgacttttcttcctgggtatgcgtctttgacattggtttactaaacttccatatttggccgtcttctcatgcctaatcagcctcatctaatcccacagtttcaaatagcattaataggctaatgactccaatatttttatctgtatgtctgagttctagatcttttccaactgcatactcaattctcttgagtgtccatcagccattcaggtcaacatgtcccaaaaagctcatttcactcttt

SEQ ID NO: 719147 - DNA, 829 bp, Homo sapiens
ttttcacaagtataattatcaaaaaggaactctataatatcagaggaggaaaatgtatcagttttctggaacaggaatattaaacrgtaagttcaaaagaatatgttcgggtcaccaagacatacttggaaatacaggtaagaagatggtagggtgtttacattcttgagatcaagagagaaatgagccaacgacatggccagggtatgacaaaacagcacaaagagttattacaaactgtactatgaaggctctgctctggttgtcttgcttatccttacactaatgatattacaataattcagcacttatgcggatgaagtaacttataatcaaaggcacagcagcacagcctactattaatatagctctactttgaaggaaggtctggggaggagatggaagggatcatatgcattggtaaaaggatgagattatagatggctgtatataaaaggactgtagtgagcatacatgctgggaccttccttgagtggcacagacctgctgtggtatctcctgctgatattgattacagtcagtgtaaacagatttcatgtttatgccttatattgtgttacttgacccatctgacaccactcctcacatagaaggaaaccccagagggagcagggtaggttagagaaactctaacaaacagttaaaatagcttcttaattattttgaatgccggactgatgttcctttgaaggcaatacagtaccagcagagagtcatgtggcagctagggtttatataagttatcttagcaaaaatagctcttgaattcattttgacttactaccagttggtaataattttcagtttc

SEQ ID NO: 719148 - DNA, 1536 bp, Homo sapiens
tttttggcaatagagagatcttgtgatatgattttctgtaaatttcactttacactgtattatttacagcatgaaaaacacttgcaagtgaggaaggccattctatccaaaagaatgtttctttctcaggtgttgaatggaggactcaattcaagtgagtctctaggctcactacagaaacagaagcccttggtgtctcaggcctctctgacttaggattatagaaatgatatgccactgtcaaagcaagtgttgagatgattatttcacaccaaatatcagataataaaatggaacaacagttttttcacgttattttttttaattcaaggtcacatcaagtaaaatgagtttaaaaatattttggaaggcctggaattagagagcaagtggaaaatttaaaatctacatcattcagcttaaactcttcaaaatggtgctcccttttcagatgacttacatgtgaatggaatgatcacgattcaactaatttgccagattaatgataaaactgattcagatttaaatcttctacttctgtaaacacttcaatacaataatgacccatttgatttgaaggatactagaataaaataataaagctataacaaatatgttagtaataaaattgttatattctaaaatctgttacttctatgacagtaacacaatgtactgcagatttcaaaatgactctttaagttttgaaattgattatccctgaaatatcaatatttttctagtgatctgttgcaaattctagagtttatatctattaattttaagtttgattatctttttaatttagcaatgcagcatcaaaagcaaatatctttccgatcaacaaatgtccaatcacctgatgtgcacagcttttggaagactatgctgatggtgtgacacggcatagtgaaggggacatcatctatcaagaaaacaaagcttctttagtgaatctagaccaacagcagctttgacatcatgaaagacagtaattgtggaactcaattatctatcagaatagaaataacaacataatatttgatttggttcttaataaaagtatcagtttttaacagggagagaggccgtgcatggtgggctcatgcctgtaatcccagcactttgggaggccaaggcaggcagatcacgaggtcaggagttagagaccagcctggccaacaaagtgaaaccccgtctctactaaaaatgcaaaaattagccgggtgtggtggcacgtgcctgtagtcccagctactcgggaggctgaggcaggagaaacatttgaatctgggaggcagaggttgcagtgagctgagatcatgccattgcactcagcctgggtgacagagcgagacttggtctcaaaaaacaaaacaaaacaaaacaaaaaacagaaagaagcaattaaccatcataggcaagattcagtctatctrtgccatattatttcttgtgtggtatccaaagccagaagtatctaaagaagtatacattttagtctgtaagtctccatgctttctgtgatggtgactc

SEQ ID NO: 719149 - DNA, 637 bp, Homo sapiens
tttctttcttcctttttttttttgccattatataaataatctgtgattttaacatataaaccaatttacaataaatttatatatttcttttagatatgtacatattggatagctaaggattaagagtttaatggagaatcagtaaatacgatataagaacatcttattttaaagtctgctagtatttcagaaagtaaattctataagagggagtaaaaacaaactaccatatattcaatcttatacccaccatagtaaactaagtaaaaaaatatgttcaggcatattacgtgagtttagaggtgagcaataccttagtgatacaactgatattcaaattttgtcaaagtgacaccagagctatgaaaaaatctacacgttaaaaaggcaggaaaatttcaaatgtttactacagagcttcttaggggaggctatgtgcagctatagaaaactgttattatgttctatgcggtagaagcaaaaattttwaaaaacttactttaaatagtagcattttagaagacagtacagaaatatccaagtagtgttaatatctctgccataaagacattcacaaattcaaaaacaaatttctactgaccatcttagtgtacagagtactgttctaggctctggg

SEQ ID NO: 719150 - DNA, 756 bp, Homo sapiens
tcctaagccaagctgtgctcatctcccctgtggctattcactaggatgctcacatctcttcctcaaaatgcaaatctgaacatatcacccatctccagaaaatccttccatgacttctcaggtctctaatggtaaagataaaactccccaggttgtctccatggcccagcacagttggtctccagccacagagcaggtccctgagttttcacagggtttatcatctgccttctggagcacactagccacctcttgcttatcctgcccagtcgctatgatgcagttgatttaatgcatctgtgtgctattctgtgggatgtccagattgtccctctctctctgcataatgactgaaggcaagagagttaatataactatgggggaaaactgcagatgaatatctttgtctgttccacatgaatgccaactgttctgatcctcttgttccattggaatagaaaagaacacgtgtgaagtttttaggtatccagtggtcatggtgtgccaggacatccccttcaaagtaaaacgcaagttgatgcccatttcatccttcctaccacaaagaaggatgcasagcacgtggcagggctctttgcattctggaggccacacattccacacctagaaattcttctctggtggtaccgaaagttgccagctttacacggagcctggaacagaaaagggctctacaggaggtccaggcagctaggcaaatagcttatcttttcgatcatatgatccagcagaccc

SEQ ID NO: 719151 - DNA, 596 bp, Homo sapiens
gagcatttttgtagtcttttaaatttatctatgcagttatctttcacagtgctctttactttttctggtggatgagtcactgtttagtgtcctttcttttcagcttgaactgcttcctttagcatggttggaggaagtctactagcaatgcaakctctcagtttttcatttattgggaaatttctttatttctctttcatatttgaagaataatgttgccagatatagaaatctggggtcacagtattttctttcagcactttgaatatgccaatattctggccttcatagtttctggtaagaagtcagttctctcttctcaccttctagcacttctgttacacatatgttgatatacttaatgatattgctcagatctgttaggtttcgttcatttttaattttttttttttgcattttattcttcaaagtggctaatctcaatggaatgagaagttcagggacttgtctaaggtaataaaactgtctgatagtagatgagaaactactgcacacgtccctgccttaacccagttatttgctcattccattgaattaaaagaagataaactaaaaatatacaacctctttttaac

SEQ ID NO: 719152 - DNA, 1121 bp, Homo sapiens
aggacgtttaaaggcaaagtcatctacttctgttccaggtgctaaatcagggaaaaatgttcaaacagtagatcaaccatctttgtcctctactattcttcaaatttcaagtcttttctgaatagaatggaaagaatgaggattctgataagaaaactatgttttaaactgaaaagaaatgtcttaagaacccaaggtaatcaaaataattatgtatttaacataagcttccttgaagggttctgccaccttactgggaagctataattttaataaataacgtaacacattgggaagcataacacattaagaagcaataattttaataaatatctgtttatattaatacttcaaatattggaagttcttcaagaaaccagtggcactatttttaagttattgttctctgagaaaagtatgaccttgaagctaaacttttggatatgtatgctgagaacttggaggagaaataatttatatgcaacttaactaagcagtttaaacatgaaaaatgtactaaccatagtgcacttaaatggttaaaccataaaggaggacacagaataccttgattatacttccaaggtgttggtattagattgtttcagataattgtacctgcatcttatttgtcctgacagggcacagattattctttggcctaggttgataaactgaactgcacctttattcacagtatgacctattccttcagcagagtctagacattttgtggcaatatttcagtgctgcttacttatacatatttggtagtttctttgagtggactaaatctccctttttagtccttgcactcatacttcttatctgaaaaaggaacaaaatacttgtagaaatctacttggtcaccttattctgaggatctagtcgtatgacctgtctttccatcttctctcagtaatttagaggaaagtccctatccatataatstgtcagataattcttacacaaaatttatacatttcatctctgatgaccactaggtagaagtccccctactgtcatgttggtttcataaatatcagtgttcatgcagtgtgtgggccgattcagagcttccatatacctacagttctatgctaaaaataagaggaaatcat

SEQ ID NO: 719153 - DNA, 730 bp, Homo sapiens
tctaataccagagaccaactttgaggctctgataaaacaccattctttcagagcagagtggggagcagccagtacctttgccaccctcactcagctggagttacttaatacattatgtctgtttcatccattttctaagtcatacctactggaataggtaatctattgcaaaagtatttctcaatccttgctgcatgaatcagtgtttttttttttaatacccatgtgcaagccccaaacacagaaattctgaattaacatatatggaagtctgggcatcagtattataataggttgagaaccattgcattcatgcccaaaatgaatgagtctagaattcgtaacatttatgtaaccacagatgtgctaaaaatgaattctaagaacacgatgagtatagcattctcctaatctccttttttacacagcctagacatctgccttgcaagcttascactttccttctcatactgagaatcaaattctgccctgttgtgtagaatattttgctagaacattagtatttggccttattctttttagtctttttctcaagagggttgatactatttaaacttctatcactgagaaagtaatgccaagcaggcagactacccaaagctataacctcaaccacctgtttctgaacaatagatctcacactaaattaggtccctttggaaataacatcaaatattactactctgaagtagctaatgtagttaggtta

SEQ ID NO: 719154 - DNA, 1836 bp, Homo sapiens
tttgtgaatatatagaaaaaactagttttggtacgaaagttggcattgtagatacagaggaagaaatgaagactgttagatttttcattggcaagtcatttgaatattaccaaatctttctttcactttccttagacccaagacctaaaataattattctcatggtcatgtgaattctgctgcagacaaaaagaaatatctaaagttaaagaaagcacaatttcttattaaataagaatgttagcgggtgaacaaataacaaaacacgactcattttttatgtaagaatatcaaagtgatatgagagacctggtgtcctgtcaggctcgtgtggctgaaatatcaatcccattcattttattcatttaagttgttctatgaaacctctacatattgagatacagtatacatattaaaacactaagatattgccttttgaagttatgcgaagtttgttacttatttaacaaaaaattattaactattcagtgaaagagactattgtatcaaagaactgtaataatatacattggtaagtatcattatgatctttcattgagcacctaacatgccccatctagctcattaactcacttaacaaatattctatggtatgtatatgctataattctgtcctgggcattgaatattcaagcatgagcaaaatatacaagctccctatacttgtggccttacatattggtattctaaagggtaactttagctgaaacatggtgaatacaaagaaaaataaagatcaaatggtatttctgtctttaggtctttgaggaatcaccacgctgacttccacaatgattgaactaatttatactcccactggagaaattctattcaaccctgcaatcccattactggctatatacccaaaggaatacaaatcattccattataaagacacatgcacacatatgttcattgcaacattactcacaatagcaaaaacataaaatcaacctaaatgcccatcagtgatagactggataaagaaaatgtggtacatatacaccatggaatactatacagccataaaaaatgagatcatgtcttctgcatgggcatggatggagctggaggccattaaccttagcaagttaacacagggacagaaaaccaaatactgcacgttctcacatgtaaatcagaggtgaatgatgagaacacatgtatacatagtggggaacgacatactctggggcctactggagggtgggaggagacagaggatcaggaaaaataactggtggatacttgatttcatacatgggtgatgaaataatacgtacaacaaattcccatgacacaagtttatgtaacaaacctgcacatgtgcccctgaatttttaattttaaagacttaaaattaaagttaaaaaaagaaaagatagtcccagctactcgggaggctgaagcaggagaatggcgtgaacccgagaggcggagcttgcagtgagcagagactcgtgccactgcactccagcctgggcggcagagaragactccgtctcaaaaaaaagaaaaagaaaaatatacagaagaatgaaaaaaaggcagtcacataaaaaatatgtctacaacatgaagaacatgggaggcatgatgatacaagatgaagatggaaaggcaataaaggtccaggccatgtaggacattgtaggctcttataaaaatattttaatgttggccaggcgcggtggctcacgcctgtaatcccagcactttgggaggccgaggcgggcagttcacttgaggtcaggctttcaagaccagcctgaacaacatggtgaaaccccgtctctaccaaaaacagaaaaatta

SEQ ID NO: 719155 - DNA, 638 bp, Homo sapiens
tgtcctgaaaatgacaggtaaactatcatcccagctttatctaaaacctagtgccttcgtatcttcaattatttggacagatgtggtattttaatttgagaaaagaattcaagaaaatagattgaagagaagagaagaakaattgaaaggttaagggaaacattgatcttccaggtgatagatcttataatttagcattgaaggaattctcaccaaaaaataatcaaaactctttatattacatttgcgaaatctggtatggcctgattttctttaaatgattttgtgcagccactgtgatactccattgtttgatcactaaagtacttgaacagttgatcaacagcaacttaactctgtttgctttaagaaatacaaaagctacaattttctgagggagagcacctccagcctgatcaacgcctccttgattctatgtctcctatccacctcacctgttcttcactgtacagtatccttccagttctataaaaacctgataaaataaaaacttccatcttatatacatactgataaaataaaaacttcagctgaattaaagttaaaagaatttagttaagcaaagaacaactcgccaattgggcagccacctgagacagcctagactcagagactcc

SEQ ID NO: 719156 - DNA, 3068 bp, Homo sapiens
taaaagaatgttgttttaggtaactaaatagtctgagaatgtgttacctaatccatgagtaaatatattaaaatgacatctgaaaaaaatctattgtttaataacttgtgaggaaaacaagagttgaaaaaaatgttgatgacttagaatccatcaacataaatcattggcacaaatgaaaaagattaaactttcaaacaattaagaattgtgcttcaaggctataccattttatcatgattgcttaacctcatgcttctgtaactaataagtttggatttgacagtcctctttctacatagaccactgctcttaacaacaacagcaaaaattctgtgagcttcaaaatttgagttattttgaattgaaacagacccttcattaatttgtccatttataaatatttgcacacatttatactatggaaagcactatgctacactttttttttttgagacagtcttgctcttgtagcccaggctggagtgcagtgcctcctgggttcaagcaattctcctgactcagcctcctgagtagctgggattacaggcacccgctatcatccctggctaatttttgtacttttagtagagacagggtttcgccatgttggcaaggctggtctcgaactcctgacctcaggtgatctgcccacctcagcctcccaaagtgttgggattacaggcgtgagccaccacgcccagcccattctacactattaaaggcacacgaagaatctaacatgcatacttacttaaagaagaccagggaaatggtttacagacagtgatcacagctttatttggtatgtaatcaatttagagtttctgtaaggaattttaaaatattaattagagtaaaataggatatgttaggataccagattatgagaagagacagatggataaaaaagagatttggataggataaggtagtgagaagagacgagaagagaaaacaagaggaaaggataggagaagagaggagaggggagaagacccatgggatatgtgtattttgcaatagccagttgttttgctgacacattaacaaaacttattctcattccatgcagtttcttaattccaaaatgtcacaatttttatcgtggtctgtaataacaggtatactgttctaagactagaaaacagtagactagagtagcctgaatggtaaaggtgagaataagaatgcatactctggatcaccctataaaatgtattccttagtgaaagtgttagtcaaaaagtttgaaagctagttgtggtgcaaactaaatgaatgcaaataattatgacataaagaagaaaatattaaatgtttaaagagtcaaaatatgaggattcagagatgggaaaagattacttcacttggagaaatatgatgatcattcaagtacccttggtagcacttctctgaaataggaaagacaatttcttcagagaattaaggggaggaggcagtgagatagtttcaatggaataggaaatgatcaccctataaattttccttttaaaagacattatttcctataaacatcaataatagcaaatacatacatagaattaagatcaaagatttgataaaatgtatttctttacattttaagtctgctttgtaataataatgccatamataaaaataattatcacttttcactccctagtatgtctacaatatcatcctagatactttatgtaattcattccgtacaaaaccattatgaggtaggtatttcgtataactcccacttcaggtgatgaaaattaactctgaaagcttgggaaacttacctcttggtcactcatgtagcatgtggatgagtgggtacagattttatatgcaactatatttctcccaagctgctgttctgaaccaccacattcttctactcttggcaagtatagggataattgactagagaaaaaaatgtttctaagtacatacagatgcattaatacagtgatgcttcagttataaagaaactagaatatgtgagagctgcctactctaaagaatctcacagtaactaatctactcgtatctttttataggttttccaagttggttcaaactaatgtgaactttctggatctggtccagtaatccacaatgcacacacaatatgaggaatagtagcttaacctcacttttctctagatggatttctgggtatgagtttcaagtcttttggcatcaaatactaaaacctccagtaatcccaatacacatgtgcaacaagacaattttagctacagcctcatgcataaaatacagctcaatttttattaaaaaagtttggaagaaacatattgggatatctatttacattttaatgggatatgggtctagggctacaatttccatcatatggaactagtttcctagtaaagtagtttgaatcctgctgacattttgccttagtgcctctcaatcatttaaatataacatttaagtttatgtaatcttccaacatttttaattttgttccgaaactcaaaaattagcccctagagtataagtgcaacatgtaaatatgcatcttacaaaatgccagaaataaaggatcgatgccaatagaatgagagaagcatattaataattttcacaactacttacagagcagtttgtaaagagcagcctgatagaagctcagccatttctctggcactatgatccttaaatctgggggagatttaaagtaatgaggtcgccagtattttttaatatgctccactccagttagagccttgggttttttcttcaatgtgacataaacctataaaattctctttcattcaatcctgctcctttttacctaggtgacacctatgaattaaaaaaataatttgtgcaatatgcatctgtataacttttctaaaacagttgaagcctcactgtgcatgtcctccttcctcagcattttctcttcacacctttcagagaaattcacaatcttgaatctgtttttatcattaccaacatatctttataattgtcccacctatccgttgttttgaatgttttgataatattttaatggtattattttatacatataaattcat

SEQ ID NO: 719157 - DNA, 1021 bp, Homo sapiens
tgatgataacatagtatatagagttttccaaacggttctatctaaaatatatcttttctaggaaaatttgggataattgttkcaaagaagtattttgtgtaaaacaatgacaaccacccttggccttatttaacaaatgaaacaattaagttttaaaaaacttgaatagttattcaaggttatatagctggccttcaaacccatgttgatctttcttactgtttaattgaactcatgaaaaagaaaagggtggcaatatactcaagtgtgatttcattccacatacaagtaagcagagtaaaccagacaaaatttcccaggacttggtaaaagagccctaacggagaaaataaaagtgcaggggcttagtagatgcaagacaaagtgtcctgttcgattctatttagttctgactggaattattttaattaataatggctgtataatccagaggcttgtagagagcttggaatatatttttgcaccagtatggattttttttctagcatttatagactgtatgggttattgaaagcttttcctaattcaaggtactctgtatatctttaaacacaatatttctgagatgtgtgtcaacaaggtgactttcctccagttagacaggaatcagaggggtggaggaatggtggatagtgttaaacacaaaaaggaataaaatattgggagaccgaggcaggcagatcacctgaggtcgggaggtcgagaccagcctgaccaaaatggagaaaccccatctctactaaaaacacaaaattagccaagtgtggtggtgcatacctgtagtctcagctactcgggaggctgagacaggagaatcacttgaatccgaggggcagaggttgcagtgaaccgagattgcaccattgcactctggcctgggtgacaaagtaaaacagtctcaaaaaaaaaaaaaaagaggaataaagtagtcaatcaatacaaagctaatgtgaggaaattactattctttttaacaattttgaaatgtttaaaattagta

SEQ ID NO: 719158 - DNA, 1021 bp, Homo sapiens
tgatgataacatagtatatagagttttccaaacggttctatctaaaatatatcttttctaggaaaatttgggataattgtttcaaagaagyattttgtgtaaaacaatgacaaccacccttggccttatttaacaaatgaaacaattaagttttaaaaaacttgaatagttattcaaggttatatagctggccttcaaacccatgttgatctttcttactgtttaattgaactcatgaaaaagaaaagggtggcaatatactcaagtgtgatttcattccacatacaagtaagcagagtaaaccagacaaaatttcccaggacttggtaaaagagccctaacggagaaaataaaagtgcaggggcttagtagatgcaagacaaagtgtcctgttcgattctatttagttctgactggaattattttaattaataatggctgtataatccagaggcttgtagagagcttggaatatatttttgcaccagtatggattttttttctagcatttatagactgtatgggttattgaaagcttttcctaattcaaggtactctgtatatctttaaacacaatatttctgagatgtgtgtcaacaaggtgactttcctccagttagacaggaatcagaggggtggaggaatggtggatagtgttaaacacaaaaaggaataaaatattgggagaccgaggcaggcagatcacctgaggtcgggaggtcgagaccagcctgaccaaaatggagaaaccccatctctactaaaaacacaaaattagccaagtgtggtggtgcatacctgtagtctcagctactcgggaggctgagacaggagaatcacttgaatccgaggggcagaggttgcagtgaaccgagattgcaccattgcactctggcctgggtgacaaagtaaaacagtctcaaaaaaaaaaaaaaagaggaataaagtagtcaatcaatacaaagctaatgtgaggaaattactattctttttaacaattttgaaatgtttaaaattagta

SEQ ID NO: 719159 - DNA, 912 bp, Homo sapiens
gggacaaatacataatttttccagaaacagatacagccttgtgcctttgcacaaaaatatgttrtttctgttgttgcttttttgcagtaattctgccaatgaaaagctcatgactgcctctggaggcagtcaattacctccacagcccactgtccttttccctctccatccaagcacacaacatgatacaaaacttgctctgggaaagtctctcattaatttgtgatacatatgaattaagcaacattttcaagaaaatatttaaatatttccaagtgctactgataacacaaactcctgactttcttctcttgtggctatgaattgtagttagcatatttctattgaatcatgcctccaaaatatatgcaagttgtagaaatgtagtttaaacattttccttttaactaatttctattattgaagtatttgtcaatgtcttccttgttcataaaatagagggaaatattagctcagcctgcagggctgatcatcataaaatatgaagaaaaggagtttgcctgcatcatctcaaaagcagtgatttcatgaatgcgtcagtttccatttatgtcaacatcatcgctttgtctcttatctcctgatttcttgtcctccagcaagtgcaactgttagaattctccaagtcagaagatctgactctgaaaagtaccctaagtttgttttgctatggggttgttcaatgtcactcaccctgcattcttcctcctgactggtatccctggtctggagagctctcactcctggctgtcagggcccctctgcgtgatgtatgctgtggcccttgggggaaatacagtgatcctgcaggctgtgcgagtggagcccagcctccatgagcccatgtactacttcctgtccatgttgtccttcagtgatgtggccatatcc

SEQ ID NO: 719160 - DNA, 912 bp, Homo sapiens
gggacaaatacataatttttccagaaacagatacagccttgtgcctttgcacaaaaatatgttatttctgttgttgcttttttgcagtaattctgccaatgaaaagctcatgactgcctctggaggcagtcaattacctccacagcccactgtccttttccctctccatccaagcacacaacatgatacaaaacttgctctgggaaagtctctcattaatttgtgatacatatgaattaagcaacattttcaagaaaatatttaaatatttccaagtgctactgataacacaaactcctgactttcttctcttgtggctatgaattgtagttagcatatttctattgaatsatgcctccaaaatatatgcaagttgtagaaatgtagtttaaacattttccttttaactaatttctattattgaagtatttgtcaatgtcttccttgttcataaaatagagggaaatattagctcagcctgcagggctgatcatcataaaatatgaagaaaaggagtttgcctgcatcatctcaaaagcagtgatttcatgaatgcgtcagtttccatttatgtcaacatcatcgctttgtctcttatctcctgatttcttgtcctccagcaagtgcaactgttagaattctccaagtcagaagatctgactctgaaaagtaccctaagtttgttttgctatggggttgttcaatgtcactcaccctgcattcttcctcctgactggtatccctggtctggagagctctcactcctggctgtcagggcccctctgcgtgatgtatgctgtggcccttgggggaaatacagtgatcctgcaggctgtgcgagtggagcccagcctccatgagcccatgtactacttcctgtccatgttgtccttcagtgatgtggccatatcc

SEQ ID NO: 719161 - DNA, 912 bp, Homo sapiens
gggacaaatacataatttttccagaaacagatacagccttgtgcctttgcacaaaaatatgttatttctgttgttgcttttttgcagtaattctgccaatgaaaagctcatgactgcctctggaggcagtcaattacctccacagcccactgtccttttccctctccatccaagcacacaacatgatacaaaacttgctctgggaaagtctctcattaatttgtgatacatatgaattaagcaacattttcaagaaaatatttaaatatttccaagtgctactgataacacaaactcctgactttcttctcttgtggctatgaattgtagttagcatatttctattgaatcatgcctccaaaatatatgmaagttgtagaaatgtagtttaaacattttccttttaactaatttctattattgaagtatttgtcaatgtcttccttgttcataaaatagagggaaatattagctcagcctgcagggctgatcatcataaaatatgaagaaaaggagtttgcctgcatcatctcaaaagcagtgatttcatgaatgcgtcagtttccatttatgtcaacatcatcgctttgtctcttatctcctgatttcttgtcctccagcaagtgcaactgttagaattctccaagtcagaagatctgactctgaaaagtaccctaagtttgttttgctatggggttgttcaatgtcactcaccctgcattcttcctcctgactggtatccctggtctggagagctctcactcctggctgtcagggcccctctgcgtgatgtatgctgtggcccttgggggaaatacagtgatcctgcaggctgtgcgagtggagcccagcctccatgagcccatgtactacttcctgtccatgttgtccttcagtgatgtggccatatcc

SEQ ID NO: 719162 - DNA, 912 bp, Homo sapiens
gggacaaatacataatttttccagaaacagatacagccttgtgcctttgcacaaaaatatgttatttctgttgttgcttttttgcagtaattctgccaatgaaaagctcatgactgcctctggaggcagtcaattacctccacagcccactgtccttttccctctccatccaagcacacaacatgatacaaaacttgctctgggaaagtctctcattaatttgtgatacatatgaattaagcaacattttcaagaaaatatttaaatatttccaagtgctactgataacacaaactcctgactttcttctcttgtggctatgaattgtagttagcatatttctattgaatcatgcctccaaaatatatgcaagttgtagaaatgtagtttaaacattttccttttaactaatttctattattgaagtatttgtcaatgtcttccttgttcataaaayagagggaaatattagctcagcctgcagggctgatcatcataaaatatgaagaaaaggagtttgcctgcatcatctcaaaagcagtgatttcatgaatgcgtcagtttccatttatgtcaacatcatcgctttgtctcttatctcctgatttcttgtcctccagcaagtgcaactgttagaattctccaagtcagaagatctgactctgaaaagtaccctaagtttgttttgctatggggttgttcaatgtcactcaccctgcattcttcctcctgactggtatccctggtctggagagctctcactcctggctgtcagggcccctctgcgtgatgtatgctgtggcccttgggggaaatacagtgatcctgcaggctgtgcgagtggagcccagcctccatgagcccatgtactacttcctgtccatgttgtccttcagtgatgtggccatatcc

SEQ ID NO: 719163 - DNA, 912 bp, Homo sapiens
gggacaaatacataatttttccagaaacagatacagccttgtgcctttgcacaaaaatatgttatttctgttgttgcttttttgcagtaattctgccaatgaaaagctcatgactgcctctggaggcagtcaattacctccacagcccactgtccttttccctctccatccaagcacacaacatgatacaaaacttgctctgggaaagtctctcattaatttgtgatacatatgaattaagcaacattttcaagaaaatatttaaatatttccaagtgctactgataacacaaactcctgactttcttctcttgtggctatgaattgtagttagcatatttctattgaatcatgcctccaaaatatatgcaagttgtagaaatgtagtttaaacattttccttttaactaatttctattattgaagtatttgtcaatgtcttccttgttcataaaatagagggaaatattagctcagcctgcagggctgatcatcataaaatatgaagaaaaggagtttgcctgcatcatctcaaaagcagtgatttcatgaatgcgtcagtttccatttatgtcaacatcatcgctttgtctcttatctcctgatttcttgtcctccagcaagtgcaactgttagaattctccaagtcagaagatctgactctgaaaagtaccctaagtttgttttgctatggggttgttcaatgtcactcaccctgcattcttcctcctgactggtatccctggtctggagagctctcactcctggctgtcagggcccctctgcgtgatgtatgctgtggcccttggkggaaatacagtgatcctgcaggctgtgcgagtggagcccagcctccatgagcccatgtactacttcctgtccatgttgtccttcagtgatgtggccatatcc

SEQ ID NO: 719164 - DNA, 1369 bp, Homo sapiens
gccaagtatttttaatttggatttaatcaaaataaaacaatcagacaaatataaaataactagcttggacttttgaaaaagacaatgtcatgaaagcctgaagaaaaaaaagtacaggggaactgctctagattaaggaaaattaaacaaacactgacaactaaatgtattttatgatcctaaattggatcctggattttttgttgttgttgttgttctgagacggagtctcactctgttgcccaggctggagtgcagtggtgtgatctctgctcactgcaacctccgcctcctgggttcaagcaattctcctgactcagcctcccaagtagctgggattacaggcacccgccaccacgcccagctaatttttgtatttttagtagagacagggtttcaccatgttggtcaggctggtctcaaaatcctgacctcaggtgatccacccgcctcagcctcccaaagtgatgggattacaggcgtaagccactgtacccggtctcttttgtataggtaaataatgatcaaatattggcaactttatacggtttatcctaatatttaaggctaaaaacttgctgtaagcactggtatttcccataagttaaaatattgatattacaaaattatttcttgttgatgagtgcatttatttatagtaaaaatgcaaatcaggcatgggaaagatacacaccagttttaggatagtagttactttagagaaggaagggatgatgaaggaatatagatgtaacattttatttcttacaaatacagcattaaaatataaataaacatgtacagcaaataaggcaggagagtaacatctgtttaattttgttagtgggtaaatcccacaagattttatacttagatttttttatcattcagttgaaaatatttcttatttaattatgatctgtgatttcttttttttcccctcaggcctggcctgggagagcatgatgtcaccacatggatctatgatttctttctttttaaaaagtctttgacttgtttggaagtctattttaaaacttctgatgctcaccatcactggccatcagagaaatgcaaatcaaaaccacaatgagacaccatctcacaccagttagaatggcaatcattaaaaagtcaggaaacaacaggtgctggagaggatgtggagaaataggaatgcttttacactgttggtgggactgtaaactagttcaaccattgtggaagtcagtgtggcgatkcctcagggatctagaactagaaataccatttgacccagccatcccattactgggtatatacccaaaggactataaatcatgctgctataaagacacatgcacacgtatgtttattgcagcattattca

SEQ ID NO: 719165 - DNA, 1250 bp, Homo sapiens
tgcagggctgggagaaacaggaaaggggtgggagtcactaacacgtacttagagaaggagacctctgagaaggaggtgcagcatggttggtgtgggtgtccctgagcttagaggatgagcccagcagggcagaccagactctgaggcagtgtgcaatgaggctgtgtgttgaaaaagcagcaaattagattcagccttctatcaggaggaactgcttctgccgaggtgaagaagcattgctagagcaatgctgacaggaagagtaaagcccttgggaaggcacaggaagtccctctccctcctccagcccagctggagggatccagctccccgtattgccagggtttaacatggagcatttgtcaaagcagaaatgtggtttgtggagtcccagtccttgtgtcacaaagcagggtagaagggtgagtttggaactgagataacagcccagtaaccgacacagacagagagcgcctgaatcatggaagtcatcactaagcattgaactaaaaacgcatggagctgcctgactttggtttcttggcatggggagaaagtagatatctccctgtgtgagctgcttgttcctggtctgcttttctgctatgaaccagcctctgtactgacacagccttgtcttattcagctcttgtcctccacagtgccttgcacagggctgctacattggtcaacattaatcagattgaactgaagcccccctcacagctagtgtggtcttgagggactgggaccscggctcagattcctgggcgtaagtatctgctccctccctcagcatgctaattcaggccagttttcacctctcctatcctccgtttcctcatctacaaaatgagggtatcaaaaccagttatctgggccagacatggtggctcatgcctgtaatcccagcacgttggggggctgaggcagaaggatagcttgagtacaggatttcaagatcatcctgggcaaaacagggagacctcgtctctataaaaaataaaaataaaaaaattagttgggcatggtggcatgtgcctgtatttccagcttctcaggaggccaagtcaggagaatcccttgagctcaggagtttgaggctgcagtgagccaagatcatgccactgcactccagcctgggtgatagagtgagatcctgtcttgacaaaaaaacaaacaaacaaaaacaaacaaaaaccagttgtctcattgggttgtgctgatgctaggcctgcttcacacacagt

SEQ ID NO: 719166 - DNA, 585 bp, Homo sapiens
cctctgctttttcaaagattccaaaatagactccatttccctaattgtttttcatattttaattatttgcccttcaaatactagtatgttttcaagatggataaaaatgaatcaatattttatttctttgttgattccttatttgacaagagcctgtacctaagcttgcatttatttaaaaaaaaaaaaaaaaagctgggcgtggtggcttatgcctgtaatcccagcactttgagaggccgaggcaggtggatcacctgaggctgagagtttgagatcagcctggccaacatrgtgaaacactgtctctactaaaaatacaaaaattagccgaaggtggcaggcacctttcatcccaggtacttgggaggctgaggcaggagaatcgcttgaacccaggaggcagaggttgcagtgagccgagatcgtgccactgcactccagcatgggcaacaggagggagactccatctcaaggaaaaaaaaaaaaaaaggttattctcggcctcaaacatcaaccccatgagaacctgagaactagcccttcaccaatcaaatgtaatgtttcaaatcttggaaccctaaa

SEQ ID NO: 719167 - DNA, 585 bp, Homo sapiens
cctctgctttttcaaagattccaaaatagactccatttccctaattgtttttcatattttaattatttgcccttcaaatactagtatgttttcaagatggataaaaatgaatcaatattttatttctttgttgattccttatttgacaagagcctgtacctaagcttgcatttatttaaaaaaaaaaaaaaaaagctgggcgtggtggcttatgcctgtaatcccagcactttgagaggccgaggcaggtggatcacctgaggctgagagtttgagatcagcctggccaacatggtgaaacactgtmtctactaaaaatacaaaaattagccgaaggtggcaggcacctttcatcccaggtacttgggaggctgaggcaggagaatcgcttgaacccaggaggcagaggttgcagtgagccgagatcgtgccactgcactccagcatgggcaacaggagggagactccatctcaaggaaaaaaaaaaaaaaaggttattctcggcctcaaacatcaaccccatgagaacctgagaactagcccttcaccaatcaaatgtaatgtttcaaatcttggaaccctaaa

SEQ ID NO: 719168 - DNA, 1129 bp, Homo sapiens
ctcagcaacttagagcgcttagactgcagaatatgaagtaatagagcagtaattcctcaatgtccttttcataatctgccaaatatgtgagtccattagtccagtgctcacttagaaaatgattcttcctgaaagtttttagttttcattgctcttcaaattagacactatgactaaattctctattaactraacagtatacacgaatggaagggatgaggctgtaccttttgaccatcctacattgcttactcttacaaggaacagattccaaatactaatataatttgaagtctgcttatagtcaaggtgagttcaagatgatatcatcagaagcaagaaataatgacagtgggaaggaattagttaagcacaccatcggtcataattgaaagaaacaaaaaggcaagagaagtttcctaatgcaatgaagagcacagtgttttctgcatagacatctagttgctgtctcctgcaggaagccctctgccttgacactgttctggattttcagctcttcctttcatggtccccattgctatggacttagattggaatgagtgagaagttagccaaagatggatctctgagaaacaccaacatttaaaagtcaggttcattaaaaataaaataaggggaagaggatgaaaaacattagagacatgaaagaaaagctgggattgtgtgggatcatagaaatcacagtggatagattttggagaagtaagtcataatataacacaatttaaggtagttctgttaaaaatggttactgctggccgggcgtggtggctcacgcctgtaatcccagcactttgggaggctgaggcgggcggatcacgaggtcagaagatcgagaccatcctggctaacacagtgaaaccccatctctacaaaaaatacaaaaaattagccaggcatggtggcgggcacctgtagtcccagctactcaggaggctgaggcaggagaatggcatgaacccgggaggcggagctggtagtgagctgagattgtgccactgcactccatcctgggcaccagagtgagactccatctcaaaaaaaaaaaaaaaaaaatggttactgctggctttgatgacaggtatttctctggaaacatcaacttctg

SEQ ID NO: 719169 - DNA, 583 bp, Homo sapiens
acaatgtcattccccctgccctgaaccccatggtatatgcactcaagaacaaggaactcaggcaaggcttatacaaggtacttagactgggagtgaagggcacctgatatggaaaagatatttcattttttgaaaattttcttcacatgtttttatatcatattctccaaytgctgcaaatggcagaacaacaaagaaatagcataatgaattggtggcaacaactgacactttagaacaaaggagatagaagtaatatttgaaatatttgggagtcaagcaaaaatcttcatcacaaagggtaacagtgatgctatttgtctcaaggaattcaaagaaaagactaatgtaatctacatttcatgttcttacccacttgtcttagctaaaacttccagacagtgttgaatagaagtagttagagcagatattgtgtcaatctattccttttaattgaagagcttaatattttacatttgatgtaataattgataaaataggagatacttctgcattttcatgatttgctttattatgtgtcttatatttttaatttgcaaaggacttgaatagacatttctct

SEQ ID NO: 719170 - DNA, 638 bp, Homo sapiens
agggccaggtgacttcacctgtagtagcacaagcgccttctcaggcggaggacagaggcaagtgccccaagtggagggacccaggaagaagggagataatgagctgtggggtctcagcccagcagggcggggcgcacctgaaggtctggcctcgatgacgtagcgggtgatgggccctttgcccgggtctccgctggaccagtgaatggcgatggcagagctgtaccgcacgatgatgggcacgccaggcggtcctggggcacctgcagacagcacacagaggcgagggatgtatggaacccagaacagccacccagcccgtcaccctgggctcgaggaggaacactgggtgacaaaaccaaccctggacagagagccgccagaagccctgcaaatgtcgcggcctgagagtrcatctcaggctgggctgccaggatggactgttgtccccctgggctacccctatgctccatattccaaatcccagggcagaagacaaatggaatggtccagaaaggtccctggagtagagccaggagacctgggttccagcccagaacgtgttagatgggtgattttgatcaattcacatagccttccagtgcctccgtttccccctctataagggccttttggaa

SEQ ID NO: 719171 - DNA, 765 bp, Homo sapiens
ccctgtctcacaggtcatggggggtaggtgctccctgaagaagtggcatttaaatcagactcagaggatgaggagtccgggaggtgaatggcggggacaagcatgtttagagaaccaaagattcacctagcttttggcctgagtgtctgggcagtttcactttttctgagcaggaaagactgagggaagaatggatttgggggagtttgagtttgatctcagatacatggaagcygattcaaatggaaatggcaagctgttgtgaagcgagtgttatggaccaaatgtttgtgtcctctcaaaactcacacacagaacccttaatcccaatgtgatggtattaggacttggaggtctttgggaagtgattaggtttaggtgaggtcctgagggtggagacgccatgatggaatcagtgtctttgtaagaagagaatgaggccagcgttcagtctctctctcctcgccttgtaaagacacagcaagaaggtggccatctgccagccagtaagagagccctccctgggaacaaaatctgccagcaccttgatcttggacttcctagaactaagagaaataagggtctgttgctttttttttttttttttttttttttggagtttcgctctgttgcccaggctggaatgcaatggcaccatctcatctcactgcaacctccgcctcccgggttcgagtgattctcctgcctcagcctcccaagtaggtgggattacagacatgtgacaatatgcccggctaatttttg

SEQ ID NO: 719172 - DNA, 1822 bp, Homo sapiens
cagtaaatgccctggattctcaggccattggtcccaaactgagaattacaccaagggcttccctggttctgaagatttcagctttggactgagccaccacgctacagcatccaaggtccttaaactcacagatggctgtcttgggaatgctctgtctctacaatgttacatgagtaaatccccaaacaaaatgcctttcatctaactattgtctatctatctatcaactctccatctatgtatctatctatctacctacctacctatctacctccctgtagttctgtctctctgaaaaaaaaatgacaaatacacccataaagacttcagccaaatggtgcaatactatgtctttctctagttgctcctccaccacccctgctgcttatgagtgtatgtcctggagagctcttctctttccatctgcacttcaaggaatgctgccctcttcttactgggattggttagtaatacatgactcatgccattatacacattttgttgagytgcctcctctgtatttcactttacaaacacacatggacatcacttttctcccacttagcactctcctagagagtggttaccttggtagaaataaactagacacaggtcagacaggagccacagggtgtcttacagtataaacaagtactctgtgagaaggatacctggatgtaagctggacagttgggctttaggccatcgaccaggataagtaagcatcccatgaaaggcacagccagtaccaaaccctgagtcatattgggcaaggctataggttatagccaccatccagaggggccttaacagcaaacagaagtaaaaataaaacacatgctgtgagataattttagaaactatagtttcaggaatccttgagagggaaagtaaaactggcaaggcattatttgaaagtttgcactggggtggcagctctccaacgataaagaaaaatctcaggccaggagcggtggctcacacctgtaatcccagcactttgggaggccgaggcgggtggatcacaagctcaggagattgagaccatcctggctaacacggtgaaaccccgtctctactaaaaccacaaaaaaattagctgggcatggtggcgggcgcctgtagtcccagctgctggggaggctgaggcaggagaatggcgtgaacctgggaggcagagcttgcagtgagctgagatcacgccactgcactccagcctgggttacaaagtgagacgctgtctcaaaaaaaaaaaaaaaactttatctagaggatttcagccctaatgatagagatacaaagaatgatctctataacttatttatttatttatttatttatttatttatttatttatttatttattcattcattcaatggcgtttcactacattgcccaggctggagtgcactggttattcactggcacaagcacagcacactacacagcctcaaattcctggtaccacatgttcatcctacccaccctccctagcagctgggactgactataggtgtgtgccaccacacttgcacagatacaatttttattttatgttttttttttggcttttaaagtcaaatttattacattgttttgtacagcaaaattcacccttttacatgaactattttattcatttggacaatgaatacaggaatataaacatcactgctgtcaagattcaaaaaatcttaccattgccccagaaaggtgcttcatgccccttagatacaatttttaaatcaagaaagttgcatttctttttcttctttcccatagtcatcataatcatgtgaagaatgatcatacaaatcattt

SEQ ID NO: 719173 - DNA, 1822 bp, Homo sapiens
cagtaaatgccctggattctcaggccattggtcccaaactgagaattacaccaagggcttccctggttctgaagatttcagctttggactgagccaccacgctacagcatccaaggtccttaaactcacagatggctgtcttgggaatgctctgtctctacaatgttacatgagtaaatccccaaacaaaatgcctttcatctaactattgtctatctatctatcaactctccatctatgtatctatctatctacctacctacctatctacctccctgtagttctgtctctctgaaaaaaaaatgacaaatacacccataaagacttcagccaaatggtgcaatactatgtctttctctagttgctcctccaccacccctgctgcttatgagtgtatgtcctggagagctcttctctttccatctgcacttcaaggaatgctgccctcttcttactgggattggttagtaatacatgactcatgccattatacacattttgttgagttgcctcctctgtatttcactttacaaacacacatggacatcacttttctcccacttagcactctcctagagagtggttaccttggtagaaataaactagacacaggtcagacaggagccacagggtgtcttacagtataaacaagtactctgtgagaaggatacctggatgtaagctggacagttgggctttaggccatcgaccaggataagtaagcatcccatgaaaggcacagccagtaccaaaccctgagtcatattgggcaaggctataggttatagccaccatccagaggggccttaacagcaaacagaagtaaaaataaaacacatgctgtgagataattttagaaactatagtttcaggaatccttgagagggaaagtaaaactggcaaggcattatttgaaagtttgcactggggtggcagctctccaacgataaagaaaaatctcaggccaggagcggtggctcacacctgtaatcccagcactttgggaggccgaggcgggtggatcacaagctcaggagattgagaccatcctggctaacacggtgaaaccccgtctctactaaaaccacaaaaaaattagctgggcatggtggcgggcgcctgtagtcccagctgctggggaggctgaggcaggagaatggcgtgaacctgggaggcagagcttgcagtgagctgagatcacgccactgcactccagcctgggttacaaagtgagacgctgtctcaaaaaaaaaaaaaaaactttatctagaggatttcagccctaatgatagagatacaaagaatgatctctataacttatttatttatttatttatttatttatttatttatttatttatttattcattcattcaatggcgtttcactacattgcccaggctggagtgcactggttattcactggcacaagcacagcacactacacagcctcaaattcctggtaccacatgttcatcctacccaccctccctagcagctgggactgactataggtgtgtgccaccacacttgcacagatacaatttttattttatgttttttttttggcttttaaagtcaaatttattacattgttttgtacagcaaaattcacccttttacatgaactattttattcatttggacaatgaatacaggaatataaacatcactgctgtcaagattcaaaaaatcttaccattgccccagaaaggtgcttcatgccccttagatacaatttttaaatcaagaaagttgcatttctttttcttctttcccatagtcatcmtaatcatgtgaagaatgatcatacaaatcattt

SEQ ID NO: 719174 - DNA, 922 bp, Homo sapiens
ttgtctttctctgtgagtttggcgcacattgttccttacccagcttcacattgacaggtacatccatataggcggtggtatagtaatgatcgagtaattgcaggaagaatgaaacaaaatgttgtggaaaaacttatggcaattggacatggcttatcacaggtaaaaatggatgatttatctggaaggatggattgcaagagagtgcacatcaaacaatgaaggacagtgacatctgagagacgtgaaacaatgagggctactgttgcctcaggttactgcttggggagagtttccaggctgtggtgtggcacggactctggaagatacttggagttgagaagatggaactgacagtctggacaaagaggtggctgaatttcataaagccattctccatggctgcaggaggagggagcatgcatgccaacagccatgcaggctggactgtggtgccatcattactccactgagacatggttcacaggagtactggagcagtacagaaacaaaaagcaaagatacaaagaaaagtaatttaaatgatttctttaataaagagtaattcacctttatgctttcgcctaatttctgactacaaaaagacaaagttttccatgactcagtgatcttgcatccaacccaagaatgaaggaatacacactgtttagaaacaaagtaaatggtgtgttaggtagattcagtcaccctgtgtggacaccaacctgcctttcctatgttatcctgttagttgtggctggtaaaatcactacattaygaaataattaaagtatagttttctacttataggagaacaatacatttgtcaccaaaaggagaagccaataaaggtttcttccttcattgattttccttaaaaaaatctccagtttcctttgcatcttaaaaatattttttctct

SEQ ID NO: 719175 - DNA, 922 bp, Homo sapiens
ttgtctttctctgtgagtttggcgcacattgttccttacccagcttcacattgacaggtacatccatataggcggtggtatagtaatgatcgagtaattgcaggaagaatgaaacaaaatgttgtggaaaaacttatggcaattggacatggcttatcacaggtaaaaatggatgatttatctggaaggatggattgcaagagagtgcacatcaaacaatgaaggacagtgacatctgagagacgtgaaacaatgagggctactgttgcctcaggttactgcttggggagagtttccaggctgtggtgtggcacggactctggaagatacttggagttgagaagatggaactgacagtctggacaaagaggtggctgaatttcataaagccattctccatggctgcaggaggagggagcatgcatgccaacagccatgcaggctggactgtggtgccatcattactccactgagacatggttcacaggagtactggagcagtacagaaacaaaaagcaaagatacaaagaaaagtaatttaaatgatttctttaataaagagtaattcacctttatgctttcgcctaatttctgactacaaaaagacaaagttttccatgactcagtgatcttgcatccaacccaagaatgaaggaatacacactgtttagaaacaaagtaaatggtgtgttaggtagattcagtcaccctgtgtggacaccaacctgcctttcctatgttatcctgttagttgtggctggtaaaatcactacattacgaaataattaaagtatagttttctacttatargagaacaatacatttgtcaccaaaaggagaagccaataaaggtttcttccttcattgattttccttaaaaaaatctccagtttcctttgcatcttaaaaatattttttctct

SEQ ID NO: 719176 - DNA, 1800 bp, Homo sapiens
aaatcaccagagggatttaagagtctatttgcacacacagaagaagccatgaacttgaagagaagataatggaaaatactgactctgagaaacagaaagaataaaaaataaacaatgagcagagactaatgaatctgtgggacatcatcaaatagaccaacattcatattctagaaggataaattatgttattaaaaagtttacccttctttcttttcacctttcttccttcctccttccccctcctctttacttttcttcctcttccttygtcttcttctttctcgccttcattatccctttcgctgtttctctttctccctttctcttttttcttttctttcaattttctcaattactaagagatgtttaagtacccttaccctgttagtagatacggttatttctccctttagttctcttttgagatttatagtcactctaagtaaagagataacccaaacataagcgtcaccaacaggctttcataccattcttaatttggtcctgtaattcttcattgctgtattaactttctgatgcttttaaggatgttttataacaaattgtttagttttttccactggaatgtttattctgaattatctaattcatattgtaagtatagagggagtttaatatgaaattattaaactaatatttgtgaaagaatgtatttgtgcattcaacaaatatgttaatcatcagactgttattgggcagctgagcatacaggaataaaaataacacaatttttatgtgcacaatatttatggaatgcgttactggaccaaataaataatttagttaataacatgacaaagaacagaaattgtatacactatagagcatagtaatggaataatgaatgattaaagttattaatattaggtagaaaatgaagggtataaatgagagcagaactcaaggaagcaagcaattcaccttatgaggaaagagttacctgtggataaaggagaaactgaaaaatttacaagtcaagactttttgagcaaaagcaaaaatatgactattagtcaccaattcagtagagtgaaaaaaaaagttgaagagatatcttggaagtaaaccatgttgtggaagagcatgtagggttttgataatcatgggatgattctgaattaattttaaatgcgataggaatatatgagataatttcaccagagaataacatgattgtgtttgcatttcaaaggggtgtatctggtgcactgtgtagaataaataggttatgtgagcaaataaattgggaggctactctaatccagagaaaaaaggtagtgacttaggtgagaatgctgtcaggatgagtggtagtagtggtgagaagtcgttaggccatggatgtatttcataggactggccaagagaactgcagctaaattggagtgtagggagtgaaatggagaactcaaagatgactctcagcactggaaggtgacagctgtcactgaagcatgctgatgcctcttattaagagagttacgtgggaatggcaagatcaaaacttctcactttcaaatttatgaaaaaatattgttttcagaacgaatgactttgggatcagaaagccaccattctaattgatggttccacgactacacgggctcacactcccaagagcaaaagtaaatcatcacaaaggtgcttcttgataattctagagaatggagaattactgtaacatctttctgattttaggagaggtagcagttccctttttagccaaaacgctatttttttttaaagctcagccaagagactccattataattttca

SEQ ID NO: 719177 - DNA, 632 bp, Homo sapiens
ggctttttgcccgcgccaccactgctttttgcacctttttgcccccgccgccgcggctatttgccccccgccgccgcgacgttatatggttttttgctcccactgctttttgcctccgccgccgcggctttttgcccccccaccaccgcagctttttgcgcgtctcggctttttgccccatggccatcgtcagaagtgtgagtggaacagagkgaagggaaagctgttttcttcgaaagctcaaaaatcttcaacttttaaatagggataagtgttatttttgctccaagcacacatttgagaaatcttccatttagcggatctgatgataaacccacatttttgtttgttttaatctgaaaatgtatttgtatggttcttggaaatatttttttcatataaaattatagtttatcagcttatttcaagttttatttaccatttgataattactcctaaaatgtcattgattaaagaaagaatcatctattgctccaactgctctttactaaaggtaatttgtctttttaacctcatcaggctccttttaagctctcaaactgaccttattttttttttacagattcaatgcattaagtcaatttattatttatgatgaatttatttatgta

SEQ ID NO: 719178 - DNA, 632 bp, Homo sapiens
ggctttttgcccgcgccaccactgctttttgcacctttttgcccccgccgccgcggctatttgccccccgccgccgcgacgttatatggttttttgctcccactgctttttgcctccgccgccgcggctttttgcccccccaccaccgcagctttttgcgcgtctcggctttttgccccatggccatcgtcagaagtgtgagtggaacagagggaagggaaagctgttttcttcgaaagctcaamaatcttcaacttttaaatagggataagtgttatttttgctccaagcacacatttgagaaatcttccatttagcggatctgatgataaacccacatttttgtttgttttaatctgaaaatgtatttgtatggttcttggaaatatttttttcatataaaattatagtttatcagcttatttcaagttttatttaccatttgataattactcctaaaatgtcattgattaaagaaagaatcatctattgctccaactgctctttactaaaggtaatttgtctttttaacctcatcaggctccttttaagctctcaaactgaccttattttttttttacagattcaatgcattaagtcaatttattatttatgatgaatttatttatgta

SEQ ID NO: 719179 - DNA, 590 bp, Homo sapiens
tgacctcagtggggtgtcctggagaggcaggaaccagggtttacagggtgcagatcctactgaagcaaatggacgtggcatccgtgggcagagctggctgtggctggccttccagcctggatgtctcmcccccccccgcctggggtgtcaccagatgcacccagagaccccttctaaacctggggggatgtgctgacctcagtggggtttcctggagaggcaggaagctgggtttccagggtacatatcctactgaagcaaatggacgtggcatccttgggcagagctggctgtggctggccttctagcctagcctggacgtctcccccactgcctggggtgtcaccaaatgcacccagagacctctcttctgaaagcccattcatgggaagcctccaggtctcctcagcaggcagcatcacgtctgatttcactgcgttatcaggtaatgcaggcctgttctacctgtgtgcgtgagcgcgtgtgtgccgtgtgggagtgtgtgtgttgatgtgggtgtgggtgtgtgcttgtgtggctgtgtgtgtgtgcctgtttatgtgatgatgagtgtgtctgtgagtctgtaa

SEQ ID NO: 719180 - DNA, 590 bp, Homo sapiens
tgacctcagtggggtgtcctggagaggcaggaaccagggtttacagggtgcagatcctactgaagcaaatggacgtggcatccgtgggcagagctggctgtggctggccttccagcctggatgtctcamccccccccgcctggggtgtcaccagatgcacccagagaccccttctaaacctggggggatgtgctgacctcagtggggtttcctggagaggcaggaagctgggtttccagggtacatatcctactgaagcaaatggacgtggcatccttgggcagagctggctgtggctggccttctagcctagcctggacgtctcccccactgcctggggtgtcaccaaatgcacccagagacctctcttctgaaagcccattcatgggaagcctccaggtctcctcagcaggcagcatcacgtctgatttcactgcgttatcaggtaatgcaggcctgttctacctgtgtgcgtgagcgcgtgtgtgccgtgtgggagtgtgtgtgttgatgtgggtgtgggtgtgtgcttgtgtggctgtgtgtgtgtgcctgtttatgtgatgatgagtgtgtctgtgagtctgtaa

SEQ ID NO: 719181 - DNA, 590 bp, Homo sapiens
tgacctcagtggggtgtcctggagaggcaggaaccagggtttacagggtgcagatcctactgaagcaaatggacgtggcatccgtgggcagagctggctgtggctggccttccagcctggatgtctcacccccccccgcctggggtgtcaccagatgcacccagagaccccttctaaacctggggggatgtgctgacctcagtggggtttcctggagaggcaggaagctgggtttccagggtacatatcctactgaagcaaatggacgtggcatccttgggcagagctggctgtggctggccttctagcctagcytggacgtctcccccactgcctggggtgtcaccaaatgcacccagagacctctcttctgaaagcccattcatgggaagcctccaggtctcctcagcaggcagcatcacgtctgatttcactgcgttatcaggtaatgcaggcctgttctacctgtgtgcgtgagcgcgtgtgtgccgtgtgggagtgtgtgtgttgatgtgggtgtgggtgtgtgcttgtgtggctgtgtgtgtgtgcctgtttatgtgatgatgagtgtgtctgtgagtctgtaa

SEQ ID NO: 719182 - DNA, 641 bp, Homo sapiens
gaaggtttacccattaagagacagaacaaaatcatagaagtaaaaacagtgtgaaaatagttgaggaatagaccagtaaactagtggaacaaaaatttatttttatgtttatttactttttttgagacagagtctcgctctgtcacccggactggagagtgcagtggtgcgatcttggctctctgcaacctccgcctcccgggttcaaacaattctcctgtctcagcctcctgcgtagctgagattacaggcatgtgcaaccatgcctggctaatttttgtatttttttttttttgagacgaagtctcgctctgtcacccaggctggartgcagtggcacgatctcagctcactacaagctccgcttcccaggttcacaccattctcctgcctcagccttccaagtagctaggattacaggcgcccaccaccacgcccggctaattcttcatatttttagtagagacggggtttcaccgtgttagccaggatggtctcaaactcctgacctaaagtgatcagccagtctcgtcctcccaaagtgctgggattacaggcatgagccaccacacccagcaaagtggaacagaatagacagccgtaatggttccatgtatatttgggtgcttactatacaataa

SEQ ID NO: 719183 - DNA, 641 bp, Homo sapiens
gaaggtttacccattaagagacagaacaaaatcatagaagtaaaaacagtgtgaaaatagttgaggaatagaccagtaaactagtggaacaaaaatttatttttatgtttatttactttttttgagacagagtctcgctctgtcacccggactggagagtgcagtggtgcgatcttggctctctgcaacctccgcctcccgggttcaaacaattctcctgtctcagcctcctgcgtagctgagattacaggcatgtgcaaccatgcctggctaatttttgtatttttttttttttgagacgaagtctcgctctgtcacccaggctggagtgcagtggcacgatctcagctcactacaagctccgcttcccaggttcacaccattctcctgcctcagccttccaagtagctaggattacaggcgcccaccaccacgcccggctaattcttcatatttttagtagagacggggtttcaccgtgttagccaggatggtctcaaactcctgacctaaagtgatcagccagtctcgtcctcccaaagtgctgggattacaggcatgagccaccacacccagcaaagtggaacagaatagacagccgtaatggttccatgtatatttgggtrcttactatacaataa

SEQ ID NO: 719184 - DNA, 3474 bp, Homo sapiens
cttccagtagtatattcctgtataaaccatttccattttattacaaagtcagctcttctggtcaatggcttccttatcagaatttttctctgacatcacccaagacatcataggtatatcagattttaagattatcatatgtatttcagttattggggcagtttcaattaatgcccaaaaaatagcagccccacagcaacacaataatgacatgtactatactgccccatctggaaattttttggttcccagttccagtggtccccatcaggccccccttacgcactttttttttttttttgagacggactctcactctgtcacccaggctggagtgcagtggtaccattttggctcactgcaacctccacctcctgggttcaagcgattcttatgcctcaacctcccaagtagctgggattacaggcacatgccaccatgcatggctaatttttttttttttttttttttttttttttttttttttttttttagtagagacagggtttcaccatgttggccaggctggtctcaaactcctgacctcaggtgatctgccctcctcaacctcccaaagtgttgggattaaaagcatgagccactgcatccggcccacttatgcacattttaacttcagtctgtagaaatgtaagttgcagatacttccaaagtcagaatatggatttttaagggcctaatattgattcagccatcacttcttgcaattcagacagttggctgttgcgaagagtcccattcaaacatagccttccttcagagactcttttttctttttattttttgagacagggtcttgctctgtcacccaggctggagtgcagtggtgagatcacagcttactgtagcctcaacctcttaggcataaatgatcctcccgcctcagcgtctggagtatctgggacaacagacacatgacatcttgcctggttaatttttggattttttgtagagacaggatttcaccatggtgtccaggctggtttccaactcccaggctcaggcaatctgcctacatgggccttctaaggtgctgggattacaggcatgatactattttgcacaggtcaaaactgaagctcagacaagatcagaaacttgtccaaggtcacagagtaccaaaactcagggaggaaaagactcctggttgcctggttatccaacatctattcttccctttacttattagtaaaatctgtaaattttggctgagcacataactgcctagtttgaaatcagcattcccaagcctccccaggataatctgtaaaactcagttctgatgaatgggatgggaacagatcattcacgctcttataaaaaaggggcatgtgctttcgttcttttctcctcttcccactggctacaaagatgacttgcttatgggaacaggagaaaccctgttgatggtaattgccaaacagatccactaggatttggagccaggttggtcaggtgctagagcctatgctgtattaggctttcaaaggtaagagtgtttgaagaatttaccaaaacttagaggtaacctgttctygggatgccagcaggctttggcaatgaacctacatgaggttggacataggctccaacattgactaattaaggaactatgggcaagtttcttaatctgtcttttttcttttttttttcactgttccaaagtttaattaaaaacacaatttacaaatatttaatatcttctgaaaagcatttctaagttaagaatgaaaaagtatgtacataatatataatcaaataccaggcagcctcaacttccaccaggtccacactcagcaacatccgtctttttaggtttttcagtgtcttctgtcaaatccacaaagttgttttccatgacgggggaaggaatggaaatacccattgcttttcgaactccatacatgcttacgatatcacctggagttacttgctgtgcaagttctttaaggttattggtcacttgttcagcaagatgcatttctctgtatgagggacccaagagacagatcatgttgggagggggtctggtgctcaaacgttcattctgggcttcctggagttccctgagcaatctggtggtctcaccaaatttcttctggaatatttcagcttcttcagagtcaaaaacttcaactggaacgccaaaatttgttactgctttcagcgctatgagcctgtcttgagtattggactccaaacgccctgggggctctacttctgtaatctccatttttttttgctgtgtcaagtgtcttagtatggccttcatcttcaggcaatgacatctccatctcttgtagggtcctggaatgccctccttttgttaaaacatccagtaaactatctgccatgacatatggataatcttggcacgtggccaaaaactcatggatgctgaaaacgcttggaagatcagagtcttccccataggttgaatagattaaatcagaatcatccttgctgatattcgcaaatgtggagtcataatgcggtgcataagaaccgtagggcccataattcaaatataacactggagtgactttgttccttttatcctctttgaacccctgcaaagtattcactccagactgaagtcttccagttgtcattcccagtctcacagggcagtagcctggctctcctacaatgggatccacaggatggagaagtcccaacgtcgttgttccatctggttttcttctttcaaattcgcactgactgttcacaagccgcctggtcagttttcctccagattccttcacaatgcggtcaagatgctcctgctctctctctaaattattgcttttaaacttatcttcaagcgtatctttttctttttctttgctgggactcttgaaggcgtgtgcttcggcatctccagagtcctctctctctgccagcagcctccgtcctccccactctgtgaggtgtctgttccatctttctgctttcgagttttctgcaagtcagccatgaagtctatgctctgcttcaggctctgaattctttcctggctaagaattttcatccctgagtgcaacagcttctttgcagctttataataaatggtctctggtttattgtaaatcatggcattagtacacattagtttgaagttatcctttagttcttctatggactgatagtcattgttcttgatcttttctttcatggtactaaaatccattgggtgtttaatgatcatggagtagccaggagcaataaaatcagtcacaggaaatgaaaagaaagcacttggatcttttctctacaattgtctcatcagttgattcaaagcttcttgaaggggtgtctgttctacttcttgtttggctaaagagcttgtgagaggcttctcagggggcaagtctaatctcacaggggcgtgacactggaggtctttttctgcctcattctccacccggtctcgatctcgcttctttttatcctcct

SEQ ID NO: 719185 - DNA, 1719 bp, Homo sapiens
ttttctcaggaggtgtttgtgctttaattgacttaacagttcttatccaaagcatggtctgactgcccatttgggtaaagtttttcttttgttttaaaaataatgatattcaggaaagttttaacattttataaatgttgaccttgcatataagtttataggttattatatatatatttgaagtgctgttatcagtgagtttttccccactgtatttttgcatttgttattactgcttttataggtatttgcctatttttcccaaggattcttatgactgaaaaaacctgaatgtgaatgatcacatactatagaatgcacagctattaagtatagagctcagtgatttttaaaaaccttgcacacttgtgtcactaccacccaggagacactacaagccatacaagatcctcctgggcaatgccctccctctggggggttcgtttctcatgctcaatgtcaagcctatgaaaagtcaactatgcttccaacagcaatactttgtttcctgaatgtacctccttgatctgttcttccactgttaaaggagtttgattacttcccgtttttggcagtgatgacaaactagttttgagcatcttgccacaggctttggtgtacatctgtgtgtgctcctgttgagtatttaaacagggtggcagagctgggtggtagggcagttggtgagccccttggggtctccctctcatgcccagcagttttccagagcacacagcccgtgggagccttctcctcttggttaccagcatgtgatgtcactgtacaacagcctttagccattttgtttggtgtgtgttggttagcattggggtttcaatttgtgttgcatggtgattaagcatgttgagcactttttcttgtgcttgctggctttcaaatgacctttatcatcagacgcctgttagaatctcttgtccactgaaaagagtgggttgtttggctgggcgcggtggctcacgcccgtaatcccagcactttgggaagccgagatgggatgacagcttgaggccaagagttcatgaccagcctgggcaaaagatcccatctcttaaaaaagcaaggggctatttgtctttgtgtggtgatttgtagggcttctttgtctattttggacatacacctagctcatgtctatgtattgcaagtatgtcgtccctgtctttgacttgctttttwaaaatttgtaagggtttcttttgatgaagaggttattgattgattgttctgcctatttctattggaatattgcttctgcgctagtctctttttccttcttccactcaaattacacatttgttagggctttttacatcattttatgtgccttagttttttttgtttgtttccctgtttgtttgtttgtttttttctggagacagagtcttgctctgctgccgaagctggaatgcagctgaatgatgtcagctcactacaacctctgcctcccgggttcaagcaattctcctgcctcagcctcccgagtagctggataacaggtgcctgccaccacgcctgactaattttggtactttatagtagagacagggtttcaccatgttggccaggctggtcttgaactccttatcgcatgtgatctgcccaccttcgcctcctaaagtgctggaattacaggtgtgagccactgtgcctggcctaaaaaattatttttacagagactgcatctcattctgttgccta

SEQ ID NO: 719186 - DNA, 592 bp, Homo sapiens
tgacacaggtttttcaaccctgcctcatgaaggctcatcagagtataattctttcctgaacactgcagttgctgaaatagccaatttggagggcacattattagggtgattctgcgaacctggagctagacaacttgagtccaaatcccaatgccaccactgcctgtgggactatgggcaacttatttawctctctggagcctcagtttcctcatgtgtaaaaggaggcttataatagtacctcatagggttgtcagaagcagtgaaggagcacttagaacaacatgcacagtaggcaaacacatgtgtttgatagatgcattggaacttctgaactcatgagtgcaacacagacactaaaggggtcatatggttttaatgacaagggaagaaaggaagtgcagtgatttggggtaggttagcccagcggctcccactccacctgcctttaaagaatcatctacagaaggcttgcacatttgtacccatatttctgccacacaacattctttttccagaatctaaaaagtgttaattaacatgcctacatgtagtcatccacttttgctaacctttgctagccagaatgaaa

SEQ ID NO: 719187 - DNA, 592 bp, Homo sapiens
tgacacaggtttttcaaccctgcctcatgaaggctcatcagagtataattctttcctgaacactgcagttgctgaaatagccaatttggagggcacattattagggtgattctgcgaacctggagctagacaacttgagtccaaatcccaatgccaccactgcctgtgggactatgggcaacttatttaactctctggagcctcagtttcctcatgtgtaaaaggaggcttataatagtacctcatagggttgtcagaagcagtgaaggagcacttagaacaacatgcacagtaggcaaacacatgtgyttgatagatgcattggaacttctgaactcatgagtgcaacacagacactaaaggggtcatatggttttaatgacaagggaagaaaggaagtgcagtgatttggggtaggttagcccagcggctcccactccacctgcctttaaagaatcatctacagaaggcttgcacatttgtacccatatttctgccacacaacattctttttccagaatctaaaaagtgttaattaacatgcctacatgtagtcatccacttttgctaacctttgctagccagaatgaaa

SEQ ID NO: 719188 - DNA, 1531 bp, Homo sapiens
aagagctaaaatgggattctcactgcattttgattcttacacccttgatcttaactataacacaattcaacatttttagaattcacccaatttcttggcatccaattttcctcatctgaagaatggggctgattagactcctctttcagggttattgtcaggatcaaaggaaacaaggcacttctaaaaggtaagtggttcttgttcctacataaattagttctaaagcaatacttcccatcacttactaagctgtgtaagccaagtcctttcccttgcacaattccaacctcagggtattcatctaagaatgtttcttaggtggtatagaggtcctggtgtgaaggagaaagaccagaaaactgctgggactgaagagaatgtaatctttagtagccctgctgaattcatccataggtaaattcctccaaagagaggttcagccaatttccagaggaatgataaggaaagttggctctttctgaaatattgagtgcatcctgtcactctttggcttaaaagagttcatcattaattcattcatctaatgattatcaaatattaagatttggtaagacataataatagtaaagcacttacattctaagctgtgccctaggtaatttacaaatatttactcacttaatcctcccaacagctatacaatatgaggttggatataaatatgtgctttgattatatgacttgaatctagacagtctggctccagagtctgtgtttctaatcactgcactatactgtccttcagtctgctgtgatctgttaccagctattacctggaatgatatctccctagtggggatgggtaaccctgggttggagtgacatttatcactattgcaacatgtctaccaaacattacacacaccaaacattttctgcgaatacaagaaagggtcttacaagctatgtaaaggcatttggatgctccctccagattggagaccacacctcttcatgtgaacacgcatatttatcccaatattgaagggattgtacctttctctctacccatgtagactgatatgctttgaggacagggtagcatgatgtttaaagctgtatcccctactctgtcaactttgaatgaatggatgcataaatgaatgaattgtgtcttttctctttcttcctgcctaccccacttgtacactatgtgctcaccatgttgaagtttatctttttcatagctcataatttttgagtacttaccaactgccaggtgctgtgataggtgcttatcccacagaatcttcatgataactaccatggtttcaatgatggtgtcccctctaaaatttatgttgaaacttaatccccagtgcaagagtattaggtgtggcctttggcaggtgattaagtcaccatgaatgagattagcatccttataaaaggggtcaaggttgaaagaaacaccttgtggcccttccatcctttgccatgtgargacatagcattcatcctttttggaagatgcagcagtgaggtgccatcttggaagaggaaatag

SEQ ID NO: 719189 - DNA, 496 bp, Homo sapiens
tggagatgagaaagagcctagtgtgttcacagagcaagcggcactgcggtagtgatagaagaggagcttggggaggtgagcagagccacatcccaaggggcaggtgtaacttgacaagaggaggagatttattcctggggagtcattgacaggtttaaacctgaaagtggtcagacttcctattgttcctctacggaagttctattagcaaggagtcaagacttccagggcagatttcttttcttttcttttcttttcttttcttttcttttcttttcttttcttttcttttcttttcttttcttttctttcttctttctttcttcttccttccttccttcttccttcccttcctttctttcttttcccttccttcccttccctcccttccktccttccttccttctctctctttctttctttttctttctttccttctttctctctttcagatggagtctcactctattgcccaggctggagtgctatggcatga

SEQ ID NO: 719190 - DNA, 1101 bp, Homo sapiens
cctcggtgattttttgtaagaattaaaagagatgatgcttttaaagcactcacttagtacagggcctgtaaaataatatggaagcttctataatagtaatgactgcttcttatcgacattactgctgtaagacatgactgggctgtgacagcaggaggttttaggagggagaaagcgtttcaggctggagctgtgttgggagcgatggagggaggggcagaaaagcaggggggtggcagggggaaggggagatgagatgcatgacaccaggtggagcagttgaaaagctctgtttacagcccgatgaccacttytgcccagactgaacctggatcattccaattgccactgggcacacatctctgcagcatgctggcgcctcatcatatctcgagtgctgtttccaagaagctcaaagggctttctggaagttatctgctggcttgacccagcagccccatgttatcattcccatctcacagatggaaaaacaggacaccgagtggtaaacctacttaccgaagatcacagtgtgagtcagtggcctgtgtgcaatcagattctagatttctccatcgcaggcccctcctgcggctcctccaggctagctttgggctgggccgccaagcaggctgcatttcttttttctcaaagagagccactaagcatccagattctgcatgtgatttaattattagccagatcctgatctttgatgacaagaagtttgatttacagactaaatattctcctaggtgctggcggacattctatacttttgttcctagcatttattataaaattgttcatataaacaggaaagctggaagaattttagtcaatacctatatgcttaggatctggattctacaatagacactttgttttattgtactttattagctgaactacttactaagcagagaggtgaagttgtcatctttgacaatgatagtcaaagtaagtgatgctattaaaaattatttaaatatctgcaaatgattaaaaaaatggtttaaaaaaatttaagtctttcaactcaccggtagactagtatttgctatcaaagtgaggttacagtagatttcaagaatgtttgca

SEQ ID NO: 719191 - DNA, 580 bp, Homo sapiens
ggtggggtgtagtgatctactccaagcaaccaggtatatcccaagaggcccttgtccacatttccaaagcttcaagttacttctccacctcgctsgataaaagaacagtttccagttcaatccataggtctagggtaatcaatgtctcattctgaggggcaacatgacaatctttctgttatccattttaagtaagcctttctttatgcccaccctacattgcttgcagttaatgtctcattaagcatagagccagggaagctgattgcccactgactatcttctgccacaataggaaagcatgcagaatcggagcacagattgccttcagcaagttacagccatcttcaagccttagtgtctactgcatcagtcctgatttccttgcctaaatttgaagaatctctgtcatcttgtctcaagatatttaagccatgctatacagcaagtgatcacctacattaaaaccatggttgctctcccggcttttcttttcttcttctactcttctttttcttcttctttttttctttttttttttttttttttttttagagagaggcaaggtttcactctgtca

SEQ ID NO: 719192 - DNA, 580 bp, Homo sapiens
ggtggggtgtagtgatctactccaagcaaccaggtatatcccaagaggcccttgtccacatttccaaagcttcaagttacttctccacctcgctcgataaaagaacagtttccagttcaatccataggtctagggtaatcaatgtctcattctgaggggcaacatgacaatctttctgttatccattttaagtaagcctttctttatgcccaccctacattgcttgcagttaatgtctcattaagcatagagccagggaagctgattgcccactgactatcttctgccacaataggaaagcatgcagaatcggagcacagattgccttcagcaagttacagccatcttcaagccttagtgtctactgcatcagtcctgatttccttgcctaaatttgaagaatctctgtcatcttgyctcaagatatttaagccatgctatacagcaagtgatcacctacattaaaaccatggttgctctcccggcttttcttttcttcttctactcttctttttcttcttctttttttctttttttttttttttttttttttagagagaggcaaggtttcactctgtca

SEQ ID NO: 719193 - DNA, 580 bp, Homo sapiens
ggtggggtgtagtgatctactccaagcaaccaggtatatcccaagaggcccttgtccacatttccaaagcttcaagttacttctccacctcgctcgataaaagaacagtttccagttcaatccataggtctagggtaatcaatgtctcattctgaggggcaacatgacaatctttctgttatccattttaagtaagcctttctttatgcccaccctacattgcttgcagttaatgtctcattaagcatagagccagggaagctgattgcccactgactatcttctgccacaataggaaagcatgcagaatcggagcacagattgccttcagcaagttacagccatcttcaagccttagtgtctactgcatcagtcctgatttccttgcctaaatttgaagaatctctgtcatcttgtctcaagatatttaagccatgctatacagcaagtgatcacctacattaaaaccatggttgctctccyggcttttcttttcttcttctactcttctttttcttcttctttttttctttttttttttttttttttttttagagagaggcaaggtttcactctgtca

SEQ ID NO: 719194 - DNA, 580 bp, Homo sapiens
ggtggggtgtagtgatctactccaagcaaccaggtatatcccaagaggcccttgtccacatttccaaagcttcaagttacttctccacctcgctcgataaaagaacagtttccagttcaatccataggtctagggtaatcaatgtctcattctgaggggcaacatgacaatctttctgttatccattttaagtaagcctttctttatgcccaccctacattgcttgcagttaatgtctcattaagcatagagccagggaagctgattgcccactgactatcttctgccacaataggaaagcatgcagaatcggagcacagattgccttcagcaagttacagccatcttcaagccttagtgtctactgcatcagtcctgatttccttgcctaaatttgaagaatctctgtcatcttgtctcaagatatttaagccatgctatacagcaagtgatcacctacattaaaaccatggttgctctcccggcttttcttttcttcttctamtcttctttttcttcttctttttttctttttttttttttttttttttttagagagaggcaaggtttcactctgtca

SEQ ID NO: 719195 - DNA, 622 bp, Homo sapiens
cctttcgccatcttgctgccctcctataccttttgggtgtcggcacattccaaaagcccacgttcttacccatgtccttctctggcatgcatccgagaagaatagcttggacccattgctttaattgcttctttttggagaatggaccatccaagctgatctgcctggaattcccaagtgccttgagttctactgcataaaaatgtgtccatcctgatgcacttaaatattgttgtaggacttccaaagtacctagcaccccaaacatagcacctacatgtcttttctgcctgaaacttgtatttgattcttagcctagaatagtaaagctgaatgaaattattaatgattacttagttgaacttgcttatttcacagctagggaaactgaggaccagcaaaaattcaattcctctctctctagttcttaaagttcaactatgtcaatcagtaatcgacttttttaaaagctccttgttccacgtggagarctattggctttgcttatatcacaaaccatatatactctgtggtatgggtgatagaaagaatttctcaagatagttttaactatacttcatttttgccctaagctttctgatattagagcttaatgcccaca

SEQ ID NO: 719196 - DNA, 619 bp, Homo sapiens
gacaggatgggtgcrgtggctcacacctgtaatcccagcactctgggaggccgaggcgggtggatcacgaggtcagaagatcgagaccatcctggctaacacagtgaaaccccgtctctactaaaaatacaaaaaaaggaaaaaaattatccgggaattgtggcaggcacctgtagtcccaactacttggtagactgaggcaggagaatggtgtgaacccgggagggggaggttgcagtgagccgagatcatgccactgtactccagcctgggcaaacagaccaaaagaagaggatgtgaagtgagcagaagatccagaagttctgatttgtacagggtttctagagcctacaattcacagatgtatagggtaggagatgtggctgtcaaggaagttgactgtgaagggactgaatgccacataagggagttggactttatcccatagacagtggggagccattgaaggttctggagctgagaagtaagtgacgagatctaatgcacattaatcattgagtaaagacttattagagccatagtggccagaaaaataaattagaattcccttttaatcccccttttttgccccaatttttgttagagaaatagttctctt

SEQ ID NO: 719197 - DNA, 660 bp, Homo sapiens
ttttccacttgccttccttttctccctgcttccattcttcacttctccaaaatgtatgtattaagagccacaatgaccagcaaagagctaagcagtgggaatgcgtcagggaacaagatgtgttctgtgtttttgaagagttttctgtcttttatttttattattattttccgagacagggtcttgctctgttgcccaggctggcatgcagtggcgtgatcttggctcactgccacctccgcctcccaggttcaagcaattcgcctgcctcagcctcccaagtagctgggattacaggtgcccaccaccacgcccagctaatttttgtatttttattagagatggggtttcaccatgttggataggctgatctcgaactcctggccttgtgatccacccgtctcagtctcccaaagtgctgggaatacagacatgagccactgcacctggccaagacaaaaacagtcacagcgttccttggtgggctcaaagcagcttgctgtcttgaactctcaggcgtcactcattctagtttcctgtgtgcctctagagygggcctccgcacgttctgattggctgatttcaccatgctccacagacttccacctaaaatgagaataaatagcctctgtttccaggcttgagagacctatggggatt

SEQ ID NO: 719198 - DNA, 3042 bp, Homo sapiens
gaggaggtagagacatataagccctcttgaagccatagttcacacctgtcaaactattgccttttttaaaaattacccaaagcttggcagagggcctagacgtatagaggtgtgaacaatttttgcaatctacatcacaaaacataactgaagatggcttagagtcaaccaacttagaatggggatataaatcaggttgcagtctcaaagtgaaatacattatagcaataaagaaaatgaatgcaccacagtatcattcagcaacatggatgaatcttacaaacctatgattgccaaaagacaggcaaattcaaataaataaataccatatgcatctattcctgtaacattcaaaaagaagcaaaactaaactacattgtttatgaaaactaatataagcagtaagatcataaaataaaggaagaaaaatggttaccagaaaagtcaaaacagtgcctctatctattctgggtgtcctgtttagaaaggagaacccagggaagatagagatatctatatctagacctgaatgatggttattcaggcagtgacttcacaattatttgttaaaccgtgcttttatatttcaggcatttttctgtatgagtgttatactttgccacagttggatttttaaagttcagatctaaatcaaaatgcaaaaataaaagttatgggtaaaaacatccaattttgctatttaaccctgatgtactgggggctacatcacctctgaatatctgttttgtctttggtgacagtaggatgataatagtctcactcgagctcgtcccaaggggtagataaaaagatgtgtagaagagaattttttaaatattagtaaactagatgcagacgtggaaaatattggtatttgacatgtagatgaaaggaagactttagttctgaatcctgtttcctagcaatgctcttggcattttctcttgtttgtttcaaggagagaaagaaggcagtggaagaactcaaacccaagcccatgtgattcccaagtaactaattcaagaagaaagagggtctggatatgcataaaacacccaagtctccaaatgtgagccacatcactctctctgcctcaagcctctgtgggagctccctggtataactgggattcacttgaatacccagtacttgagtgatttgctgaggtcacagcctctaccacccctgtgtgaagaagatggggctgggaagctcctaactgcataagtcagacccatcatagtggttatttacactggggactcacaacgtggctctggggtccttaagctgatgtgggagaggagcttggcgcaaccagccacatgatactgggctcctttccattctgcctatcagatggacctgggtcctggtgggaggtctatccccatagcaaatggttatctttaaacccatccttcaccgtcttatcagtggaggaatgtggaaagattgcaggcattagcagtgtaggcatttgggattttgtgygggtgagtgtgtgggaatgggaggcttataggccttcaacacattcgcaaatcaagtgagtgtaatctgccccagcagaggtccctgaaagaaagcgtaaccttctcagactgcacagatactgtgaacaagaactaacattttcgagtccttgctttgtgcaaatactgtcttaagagactcacgtgaacaacctcactgaatcttcacccaacactttttagccagtagtaaccaggtactgtcgttacccttttttaacagaaaaatgagccaggaggaattgacacagaagcctgaggtcacacaggtaggtggcagattatggatctgacaggtgtatccatgctgtggacagccttggtttgagcagcaataagagggggtacaaggtgaagttggaaatgggtacagaacggtgactctcgccaactttccaggactttagttagtggctttgctattgtataggcatcacacacatacacacagacagacacaagacacaaacacatttccaaatttaagtagaaaacccattccaaaaccaactctacagaagtgattctttgattctcccactgtttcagatcattggctccaatatttactgtctttggtgcataaaatagagaaattgagatatagcatttgctgtcaaccaaggttaaggtatcattctccagcccactttgggtccatgagttatatgtcatctgctttcaaagattccctttcttgctagaaagggagttattggaataatcatctagagcaggtacaaccccaccccacccccaagctcatacgggctggaaagccttctttcccaccactcaccctcccccaccacagctgcgggggcctggtcctctctgctttatagagaaacggaattccaaggagaacctctgctggtttatttttaattgttgacctccaaggccttctgtttgcatctgtttattaaattgcgagctcagctgtgaaatgccctttatggtgttgttttattggtggaccattcagggacccagcgccacacaaacaggataaatatttttctttgtaacacacaccccacgttgggggccacagaacaagggaagcgaggatctcgtttgtttacgagctccgattcattcattacttggcgaggagctgtgaaatgtaaacctcacattccgaaggacaatcgcagggccagcttgagctcatttggaggtgtgatgttccactaaaaaggaggctgttaattttattgaccaaatttggaaagtgggagctccaaaattaaatagagcctttggaaaaaaaatgaacgtttaggtctctgaaagacctagagagtggttacatggtctcgttttttggtttcctttccctataggaaatttcagacgccagtgctgtttagaaagcatgaagtgaaattgctgtccgcctcatcttctagttttaaaagattttatttctctatgagaggtttgttcgtattaattatagcaacctttgtagagcatttagcactcggctttaaatatatac

SEQ ID NO: 719199 - DNA, 3042 bp, Homo sapiens
gaggaggtagagacatataagccctcttgaagccatagttcacacctgtcaaactattgccttttttaaaaattacccaaagcttggcagagggcctagacgtatagaggtgtgaacaatttttgcaatctacatcacaaaacataactgaagatggcttagagtcaaccaacttagaatggggatataaatcaggttgcagtctcaaagtgaaatacattatagcaataaagaaaatgaatgcaccacagtatcattcagcaacatggatgaatcttacaaacctatgattgccaaaagacaggcaaattcaaataaataaataccatatgcatctattcctgtaacattcaaaaagaagcaaaactaaactacattgtttatgaaaactaatataagcagtaagatcataaaataaaggaagaaaaatggttaccagaaaagtcaaaacagtgcctctatctattctgggtgtcctgtttagaaaggagaacccagggaagatagagatatctatatctagacctgaatgatggttattcaggcagtgacttcacaattatttgttaaaccgtgcttttatatttcaggcatttttctgtatgagtgttatactttgccacagttggatttttaaagttcagatctaaatcaaaatgcaaaaataaaagttatgggtaaaaacatccaattttgctatttaaccctgatgtactgggggctacatcacctctgaatatctgttttgtctttggtgacagtaggatgataatagtctcactcgagctcgtcccaaggggtagataaaaagatgtgtagaagagaattttttaaatattagtaaactagatgcagacgtggaaaatattggtatttgacatgtagatgaaaggaagactttagttctgaatcctgtttcctagcaatgctcttggcattttctcttgtttgtttcaaggagagaaagaaggcagtggaagaactcaaacccaagcccatgtgattcccaagtaactaattcaagaagaaagagggtctggatatgcataaaacacccaagtctccaaatgtgagccacatcactctctctgcctcaagcctctgtgggagctccctggtataactgggattcacttgaatacccagtacttgagtgatttgctgaggtcacagcctctaccacccctgtgtgaagaagatggggctgggaagctcctaactgcataagtcagacccatcatagtggttatttacactggggactcacaacgtggctctggggtccttaagctgatgtgggagaggagcttggcgcaaccagccacatgatactgggctcctttccattctgcctatcagatggacctgggtcctggtgggaggtctatccccatagcaaatggttatctttaaacccatccttcaccgtcttatcagtggaggaatgtggaaagattgcaggcattagcagtgtaggcatttgggattttgtgcgggtgagtgtgtgggaatgggaggcttataggccttcaacacattcgcaaatcaagtgagtgtaatctgccccagcagaggtccctgaaagaaagcgtaaccttctcagactgcacagatactgtgaacaagaactaacattttcgagtccttgctttgtgcaaatactgtcttaagagactcacgtgaacaacctcactgaatcttcacccaacactttttagccagtagtaaccaggtactgtcgttacccttttttaacagaaaaatgagccaggaggaattgacacagaagcctgaggtcacacaggtaggtggcagattatggatctgacaggtgtatccatgctgtggacagccttggtttgagcagcaataagagggggtacaaggtgaagttggaaatgggtacagaacggtgactctcgccaactttccaggactttagttagtggctttgctattgtataggcatcacacacatacacacagacagacacaagacacaaacacatttccaaatttaagtagaaaacccattccaaaaccaactctacagaagtgattctttgattctcccactgtttcagatcattggctccaatatttactgtctttggtgcataaaatagagaaattgagatatagcatttgctgtcaaccaaggttaaggtatcattctccagcccactttgggtccatgagttatatgtcatctgctttcaaagattccctttcttgctagaaagggagttattggaataatcatctagagcaggtacaaccccaccccacccccaagctcatacgggctggaaagccttctttcccaccactcaccctcccccaccacagctgcgggggcctggtcctctctgctttatagagaaacggaattccaaggagaacctctgctggtttatttttaattgttgacctccaaggccttctgtttgcatctgtttattaaattgcgagctcagctgtgaaatgccctttatggtgttgttttattggtggaccattcagggacccagcgccacacaaacaggataaatatttttctttgtaacacacaccccacgttgggggccacagaacaagggaagcgaggatctcgtttgtttacgagctccgattcattcattacttggcgaggagctgtgaaatgtaaacctcacattccgaaggacaatcgcagggccagcttgagctcatttggaggtgtgatgttccactaaaaaggaggctgttaattttattgaccaaatttggaaagtgggagctccaaaattaaatagagcctttggaaaaaaaatgaacrtttaggtctctgaaagacctagagagtggttacatggtctcgttttttggtttcctttccctataggaaatttcagacgccagtgctgtttagaaagcatgaagtgaaattgctgtccgcctcatcttctagttttaaaagattttatttctctatgagaggtttgttcgtattaattatagcaacctttgtagagcatttagcactcggctttaaatatatac

SEQ ID NO: 719200 - DNA, 3042 bp, Homo sapiens
gaggaggtagagacatataagccctcttgaagccatagttcacacctgtcaaactattgccttttttaaaaattacccaaagcttggcagagggcctagacgtatagaggtgtgaacaatttttgcaatctacatcacaaaacataactgaagatggcttagagtcaaccaacttagaatggggatataaatcaggttgcagtctcaaagtgaaatacattatagcaataaagaaaatgaatgcaccacagtatcattcagcaacatggatgaatcttacaaacctatgattgccaaaagacaggcaaattcaaataaataaataccatatgcatctattcctgtaacattcaaaaagaagcaaaactaaactacattgtttatgaaaactaatataagcagtaagatcataaaataaaggaagaaaaatggttaccagaaaagtcaaaacagtgcctctatctattctgggtgtcctgtttagaaaggagaacccagggaagatagagatatctatatctagacctgaatgatggttattcaggcagtgacttcacaattatttgttaaaccgtgcttttatatttcaggcatttttctgtatgagtgttatactttgccacagttggatttttaaagttcagatctaaatcaaaatgcaaaaataaaagttatgggtaaaaacatccaattttgctatttaaccctgatgtactgggggctacatcacctctgaatatctgttttgtctttggtgacagtaggatgataatagtctcactcgagctcgtcccaaggggtagataaaaagatgtgtagaagagaattttttaaatattagtaaactagatgcagacgtggaaaatattggtatttgacatgtagatgaaaggaagactttagttctgaatcctgtttcctagcaatgctcttggcattttctcttgtttgtttcaaggagagaaagaaggcagtggaagaactcaaacccaagcccatgtgattcccaagtaactaattcaagaagaaagagggtctggatatgcataaaacacccaagtctccaaatgtgagccacatcactctctctgcctcaagcctctgtgggagctccctggtataactgggattcacttgaatacccagtacttgagtgatttgctgaggtcacagcctctaccacccctgtgtgaagaagatggggctgggaagctcctaactgcataagtcagacccatcatagtggttatttacactggggactcacaacgtggctctggggtccttaagctgatgtgggagaggagcttggcgcaaccagccacatgatactgggctcctttccattctgcctatcagatggacctgggtcctggtgggaggtctatccccatagcaaatggttatctttaaacccatccttcaccgtcttatcagtggaggaatgtggaaagattgcaggcattagcagtgtaggcatttgggattttgtgcgggtgagtgtgtgggaatgggaggcttataggccttcaacacattcgcaaatcaagtgagtgtaatctgccccagcagaggtccctgaaagaaagcgtaaccttctcagactgcacagatactgtgaacaagaactaacattttcgagtccttgctttgtgcaaatactgtcttaagagactcacgtgaacaacctcactgaatcttcacccaacactttttagccagtagtaaccaggtactgtcgttacccttttttaacagaaaaatgagccaggaggaattgacacagaagcctgaggtcacacaggtaggtggcagattatggatctgacaggtgtatccatgctgtggacagccttggtttgagcagcaataagagggggtacaaggtgaagttggaaatgggtacagaacggtgactctcgccaactttccaggactttagttagtggctttgctattgtataggcatcacacacatacacacagacagacacaagacacaaacacatttccaaatttaagtagaaaacccattccaaaaccaactctacagaagtgattctttgattctcccactgtttcagatcattggctccaatatttactgtctttggtgcataaaatagagaaattgagatatagcatttgctgtcaaccaaggttaaggtatcattctccagcccactttgggtccatgagttatatgtcatctgctttcaaagattccctttcttgctagaaagggagttattggaataatcatctagagcaggtacaaccccaccccacccccaagctcatacgggctggaaagccttctttcccaccactcaccctcccccaccacagctgcgggggcctggtcctctctgctttatagagaaacggaattccaaggagaacctctgctggtttatttttaattgttgacctccaaggccttctgtttgcatctgtttattaaattgcgagctcagctgtgaaatgccctttatggtgttgttttattggtggaccattcagggacccagcgccacacaaacaggataaatatttttctttgtaacacacaccccacgttgggggccacagaacaagggaagcgaggatctcgtttgtttacgagctccgattcattcattacttggcgaggagctgtgaaatgtaaacctcacattccgaaggacaatcgcagggccagcttgagctcatttggaggtgtgatgttccactaaaaaggaggctgttaattttattgaccaaatttggaaagtgggagctccaaaattaaatagagcctttggaaaaaaaatgaacgtttaggtytctgaaagacctagagagtggttacatggtctcgttttttggtttcctttccctataggaaatttcagacgccagtgctgtttagaaagcatgaagtgaaattgctgtccgcctcatcttctagttttaaaagattttatttctctatgagaggtttgttcgtattaattatagcaacctttgtagagcatttagcactcggctttaaatatatac

SEQ ID NO: 719201 - DNA, 1184 bp, Homo sapiens
taccttaaatcttctctagattactgataatacaatgtaaattgtatgtaaatagttattattatactgtatcatttagtgcaaacttgtccaacttgcagcccaggatggctttgaatgcggcccaacacaaatttgtaaactttcttaaaacataagaatttttgcgatttttttttttttttttggctcatcagctgttgttaatgtattttttgtgtggcccaagacagttcttccagtggggccaagggaagccaaaagattggacactcctggtttagggtataataaggaaaaaaaaaaagactgtacaaatttaatgccgacataatcatctgtttttttcccagatatttttgattcatgatagactatattgactctattcagtatttcagtccatggaggtggaacccatggataaaaggactgactgtactgtgtttgaaggactgaagaaatgggatagggactggggacaagataggacctgaccagtaattaaggtggagctgaggaagaggcaggggttggtgtggaattattaacctctctttcacttcttccaaccattttcttgtagctgtgggtcagcaatggtacaagttaaaaagaagggacacagatgcggggttggggtaagtcaaagtctaagccaggcagcaatagagtataagattaattctactgaagactagcagcaaaaaagttactagaagcactcttgcatgagttaaattggaaactgcttatatctacttaaaaaaagatattaatgaactgtagctttttgtgttttattattattattgttattatttatttatttatttwtttttttttttgaggtggagtcttgctctgttgcccaggctggagtgcagtggcgagatctcggctcaccgcaagctctccttcccaggttcatgccattctcctgcctcagcctcccaaatagctgggactgcaggcacctgccaccacgcctggctaatttttttgtatgtttagtagagacagggtttcaccatgttagccaggatggtctcgatctcctgacctcgtcatctgcccgcctcagcctcccagggtgctgggattacaggcgtgagccaccgtgcctggccacttttattatttttaattgacataattgtacatatttatggggtatagtgtga

SEQ ID NO: 719202 - DNA, 636 bp, Homo sapiens
tctttagaagacacagaagagcagagttggaagagattccagagctcatccaactcagtgagctcaatctttctccaaagtatcaattaattgtggtctctcagcctctggttgaacatgcccagtggcagggagctcattaagttggggtttaaaaaatatttttgggatgggcgcagtggctcacgcctgtaatcccaacactttgggaggctgaggcaggtggatcaagaccagcctggacaacatggtgaaaccccatctctactaaaaacacaaaaattagccaggcgtggtggcgagcacctgtaatcccagctactgaggaggctgaggcaggataatcacttgaaactggggggccgaggcacatcactgcactccagccagggtaacaagaatgaaactccatctcaaaaacaaaaaaaataaaaaaaaawatatatatatatgatcatatatatatatgattctgttaatcatagaaagttgttttcataaatgagtccaaatctgtcttcccagtataacttgaatatccctgggctctaccagcctgtgggcttacatttggagattcctaccttgcatttatactctgaagtgccaacctgtcccctctactgctcatgcagg

SEQ ID NO: 719203 - DNA, 640 bp, Homo sapiens
ataaataaaccaaagaatgtgtagagcccctacaagtgtaagctaattttttcacaacttctagtacattttaagcacagtgagtatagtaaatgtttgatggagtaaaatgagtgaataagcctcagtaacatatttttgttttcttgaatttaattatttatgtttaattctttatccagttttctccttcaaaggaaatttaaataaacttaataactaatttaaataatttaaacactatttttctaactactccagtgctcttcttgagctttttaaaaaactcgttgtttttgatattgaaagcttattttaatttgtgaaaagttaagaggtccctctggtggaacattgaagaaatacatagtttatatttccgtgaaaatacatgattggtttttaagttagatggtagtgactttgtataactttttatggaataatgtaatgaatgggkttacgttcctaggttgctttcaaaaccttcttaacctttaacacaatgaatatgtttaagatttgtgaagaaaataataggaaagtagacagctgcaaatgtgtcaaattatggggctggatagacttttatggcctagaatgctaattactgttaataaaagtctgtgtggaaaaatga

SEQ ID NO: 719204 - DNA, 523 bp, Homo sapiens
agctcccatcccctccaaaaaacgaaattaaaaaaaaagttaaacaaaacaaaacccaggctgggcgcagtggctcacgcctgtagtcctagcactttgggaggccgaggtgggtggatcacctgaggtcaagagttcgagaccagcctggccaacgtggtgaaacctcgtctctactaaaaatacaaaaattagctgggcgtggtagcaggcgcctgtaatcccagctactggggaggctgaggcaagggaatcacttgaaccgaggaggtggaggttgcagtgagccgagattgcgccattgcactccagcctgggcaacaaagcgagactccgtctcaaaaacagaacaaaaaaacaaaaacaaaaacaaaccccaaaaaaccaaamctagggttgtacaaatcaacacatggccaacttaaggaaatgttcaagagtaacttcggctaaataatttactcatcgttaattttagaatgaaaccatggcaaaaaatgagtgttttcttgtaaaaatttca

SEQ ID NO: 719205 - DNA, 1818 bp, Homo sapiens
tttaatgctgtccagttgagggcaagaaaacctctctggaaaagatgacaattaggttttaaggataaatagtagttttcctatttaggggagccactccaggtagagaaaacctggagtagttttccatgcctgaaagagcctggtgtgttaagmcagtttcgaacagtactgccagaatatagagtgggatgcctggggagggggtgctaggaagcagtaggcatgcctctagagtgggcctgacgatcagttgggagttgtaggtagccagtccaaatgttagttaattaaatcgctttttttctcctctctgaatgccttgggagagaagaaccaggatgagagagagagatcattgaagttggagattagtgggcttttggaaggaagctttggacttaaaagatgattaacaggaggtttttagagatttgataatagtaaattattgggaatgtggtgcctgattttctagtagggtcacctggcataaaatgttccaagcagatgttttgaagcagttgtatacctgggaagggcagcatgcatgcggtagcagcatctctgacaataagcttgtttctgtctcccgattcgcagaagaccacgtggccttaaaccaactgctgcaactctgtgtgcaggatgattctgtgggcccaagtcacccagcgcctatgctgcaaccaaaagtgcctcctgtcgctttgtatcaaaggacctttgtcatgatctcattcacaatattggtggtccctgagagtggagcagtggagtgattgacgtgcctgagtttgaagagagttaaccactggaatctctcatgttttattccctccaaaatgctgcagttcagtgttgtcccagattttatgcttgtgcttagatttctctgttctctaatttgttaagtttgtctttaatatttcacaggctttcttgatcatggatggtgaagatataccagatttttcaagtttaaaggaggaaactgcttattggaaggaactttccttgaagtataagcaaaggtaatgttggaaagcacactaaaagtaggggagggcatttggaatacaccgtgtcttgtttgtgcatttttctttttaacataaagctaaatttagaattgcagatttaggattctaggattgagattctacaaacagtcaccacatgggttgtatttaaatagtgtaaacatgccataagtctttatattgttcaaattattaaaatagtaggaaaactgtcatttatgatttcttctgattgttacctgttctatgctttttagtaggcggggccatctttggcccgttttgcatgcactgattctgcctcatcattttggtcatttggagattctgataagctgtctggggctccatagaacagactttacgttctcctcaggcaagcatgatcagtgtctggagccagcaaagctttgagggagggggagaagcttcaggggcatggaacgttttataaaatttcagttatttggttgggagaactttcaggcaacaaccttttaagcaacaaaacttgtctcaaatttcttttttaaaaatgggatcttgctaaataaaatattgatacattttcctattttggttaacagagtttactaagtcttatcaaaccttttactgccctttcattattatcaccgaagtcagttattctattgtgccagtggatatgaaaggtgtgtatctatggcagggttcttaatctttttctgtgtcatagatgtcttaatgggctggggtagcctgtggactcctcagcataatatttttaaatgca

SEQ ID NO: 719206 - DNA, 2426 bp, Homo sapiens
  misc_feature 1819, 1820, 1821, 1822, 1823, 1824, 1825, 1826, 1827, 1828,1829, 1830, 1831, 1832, 1833, 1834, 1835, 1836, 1837, 1838,1839, 1840, 1841, 1842, 1843, 1844, 1845, 1846, 1847, 1848,1849, 1850, 1851, 1852, 1853, 1854, 1855, 1856, 1857: n = A,T,C or G
  misc_feature 1858, 1859, 1860, 1861, 1862, 1863, 1864, 1865, 1866, 1867,1868, 1869, 1870, 1871, 1872, 1873, 1874, 1875, 1876, 1877,1878, 1879, 1880, 1881, 1882, 1883, 1884, 1885, 1886, 1887,1888, 1889, 1890, 1891, 1892, 1893, 1894, 1895, 1896: n = A,T,C or G
  misc_feature 1897, 1898, 1899, 1900, 1901, 1902, 1903, 1904, 1905, 1906,1907, 1908, 1909, 1910, 1911, 1912, 1913, 1914, 1915, 1916,1917, 1918: n = A,T,C or G
taaaaagatattagaggaagtagtttgaaagcaagaggcccagagacatagagcagaggatcaaaggacagcaaggtctaccctccacccccagccattgcaggcaccaccttttctcagggctcccacactggtgtgagaacccagccatgcctcatgttattcaccttggccaaatcagcgccatcccagctgattttgttaaagtgacttcccttctctgggcctcagtttcttcatctgtaaaatgagcaggttgaaccagatgacattgttgacagtgagtgagtcaggacccaccctgacatctagccaagcaccatcccggtggagcagagagcccttcctctccttggccagtctgcagaatgtgatggcagagtcagccctctcctgggagggtgagggtaatgactaaggatagtcttattcttgccaacgttcctttctatgccctaaggaattgctgatcttgcagaatgaaccacttcatgggcatctaaggtctggtgtatttgtttcctgtggctgctataattaccacaagcctggtggcttaaaacaatagatttatcttcttgcacttctgaaggtcagtagtgtctaaaccgatacttaaagagctaaaatcaaggtgtcgggcagcgttggttcctcctgaaagctcggagagagtcagtttcttgcctcctccagcttctagaggccaccagcgctccttggcttgtggctgcatttgytccaatagctgcttccatcatcatattgccttctctgactttgataagcctccctcttttaaggacccttctgattacattgagctgacccagataatccccccatctcaaaagccttaatttaatcatgtctgcaaagtcccttttgccatataaggtaacatacaggttctggggattaggatgtgaacatttttggggggcctattattctgcctacccctttctgatcttccagttgtaccacctgcacattatttgctgtttctgcatatcatctttgaatatttattggaatgtactcatttatttaaagattagcttaaatcttccattaacctcattctaaatgatcatctctatgaaactatagaattgatgttaatcatattttccctaacattccctaaaataaatacctaactattgaaatttcaaatgtgcatctcttaccacttaacatcaatctgcctgtcaccagtagtacacagaccatcacttagggaataaaaatatagtccagcctactgaatttacagaaaagggtaatttgtccaagaatacacaccagcaaagagcaaaacttcagctacacccacaacttctgcttcctgtctccatgctcatcaatgacaacttcaaagtacgtcagcttttccttaatagcatccctaacattgatgattcatataatctaaggcttggttctccttctcttacactcataggtattttatatttgaaaaatatataatgagacttacaagggcttatataaagggcttccctttgcttcccctgtcaaccagcattcatacatctgacttatctgtgttaaacagcagcctgtttacttgacctacatctggacagcgtccaggccccagggaagaataagctgagaatggaggtcagtggccagtggtgactttagtagtttgccctttggcatctgtcccagatgccaattgaactttgaaaccacttttgagaagccaagagtcctttctgacacagagtgtgggatgatgtaattgtcctcttcttacatacagtcagcatgcaatttaaaaaatagnnnnnnnnnnnnnnnnnnnnnnnnnnnnnnnnnnnnnnnnnnnnnnnnnnnnnnnnnnnnnnnnnnnnnnnnnnnnnnnnnnnnnnnnnnnnnnnnnnnngaattgatgaagaactttagagggaaagtcttccaggtgggagtgtcagtgaatttaactttgttctcttttcttcctttcttaggatccttcttacagctctccatgatgcctcagagagctggaaatgatccacctggggtttcaaatgcaagtgaaatggaaatggagataagtaacatgagagaaaagtttcttatgagtgtaacaaagttagtagaaagcaaaagttacaacagcaaggtattttccaaagaaaagtactttcaaacaataaaggaagttaaagaagctaaagaaaaagggaagaagtcatcacgtgattatcgccgtgcagcaaaatatgatgtgatctctgtacagggcacagagaaactgatagaggctactcatggagaacgtgatcgaatacggtattatgtacataaggaagagttgtttgatattcttcatgatacacatctcagtattggacatggtgggcggacacgcatgctcaaggagctgc

SEQ ID NO: 719207 - DNA, 2426 bp, Homo sapiens
  misc_feature 1819, 1820, 1821, 1822, 1823, 1824, 1825, 1826, 1827, 1828,1829, 1830, 1831, 1832, 1833, 1834, 1835, 1836, 1837, 1838,1839, 1840, 1841, 1842, 1843, 1844, 1845, 1846, 1847, 1848,1849, 1850, 1851, 1852, 1853, 1854, 1855, 1856, 1857: n = A,T,C or G
  misc_feature 1858, 1859, 1860, 1861, 1862, 1863, 1864, 1865, 1866, 1867,1868, 1869, 1870, 1871, 1872, 1873, 1874, 1875, 1876, 1877,1878, 1879, 1880, 1881, 1882, 1883, 1884, 1885, 1886, 1887,1888, 1889, 1890, 1891, 1892, 1893, 1894, 1895, 1896: n = A,T,C or G
  misc_feature 1897, 1898, 1899, 1900, 1901, 1902, 1903, 1904, 1905, 1906,1907, 1908, 1909, 1910, 1911, 1912, 1913, 1914, 1915, 1916,1917, 1918: n = A,T,C or G
taaaaagatattagaggaagtagtttgaaagcaagaggcccagagacatagagcagaggatcaaaggacagcaaggtctaccctccacccccagccattgcaggcaccaccttttctcagggctcccacactggtgtgagaacccagccatgcctcatgttattcaccttggccaaatcagcgccatcccagctgattttgttaaagtgacttcccttctctgggcctcagtttcttcatctgtaaaatgagcaggttgaaccagatgacattgttgacagtgagtgagtcaggacccaccctgacatctagccaagcaccatcccggtggagcagagagcccttcctctccttggccagtctgcagaatgtgatggcagagtcagccctctcctgggagggtgagggtaatgactaaggatagtcttattcttgccaacgttcctttctatgccctaaggaattgctgatcttgcagaatgaaccacttcatgggcatctaaggtctggtgtatttgtttcctgtggctgctataattaccacaagcctggtggcttaaaacaatagatttatcttcttgcacttctgaaggtcagtagtgtctaaaccgatacttaaagagctaaaatcaaggtgtcgggcagcgttggttcctcctgaaagctcggagagagtcagtttcttgcctcctccagcttctagaggccaccagcgctccttggcttgtggctgcatttgttccaatagctgcttccatcatcatattgccttctctgactttgataagcctccctcttttaaggacccttctgattacattgagctgacccagataatccccccatctcaaaagccttaatttaatcatgtctgcaaagtcccttttgccatataaggtaacatacaggttctggggattaggatgtgaacatttttggggggcctattattctgcctacccctttctgatcttccagttgtaccacctgcacattatttgctgtttctgcatatcatctttgaatatttatyggaatgtactcatttatttaaagattagcttaaatcttccattaacctcattctaaatgatcatctctatgaaactatagaattgatgttaatcatattttccctaacattccctaaaataaatacctaactattgaaatttcaaatgtgcatctcttaccacttaacatcaatctgcctgtcaccagtagtacacagaccatcacttagggaataaaaatatagtccagcctactgaatttacagaaaagggtaatttgtccaagaatacacaccagcaaagagcaaaacttcagctacacccacaacttctgcttcctgtctccatgctcatcaatgacaacttcaaagtacgtcagcttttccttaatagcatccctaacattgatgattcatataatctaaggcttggttctccttctcttacactcataggtattttatatttgaaaaatatataatgagacttacaagggcttatataaagggcttccctttgcttcccctgtcaaccagcattcatacatctgacttatctgtgttaaacagcagcctgtttacttgacctacatctggacagcgtccaggccccagggaagaataagctgagaatggaggtcagtggccagtggtgactttagtagtttgccctttggcatctgtcccagatgccaattgaactttgaaaccacttttgagaagccaagagtcctttctgacacagagtgtgggatgatgtaattgtcctcttcttacatacagtcagcatgcaatttaaaaaatagnnnnnnnnnnnnnnnnnnnnnnnnnnnnnnnnnnnnnnnnnnnnnnnnnnnnnnnnnnnnnnnnnnnnnnnnnnnnnnnnnnnnnnnnnnnnnnnnnnnngaattgatgaagaactttagagggaaagtcttccaggtgggagtgtcagtgaatttaactttgttctcttttcttcctttcttaggatccttcttacagctctccatgatgcctcagagagctggaaatgatccacctggggtttcaaatgcaagtgaaatggaaatggagataagtaacatgagagaaaagtttcttatgagtgtaacaaagttagtagaaagcaaaagttacaacagcaaggtattttccaaagaaaagtactttcaaacaataaaggaagttaaagaagctaaagaaaaagggaagaagtcatcacgtgattatcgccgtgcagcaaaatatgatgtgatctctgtacagggcacagagaaactgatagaggctactcatggagaacgtgatcgaatacggtattatgtacataaggaagagttgtttgatattcttcatgatacacatctcagtattggacatggtgggcggacacgcatgctcaaggagctgc

SEQ ID NO: 719208 - DNA, 1319 bp, Homo sapiens
agtagaggatcattataagttgtagggaaaaataattaggcactgcttccaacatttatgaagactaccctaaaagttctccatatcattcaggggaaatggctacgctcatgtaaaaccatccrgtcattccatttatcattccactataaaaacaagggctgccgcaagtctgcctgaaactcctaagcctgaggaaaatcaattttatgtttactccacccgaggaaacccaatggttagaataaagttctgatttcagctgggcgcggcggcaagcccagcactttgggaggctgaggcaggaggatcacttgagcccaggagtttgagatcagcctaggcaacagagtgagacccccatctcttcaaaagaaaacaaaaattatttaaacaaattttttaagaaagaataaagttctaatttgtatagtgatgttttaggatgtgcttttaatacaaaatccttaatgaaatgtatattctccagggtaaaatcagggacagagatcaaccaaaacactccactgcaaggataagagcctattcagagtgcaccgtgtgtcgaatctgctcctttacacatgtgccataattattgaggacggcagaaaatcccagctgctttcagagattgtgagcgtttctagagttgtacctgctctgctttcagagaaaaacaagcaagaattacctctttgactcaaagcagagacagtagccaaggatcacgggtgcctgttggctgtttcaataacaactaccttaggcaacaccgtgagcatcccaggccacgggtcctaatagtgacctatattaaggcatactcatacaaccacgtattaccatgtagtatttaaaaataaataagtaaattgaggtagaataatatacatgacatggaaagataatggcaatagaatgtcatgataggcacactgcaaagcaatatttaaagtataatcccgtaactgtgttacaaacaacttacagcatatgcataaaaatatgatttggcatgccttggaataactgtaaggaatgcataaacagtgtgaaggcaggaaaccatgactttttagttcatatacttccatactaactgaaattttttgcattaaggatgcttcaaccttaaaacaattttatttcaatcttcaaaaaagccttaactttatacaaaagttgtatctcctaaactgtatttgatccagtgcctaagtacttcagggctttatatttctctaaaattctcacaggggatgtctgttgtagagtttgcatatatttaattgtgatgctgtcttctaccccaaaaa

SEQ ID NO: 719209 - DNA, 760 bp, Homo sapiens
ctaatactacttgcagccctaaactcccatacactactctataatttccagaccacccacatttacactaacaagtccacatacagggcacaacaagcattctcatgcagttctgtcatcatgcccagttttcatgcctgaccttttctcatacttcagaacattctgacacttcctctctgcctaacttcaaagcagtgagcatgggagaataatttacattcttatagttgaccaataaatctaaccattttttccttgcagaccaatagagcattttatttacatgtggggtcatttataaatagagtactttattaagctcataaagatttctcagaacaaacaccatttttccaagtatgtttaatgcattcttggggttaasattttgttgagattagatatgtcgccctgatcaactgccataaggacatttactgcattaaattttatcaaatacagatcttcaggttcatggtcccagtagttgtataagcatcactgcagaatctatttattttgcatttcattttttttccctaaggcaaatcctctttaaaaccatgttggataagttttttaaaaatctttttaaactgaaaaagaatttataatttttttaatgttcaggttgcctttgtttaaaatgtgccagccactatgctaggccctgaggatacctaggcaaaacacacatagtccctgcctacatggagcttagagtacagacgggaagcagcaagaagaataccatgcc

SEQ ID NO: 719210 - DNA, 1030 bp, Homo sapiens
ggctgactttgtcccccagggaacatttgacaatatctggagaaatgttggtggacacaactggggaggaggagtgcagtggttactactgtcacccagtgggtagaggccagaaatactgtcatacatacgatcatgcacacragggcctctcaacaacaaggaattatccagccccacgtgtcagtactcctgaagttgagaaaccctaccctaaacagattggcaattttatattcatttgtgtaattctttgcttaatgtctgtctcccctactagactataaaataatgactagaacttgggatttaaaatccatgaaactttatccagccactcaactattaggaccaccaggcagctcacttagctgttggctttgccagtttctagatggagttaataatgacttacattagaaatagtccaaatattagttctgtttggtaggaacaaagcacagtggatatttaacaatttaaccatgcataacgaaatccaagaagcaaaccccaaaatgcaaagagtgaagtactggagaatattcaagtattaatatacaaaatgctcaaccataggaacacatgaaagaattttgctgtggccttataagtaggacctatggctttgggtaatggcggaggagaaagtaaattgactctataaacacctgagacaaaatatatataaaaacagcaacgaggcatcccctccatctgagagaagaataaagttcaataaggaaggagatcgaatgttcatatccacctaggatgaagaaacatttgtgcactggtcataagaaagctttattagaaaatggcagctctttgataccggtaatgagaggcaaaatcttcttccccttaaactaatatttgatgggtctaaagaggatggtcttgtttatgtgttataccactaaatggatcaaaacaaagtaagtaatattcatgtgtccttaagattgcttcctaaattttcaatatgaattcaaaatatccaaggattcattgcttgattctatgc

SEQ ID NO: 719211 - DNA, 590 bp, Homo sapiens
caactgttttttaaataggttcacatcttctttgtccaactctggtgtgtttacaggatatagattaaacattctgatcttctagtttacttctgtcttcttgacaaaatgtcaaaaacaagtgtaatgcgccactaaataattactatgcttggggtgatagcatgttttaatctgtgatggcagtttgtcttgaatcctaaccstccccttcttaaaaacatgctcataataagcagatgctattgtcctttggctttctagaaagtcaacaagccaaattccttggtcgttccaaaaaacttttgtcatgatctttgctctcagctggtccacttttgctttgactggatctcttccccatcttggcagccattacttttattgtgctttgtcctcaggatcatactgataaggccacgtttcatctcctgttacaattcttcaaagaaatgcttcgggatcgtaacatcatctgtttaacatttccattgaaagttctgctcttgtctgcagttgatctgggtgcaagaatttttgctcccgttgagtggaaagtttgctcaactttaatttttcaatcagaattg

SEQ ID NO: 719212 - DNA, 646 bp, Homo sapiens
gtcatcgtaaatatttctgtaacctggagccattttctcttaagttcttgataacttgttataaaataataatgttacaacrtagaatgtctgttttgtaagcatttaaaccccagagtgagaaaggtaatgcaatgagtgaattgggtttagtgtaagaactcagtgatcccaaaatgtgcctagttggtgctgtttttctctggtgccagaccccacggaagggataatgagggagtaaggaccatgggaatctggagatcacctgcatcaaccacaaggactgtaaatttttctcatttattgagtttattgttactcagtcttatttttgttttccaagaaaagtcagaagtctgactgttgaatgtctcagtttttcaacgtttatccaaaaacggtggataaatcaatcaagactaaacaaaacacaaccatgatcagatcaggtccttggatcatccatttcaattctctgccataagaaaaagttacagatatagtgtattttcattgctctcaaacatattatatgttgatttagccataagatcacagatagattggtacacatgatattgactgggatatcaaaggaatattgaatgctttatttttgaagtctgtgtcatagtttgtaacaatc

SEQ ID NO: 719213 - DNA, 682 bp, Homo sapiens
ttataaaggccaaggagtcctacaacatgccaactgcaagatggagacacaggaaagctgctggtttaattaagtttgagtacaaaggcctaagaaccaggaaagctgatgatgtaactctcaactgaaaacaaaggacctgagaatcaaagggggcaatggtgtgagtctccagagtctcaaggccaagagattctttgtgcaagagcagaagataaatgtcccacctcaaggagagggtcagtttgcccttcttcttgaactcttgttctattcagactttcaatggattgggtaatgcctgcccayattggtgagggtggaccttctttactcattctaccaattcaaatggtaatgtcttccagaaacaccctcatagacacaccccaaaataatggtttaccagctatctgggcatcccttagcttactgaagttgacacataaaattaaccatcataccctccccaacttttctcttagtttttaaaattgtttagttaacttatttttgcccatattaattgtgacttgtgtcttattttctagttagaggttgctacactaaagggatgctactgatttttgttgcaatgattgctggcattctagtcttcctcccattctcaaaacaaaaatgtttaatatttttccgaggaacatgacacttgctgtatttt

SEQ ID NO: 719214 - DNA, 639 bp, Homo sapiens
ttatttccctacaattttgtttcttaaaaaaagtaaaactattgagacaaccagggagctrcattaatgaatgaagattcaggctaaacatacttctatcaaattgtgattttgttaaaaattcaggataaataagcaaagacaccagttgcactcaaccagtttaatactgtgtatacagttattcaaagaaaaaaatttcttcagtaaccaagtccactaaaatttttaaaaaaatttattagtaacatttttgtccttggtaatccttccaagtaaagaaatctatgaaaatgctatggaaaattaaacaacatataaaatgatttgggcacctggaaaatggtgaagaaatattttgtgacataaacataaaactgaactatcaatttttaaaaagcattcgtgttttgttaaaagtatgaaaaacaaatttaaaatatgctgaaataatcattagtcagagatatattcaaataggaaacttattaaatgtactactttttccattctccatggtaaaactgagaacaagaatcttggtaaaggttaaaattttgaaataatagcatatctggggacatcaactatcccttacatcttgaacacacaatctgtttactctataaacatgctcag

SEQ ID NO: 719215 - DNA, 641 bp, Homo sapiens
ttttaaatgacagttaagtatcattttgatgtcactattgggggggtaaaaaggaccaggtagagagttcttaaataaaaagagttaattcagatttattcatatctaataagtcggttattaatttctctaaggcacacagatgtgtatcatccttccttacttccctcacaaatccttcccttctactctagataatctcccatcctgagatttaacaatacagattttacagtttgaggtatttctttttttttttttttwaattattatactttaagttctagggtacatgtgcacaacatgcaggtttgttacatatgtatacatgtgccatgttggtgtgctgcacccattaactcgtcatttacattaggtatatctcctaatgctatccctccccacccccaccacccctcaacaggcaccggtgtgtgatgtccgccttcctgtatccaagtgttctcattgttcagttcccacctatgagtgagaacacgcggtgtttggttttttgtccttgcaatagtttgctgagaagacagggtctctcactctgcgtctcaggctggagtgtagcggcaccatcttggctcagtgcaacctccgccttccatgctcaaatgatccttccacctcag

SEQ ID NO: 719216 - DNA, 641 bp, Homo sapiens
ttttaaatgacagttaagtatcattttgatgtcactattgggggggtaaaaaggaccaggtagagagttcttaaataaaaagagttaattcagatttattcatatctaataagtcggttattaatttctctaaggcacacagatgtgtatcatccttccttacttccctcacaaatccttcccttctactctagataatctcccatcctgagatttaacaatacagattttacagtttgaggtatttcttttttttttttttttaattattatactttaagttctagggtacatgtgcacaacatgcaggtttgttacatatgtatacatgtgccatgttggtgtgctgcacccattaactcgtcatttacattaggtatatctcctaatgctatccctccccrcccccaccacccctcaacaggcaccggtgtgtgatgtccgccttcctgtatccaagtgttctcattgttcagttcccacctatgagtgagaacacgcggtgtttggttttttgtccttgcaatagtttgctgagaagacagggtctctcactctgcgtctcaggctggagtgtagcggcaccatcttggctcagtgcaacctccgccttccatgctcaaatgatccttccacctcag

SEQ ID NO: 719217 - DNA, 641 bp, Homo sapiens
ttttaaatgacagttaagtatcattttgatgtcactattgggggggtaaaaaggaccaggtagagagttcttaaataaaaagagttaattcagatttattcatatctaataagtcggttattaatttctctaaggcacacagatgtgtatcatccttccttacttccctcacaaatccttcccttctactctagataatctcccatcctgagatttaacaatacagattttacagtttgaggtatttcttttttttttttttttaattattatactttaagttctagggtacatgtgcacaacatgcaggtttgttacatatgtatacatgtgccatgttggtgtgctgcacccattaactcgtcatttacattaggtatatctcctaatgctatccctccccacccccaccacccctcaacaggcaccggtgtgtgatgtccgccttcctgtatccaagtgttctcattgttcagttcccacctatgagtgagaacaygcggtgtttggttttttgtccttgcaatagtttgctgagaagacagggtctctcactctgcgtctcaggctggagtgtagcggcaccatcttggctcagtgcaacctccgccttccatgctcaaatgatccttccacctcag

SEQ ID NO: 719218 - DNA, 641 bp, Homo sapiens
ttttaaatgacagttaagtatcattttgatgtcactattgggggggtaaaaaggaccaggtagagagttcttaaataaaaagagttaattcagatttattcatatctaataagtcggttattaatttctctaaggcacacagatgtgtatcatccttccttacttccctcacaaatccttcccttctactctagataatctcccatcctgagatttaacaatacagattttacagtttgaggtatttcttttttttttttttttaattattatactttaagttctagggtacatgtgcacaacatgcaggtttgttacatatgtatacatgtgccatgttggtgtgctgcacccattaactcgtcatttacattaggtatatctcctaatgctatccctccccacccccaccacccctcaacaggcaccggtgtgtgatgtccgccttcctgtatccaagtgttctcattgttcagttcccacctatgagtgagaacacgcrgtgtttggttttttgtccttgcaatagtttgctgagaagacagggtctctcactctgcgtctcaggctggagtgtagcggcaccatcttggctcagtgcaacctccgccttccatgctcaaatgatccttccacctcag

SEQ ID NO: 719219 - DNA, 641 bp, Homo sapiens
ttttaaatgacagttaagtatcattttgatgtcactattgggggggtaaaaaggaccaggtagagagttcttaaataaaaagagttaattcagatttattcatatctaataagtcggttattaatttctctaaggcacacagatgtgtatcatccttccttacttccctcacaaatccttcccttctactctagataatctcccatcctgagatttaacaatacagattttacagtttgaggtatttcttttttttttttttttaattattatactttaagttctagggtacatgtgcacaacatgcaggtttgttacatatgtatacatgtgccatgttggtgtgctgcacccattaactcgtcatttacattaggtatatctcctaatgctatccctccccacccccaccacccctcaacaggcaccggtgtgtgatgtccgccttcctgtatccaagtgttctcattgttcagttcccacctatgagtgagaacacgcgrtgtttggttttttgtccttgcaatagtttgctgagaagacagggtctctcactctgcgtctcaggctggagtgtagcggcaccatcttggctcagtgcaacctccgccttccatgctcaaatgatccttccacctcag

SEQ ID NO: 719220 - DNA, 641 bp, Homo sapiens
ttttaaatgacagttaagtatcattttgatgtcactattgggggggtaaaaaggaccaggtagagagttcttaaataaaaagagttaattcagatttattcatatctaataagtcggttattaatttctctaaggcacacagatgtgtatcatccttccttacttccctcacaaatccttcccttctactctagataatctcccatcctgagatttaacaatacagattttacagtttgaggtatttcttttttttttttttttaattattatactttaagttctagggtacatgtgcacaacatgcaggtttgttacatatgtatacatgtgccatgttggtgtgctgcacccattaactcgtcatttacattaggtatatctcctaatgctatccctccccacccccaccacccctcaacaggcaccggtgtgtgatgtccgccttcctgtatccaagtgttctcattgttcagttcccacctatgagtgagaacacgcggtgtttggttttttgtccttgcaatagtttgctgagaagacagggtctctcactctgcgtctcaggctggagtgtagcggcaccrtcttggctcagtgcaacctccgccttccatgctcaaatgatccttccacctcag

SEQ ID NO: 719221 - DNA, 1135 bp, Homo sapiens
aaattttctttatattatgacaaataattataatattaggtcacatattatgggtctggccagaggcatggaatcatgctactgttgcttctactaccactagttctctactctatagagatatttttatgctttgtatgtcattctgtcacatgaagtgtgttgtaatgagtatatttatgagtctagccattgggagtggaaactgatgtattatgtagccttgcacctcatgtgcagctgaattataatgtagatcttaacagccaagaagtctgtaatcagagaaaaaaagaatttcaaaacataaactatgttcttggcactagccttgaatactggacattcawaacccacaagtgcccagactataaatttgcaagttgcattaatacggcagtaaaagtcactcttctgaaagctgcacttgtaaaatatttataaattcacatggttgttcctggcaaatatctacatctgtcagctctgtctttttgctcccaaagcagcagagttggtgtcctgtgtaattcacaatatgttcataaaaaattattttgaaaaatcaagatagaagatattttattctaaggggcaatatatctgctcctccaatggtatggtgttactatttgatctcctgagatcctttctcatcaagtctttttctctgaacaagattccaaattagcaaggcaagtcctgtggagttgtctttaaaatctcacattaatatgtacaacacaggccaggcacggtggctcacacctgtaataccagcactttgggaggctgaggcaggcagatcacctgaagtcaagagttcgagatcagcctggtcaacatgctgaaacccagactctactaaaaattcaaaaaatcaccaagggtggtggtgggcacctgtaaccccagctacttgagagactgaagtgggggaatcacttgaactcgggaggcggaggttgcagtaagcggagatggcgctaccgcagtccagcctgggcaacagagtgagactcagcctcaaaaaaaaaaaaagaaaaaagtacaacacagtggagtttttccttcccaagtcaatatgtatatcaatgtcacatggtaaaggaattttctatgtacataatctccc

SEQ ID NO: 719222 - DNA, 1135 bp, Homo sapiens
aaattttctttatattatgacaaataattataatattaggtcacatattatgggtctggccagaggcatggaatcatgctactgttgcttctactaccactagttctctactctatagagatatttttatgctttgtatgtcattctgtcacatgaagtgtgttgtaatgagtatatttatgagtctagccattgggagtggaaactgatgtattatgtagccttgcacctcatgtgcagctgaattataatgtagatcttaacagccaagaagtctgtaatcagagaaaaaaagaatttcaaaacataaactatgttcttggcactagccttgaatactggacattcaaaacccacaagtgcccagactataaatttgcaagttgcattaatacggcagtaaaagtcactcttctgaaagctgcacttgtaaaatatttataaattcacatggttgttcctggcaaatatctacatctgtcagctctgtctttttgctcccaaagcagcagagttggtgtcctgtgtaattcacaatatgttcataaaaaattattttgaaaaatcaagatagaagatattttattctaaggggcaatatatctgctcctccaatggtatggtgttactatttgatctcctgagatcctttctcatcaagtctttttctctgaacaagattccaaattagcaaggcaagtcctgtggagttgtctttaaaatctcacattaatatgtacaacacaggccaggcacggtggctcacacctgtaataccagcactttgggaggctgaggcaggcagatcacctgaagtcaagagttcgagatcagcctggtcaacatgctgaaacccagactctactaaaaattcaaaaaatcaccaagggtggtggtgggcacctgtaaccccagctacttgagagactgaagtgggggaatcacttgaactcgggaggcggaggttgcagtaagcggagatggcgctaccgcagtccagcctgggcaacasagtgagactcagcctcaaaaaaaaaaaaagaaaaaagtacaacacagtggagtttttccttcccaagtcaatatgtatatcaatgtcacatggtaaaggaattttctatgtacataatctccc

SEQ ID NO: 719223 - DNA, 1280 bp, Homo sapiens
gtgtggctggggacgtggtgtggcctcacctctgcccaggtgtgcagaaggaaggaccgagcaactctctatcgcagcagaaactcagtcaacacctactggtggtgtggaatgaaattgtagggttctagaccaatataaagcatgtgtgcaggtatccgggctcaatacgggacgcaggagcccgggaagaaggcggggtagccatggcagcggcttttcctatctgcttctgcaaaatcagctaattccctcgcctccatcagcgggcccttggcagaggccgcgcgggctggtagcgcggtcctggcagccgcagtgtggaggtgaaccccatggcctcttcagtctatttagcaggctctgagatgtgtaagtacattatctgcaaggctggtaaagagcgcttggggaggatttgtgggtctgtgggaaggacaaagaaaaatgttttctaataaattattcaccatctcacaatcccttttgggcagattgttgctccgtttgccctggctgctcagcgcctcttccctcggcattcagatgcgcggtttctcacctccagagagcagcagagatctcgggcaggctgctgcggctaatggtggcaattaataacttgtcataatcccgaggatgaaagggaaggcgccccatcagcaggcgggtcatggcactgctcaaaagcaaatgaggtgcaggtgtggcctccgctaagcgctgtgcttgccacccggtgcgccgcggtgccaagcccaagacccsgagcgccagcggcccggctccgctcccagggtgcgcacggccgggcctggccccctccacgttcgcccggctaaaggggcgtcccaggaacgcggccgtaaatcagagcacacggcacagaaccttccaaacacttaattgcactctgtgaacatagttaactctggcaggcccacttcgcttggctttgtttttgtttttttccccagatgtggtaagaattgcacacctcaaatctaccccctcccccactcttccgcgttatccccctttagaagagaacgtggttaaggaagcagccagtgtgctgcgcctgagttggtcggctctcagttccctggtggactggaggacacaaaatcctcgttagggttttgtgaaacagcccaacaagagtcactgatttccagacagctccaacccagttgccttttctctggtttccattcctgtgggtcagttctgcttgaaatgaaccaagtttacaaatctcttctggtttgtacactcct

SEQ ID NO: 719224 - DNA, 645 bp, Homo sapiens
ccaccctatacatatatatcatttttaatctttcatatcatatttcactgtatcttttctacgttgagatatatttagatacacaaatatttaccattgtgttacagttgcctacagtattcagtacagtaatgtgctgtctaggtttgtagcctaggagcaatatgctgtgccatacagcctagatgtgtagtgagctactccatctaggtttgtgtaagtacactctatgatgtttacaaaatgataaaattacctaacaaggcatttctctgaagatacccctgttgttaagtgatgtttgactgtacttttaaaatcttcactatgggtgtgaagtagagatttaaggaattaattctttaaaaaactgttttttattttttagcttttttgtagagatgggatcttgttatgtttcccaggctggttttgaactcctggtctcaagcaatccttccgccttggcctcccaaatactaggyttacagaagtgagcccactgtgcccagcctaattcttacaattctggcagagaaatagtcattaaagtttactgtactttgatatggcattcttgggcaatagttcagttcaaaaaacattccttgggtagccacgatgtcccatggcaaatttaaaaat

SEQ ID NO: 719225 - DNA, 1543 bp, Homo sapiens
gggacacttctaaaatttattgcagattctggagatgtgcttctccaacaagccaggtcttagacgggaagctagcaagaaaagtaggtcatgacctacttctgcagagcagaaaagcaatctccttgcaggacagtagacagattctgttctgtggcccccagagagaaacttgttctctgctaacaagtgtatgcaggcctgatcaatcttaggacccctgggggacactaggcctgtgcaatattatgcaggtaaagtcattcttgcatctgttgaaattttcattttcaaaaaaacacagccaacttcctgaagacttgtacacaggctggtcataccacttgcaagagtcagtcccagtcaagacacagcatggacatgagggtccctgctcagctcctggggctcctgctgctctggctctcaggcaaggaaggagaacactaggaatttactgagccagtgtggtcagtactacctggctattcaggaaagtcctctcataacatggttaatagtgttaatagttttgtttcccatctcaggtgccagatatgacatgcagatgacccagtctccatcctcgctgtcttcctgtctaggtgagagtcaccatcacatgccaggaaagtcaggcagggcattagccatgttttagcctgatacaaagagaagccagggaaagcttctgagctcctgatctacgatgcatccaatttgcaaacctgggtcccattgcagttatgtggcattggatccaggacagatttgattctcaccattagcatcctccagtctgaagttgctgcaacttcttattattggtcaacagtataaaagtgaccctctcacagtgttacaaacccaataagctccccaaggaagcagatatgtgagggtgggctgccccagctgcttctcctgtttcctccatctgctgagagtgtttctcagactcagccacactctgaaggtcactgagcagttttcatagaaggggtaagggaagtgtctctacacccttagtttcttttatcctcctcagccccagcagcagacatggcaatgcctctcctaatttcatagaagagtcattacctatgaggactctgggttacagcactggtccaggttcatacaacaaaagagaagctattgtaggtaacccaaatagaaagtttttcctaatatgggaaatccatgtctaaattacaacttttcaaagaccagaggatataatggttaggaaaccagaaaggcaaaaggagtgctgggaaatctacttcaagaagcaatggtggccgcgcacrgtggttcaggcctgtaatcccagcactttgggaggccgaggcaggcggatcacctgagatcaggagttcaagaccagcctggccaacatggcgaaaccccgtctctactaaaaatacaaaaattagccgggcatagtggtgggtgcctgtaatcctagctactcagaaggctgaggcaggagaatcatttgaaccaggcaggtggtctctgcagtttcgaagcccagcgc

SEQ ID NO: 719226 - DNA, 1543 bp, Homo sapiens
gggacacttctaaaatttattgcagattctggagatgtgcttctccaacaagccaggtcttagacgggaagctagcaagaaaagtaggtcatgacctacttctgcagagcagaaaagcaatctccttgcaggacagtagacagattctgttctgtggcccccagagagaaacttgttctctgctaacaagtgtatgcaggcctgatcaatcttaggacccctgggggacactaggcctgtgcaatattatgcaggtaaagtcattcttgcatctgttgaaattttcattttcaaaaaaacacagccaacttcctgaagacttgtacacaggctggtcataccacttgcaagagtcagtcccagtcaagacacagcatggacatgagggtccctgctcagctcctggggctcctgctgctctggctctcaggcaaggaaggagaacactaggaatttactgagccagtgtggtcagtactacctggctattcaggaaagtcctctcataacatggttaatagtgttaatagttttgtttcccatctcaggtgccagatatgacatgcagatgacccagtctccatcctcgctgtcttcctgtctaggtgagagtcaccatcacatgccaggaaagtcaggcagggcattagccatgttttagcctgatacaaagagaagccagggaaagcttctgagctcctgatctacgatgcatccaatttgcaaacctgggtcccattgcagttatgtggcattggatccaggacagatttgattctcaccattagcatcctccagtctgaagttgctgcaacttcttattattggtcaacagtataaaagtgaccctctcacagtgttacaaacccaataagctccccaaggaagcagatatgtgagggtgggctgccccagctgcttctcctgtttcctccatctgctgagagtgtttctcagactcagccacactctgaaggtcactgagcagttttcatagaaggggtaagggaagtgtctctacacccttagtttcttttatcctcctcagccccagcagcagacatggcaatgcctctcctaatttcatagaagagtcattacctatgaggactctgggttacagcactggtccaggttcatacaacaaaagagaagctattgtaggtaacccaaatagaaagtttttcctaatatgggaaatccatgtctaaattacaacttttcaaagaccagaggatataatggttaggaaaccagaaaggcaaaaggagtgctgggaaatctacttcaagaagcaatggtggccgcgcacagtggttcaggcctgtaatcccagcactttgggaggccgaggcaggcggatcacctgagatcaggagttcaagaccagcctggccaacatggygaaaccccgtctctactaaaaatacaaaaattagccgggcatagtggtgggtgcctgtaatcctagctactcagaaggctgaggcaggagaatcatttgaaccaggcaggtggtctctgcagtttcgaagcccagcgc

SEQ ID NO: 719227 - DNA, 691 bp, Homo sapiens
tgcactataaggaagtagcccctcaagcatctttggctttatttgaaagaacctttgaaatttgtaatagatgaacttgtcccacttcccctcaggagttgtgatcccacaaaatggtgccagtaggcattagaaggtattcagagagaacttgatttgggacaacatttttgtactaaagcagcaaggttcagcagactcaatctttgctttaaaattcaatgtagtattgaacttaagtcttgttttgttgtggggaacatttgtgtggctggtgttcagttccagactgggtccaaatttctatatggctttggggattctaggatagtaatggtgggccatcaagtatcctatttgcaatgaaagctccattagatttgcctatctgaagctttaaggaagattatgagtcaaaattttcatattagggcttcaggacatccctgagaagataacacctgaaacgtatgtttggagtataatcctgaaagacacaatccaaaatgccataatcccaaatgttcctgaaagccaaattytggggaacagatttgtgtgttttgaagtgtattcagaatagttacatcatattagttgcattatgttaggccgaaatattacattattattgtttttatttgcatttcttggaaaattcagagtcatggattggccatgtgatattgca

SEQ ID NO: 719228 - DNA, 1277 bp, Homo sapiens
agagtgaaaactactaaatgctcaatagataaataataaatcttaagtgcttaataaatgttgctggaatgtgtaacagaatattctgaaaggaaggctattcttaacagtcatgcccactgtgccatgtcctacaatgtgactgctggagagagattagaagtaacatctttttctatggcaagccacacagtcagagacctaagagaaagtagtcctcttcctcttctaataaatagaaatagacagttcctatatcatcagaggatttcatagaaaaagtatttcataacgaaggcttatgatcctgattatgggctacttttaagaactgtggcatcacctgctgctcaactcccagacagagatgggcrtggtctcccgtaacacctgctgctggggcaggctggcgaggtagtcaagagtgtagatgctggagccaagccagctttgtgaaaagcccattctaccatatccagatggatcacttcagaaagtgacttatcctctctctgaacctgcccacatttcctcctctagaaacagggataacaacggtgccaacctcctggggtggctgaaggacccagtggatgcgtatacacgaagcacttagaagtgagtctggcaggtactgccaaaaatgtgactcctgctgctattaaacaggggatgttgccttggcaccgacaggtgtgactagcggttgaaatatttcagatacggggccccttcttgccttggtccctcattcaaatgaattcacgaatcaggttttctcttgtataaatgagttttttttaagggcgtctactaaatcttggtttgaaggatgaattcttctgggctcacatttgcttctttactccacagatggtggagtaaaatctgtgttcattgcaccttccgctggtgctttaggctccaggagcagcagctccctggattgagtgggagccagttctgcctgactggtctcaccagcacaccagactgcgcaggcgggtcagaggcccacggggaggaaacatcagtggagggaggatgctgtgagcggtccacccctgcatgacagatgtccctttacagaaaagaagtgggaaacagactttggcaaagggaaacggcagagtagcaagatgattttgattactagtgacatttaattgcaattagatttttaaccacaaccaagaagatgataaagcttttccatgtattttccataaaactgtccgagcttaggacactttagtgctcattcttcctgcaacact

SEQ ID NO: 719229 - DNA, 1277 bp, Homo sapiens
agagtgaaaactactaaatgctcaatagataaataataaatcttaagtgcttaataaatgttgctggaatgtgtaacagaatattctgaaaggaaggctattcttaacagtcatgcccactgtgccatgtcctacaatgtgactgctggagagagattagaagtaacatctttttctatggcaagccacacagtcagagacctaagagaaagtagtcctcttcctcttctaataaatagaaatagacagttcctatatcatcagaggatttcatagaaaaagtatttcataacgaaggcttatgatcctgattatgggctacttttaagaactgtggcatcacctgctgctcaactcccagacagagatgggcgtggtctcccgtaacacctgctgctggggcaggctggygaggtagtcaagagtgtagatgctggagccaagccagctttgtgaaaagcccattctaccatatccagatggatcacttcagaaagtgacttatcctctctctgaacctgcccacatttcctcctctagaaacagggataacaacggtgccaacctcctggggtggctgaaggacccagtggatgcgtatacacgaagcacttagaagtgagtctggcaggtactgccaaaaatgtgactcctgctgctattaaacaggggatgttgccttggcaccgacaggtgtgactagcggttgaaatatttcagatacggggccccttcttgccttggtccctcattcaaatgaattcacgaatcaggttttctcttgtataaatgagttttttttaagggcgtctactaaatcttggtttgaaggatgaattcttctgggctcacatttgcttctttactccacagatggtggagtaaaatctgtgttcattgcaccttccgctggtgctttaggctccaggagcagcagctccctggattgagtgggagccagttctgcctgactggtctcaccagcacaccagactgcgcaggcgggtcagaggcccacggggaggaaacatcagtggagggaggatgctgtgagcggtccacccctgcatgacagatgtccctttacagaaaagaagtgggaaacagactttggcaaagggaaacggcagagtagcaagatgattttgattactagtgacatttaattgcaattagatttttaaccacaaccaagaagatgataaagcttttccatgtattttccataaaactgtccgagcttaggacactttagtgctcattcttcctgcaacact

SEQ ID NO: 719230 - DNA, 1277 bp, Homo sapiens
agagtgaaaactactaaatgctcaatagataaataataaatcttaagtgcttaataaatgttgctggaatgtgtaacagaatattctgaaaggaaggctattcttaacagtcatgcccactgtgccatgtcctacaatgtgactgctggagagagattagaagtaacatctttttctatggcaagccacacagtcagagacctaagagaaagtagtcctcttcctcttctaataaatagaaatagacagttcctatatcatcagaggatttcatagaaaaagtatttcataacgaaggcttatgatcctgattatgggctacttttaagaactgtggcatcacctgctgctcaactcccagacagagatgggcgtggtctcccgtaacacctgctgctggggcaggctggcgaggtagtcaagagtgtagatgctggrgccaagccagctttgtgaaaagcccattctaccatatccagatggatcacttcagaaagtgacttatcctctctctgaacctgcccacatttcctcctctagaaacagggataacaacggtgccaacctcctggggtggctgaaggacccagtggatgcgtatacacgaagcacttagaagtgagtctggcaggtactgccaaaaatgtgactcctgctgctattaaacaggggatgttgccttggcaccgacaggtgtgactagcggttgaaatatttcagatacggggccccttcttgccttggtccctcattcaaatgaattcacgaatcaggttttctcttgtataaatgagttttttttaagggcgtctactaaatcttggtttgaaggatgaattcttctgggctcacatttgcttctttactccacagatggtggagtaaaatctgtgttcattgcaccttccgctggtgctttaggctccaggagcagcagctccctggattgagtgggagccagttctgcctgactggtctcaccagcacaccagactgcgcaggcgggtcagaggcccacggggaggaaacatcagtggagggaggatgctgtgagcggtccacccctgcatgacagatgtccctttacagaaaagaagtgggaaacagactttggcaaagggaaacggcagagtagcaagatgattttgattactagtgacatttaattgcaattagatttttaaccacaaccaagaagatgataaagcttttccatgtattttccataaaactgtccgagcttaggacactttagtgctcattcttcctgcaacact

SEQ ID NO: 719231 - DNA, 1277 bp, Homo sapiens
agagtgaaaactactaaatgctcaatagataaataataaatcttaagtgcttaataaatgttgctggaatgtgtaacagaatattctgaaaggaaggctattcttaacagtcatgcccactgtgccatgtcctacaatgtgactgctggagagagattagaagtaacatctttttctatggcaagccacacagtcagagacctaagagaaagtagtcctcttcctcttctaataaatagaaatagacagttcctatatcatcagaggatttcatagaaaaagtatttcataacgaaggcttatgatcctgattatgggctacttttaagaactgtggcatcacctgctgctcaactcccagacagagatgggcgtggtctcccgtaacacctgctgctggggcaggctggcgaggtagtcaagagtgtagatgctggagccaagccagctttgtgaaaagcccattctaccatatccagatggatcacttcagaaagtgacttatcctctctctgaacctgcccacatttcctcctctagaaacagggataacaacggtgccaacctcctggggtggctgaaggacccagtggatgcgtatacacgaagcacttagaagtgagtctggcaggtactgccaaaaatgtgactcctgctgctattaaacaggggatgttgccttggcaccgacaggtgtgactagcggttgaaatatttcagatacggggccccttcttgccttggtccctcattcaaatgaattcacgaatcaggttttctcttgtataaatgagttttttttaagggcgtctactaaatcttggtttgaaggatgaattcttctgggctcacatttgcttctttactccacagatggtggagtaaaatctgtgttsattgcaccttccgctggtgctttaggctccaggagcagcagctccctggattgagtgggagccagttctgcctgactggtctcaccagcacaccagactgcgcaggcgggtcagaggcccacggggaggaaacatcagtggagggaggatgctgtgagcggtccacccctgcatgacagatgtccctttacagaaaagaagtgggaaacagactttggcaaagggaaacggcagagtagcaagatgattttgattactagtgacatttaattgcaattagatttttaaccacaaccaagaagatgataaagcttttccatgtattttccataaaactgtccgagcttaggacactttagtgctcattcttcctgcaacact

SEQ ID NO: 719232 - DNA, 2653 bp, Homo sapiens
gctgcagtaatatagatctcctcagttctcaggtggccaagtgaggccttgggaagctaaagttcctggactggccacctctggctgttagcaacctcattggtttacctctgtgcctgcaaatattcttgattttatgtatagtatattatagagaagtctggaagggaatgctttaaccagcaaagtcaatccattaaacaaaaaggtatgggagagacacgttaagagatcagtaaccatgttgtagtttaaaaaaaaaatgcgaagtctttgttcagaccctcggggtaagcagaagtagactggtctccagtggcaggcatgagagggaatatcctgcccgcagtgatggacattttggtttcaggcagagaggcaggaagctgccctctgaatcagagtaaatgctcacattttgaccttctagcaagggccctctttttcttggcaagaattccttcgaggatcattttcagtttgaggttctgtctgatgttttattttacaattaagtcactattcccatattcattactctgtaaaataagtcaagtaggtaagaggtgtggtagacacttccttctgcctcctgaggatccattttgcagccttcctcactacagaatcctgacagtacggccagttaacaactgacctgcctggattccttgcagtttctgaccaataagctaaaggcaaggcatcctgttgaaaatttcatatgcacagtaacgacactaacctcccgagaagagggcttccttgtccttttctttcttttttgagacggagtctggatctgtcgcccaggctagagtgcagtgacgggatctcagctcactgcaagctctgcctcccgggttcacaccattctcctgcctcagcctcccgagtagctgggactacaggcacctgccaccactcccggctaattttttgtattttagtagagacggcatttcactatgttggccaggatggtctcgatctcctgacctcgtgatccgcccacctcggcctcccaaagtgctgggattacaagcgtgagccaccgcgccaggctgtccttttctttctaaccttgttctgctcctctttttgtagactgaaatgcagatgtcattctgtgggggtgcatgctaacagagagatgatacagcgatggagagaggatagagaggaacctactctgggctacctgtccgtgggatttcttgttatttgaggcaaacccaacctggtgaaatgactgtattgaggtcatctgttccatgaaagctagaaacagaaacaaaacaatcatctaaaaacaaccttccttacattagaccggctgaacgacagcaataaactattaggcctgccattaagatattagttaaaaaatacttccagaagttttgaaagaacttctgggcatcaacaacgaatgcttacaacagttgtggcattaagtctccggcccattatcatttcctaatggagcaaaatctgccatgaaaaatgagccgacatgcctaacgccccgggagctgcatcatttgaatatttttgactctaaatatagtgaagtagttggctcttttttctaaaactacaatttactgatcagtgatatcaagagaaataagaacacagcagtgatcaacaggaaacacaaaacaggaacgcattgtttattctgttctcggtggacactgccagatcattgttcagagagctttcaacagggttgcttcgatggagtttagggagtttttaaatctaaattgaagatgaaatgtgtcctcgggacagaaaaagcaattttgaaaaggttattcaaggccataaggtattgactttgagcgtttaaaaaaaaaaacaaaaaacctgtaagaatcttactgtggtttcttaaaatggtgaatgctgtcagtcataatggaggggaaggtaggtttgattaggcggccggtgaattttcagagttaaacaaagttaaaaatacacaggcaacatgaaaattgttctaagcgttcctgtgtcatggtttctgattaagtatcatgaatggaagaaatgaatataaatcataacgattccgttttataacagacagtctcgtgtaaatattttgtctttctagtcacatgtgccaagagctgtgtgagagtgtaatgatggagagcgtggtctgtacttacccgccaccatcaaacccaactctattactgccagcttctgtggctgctacaatcttcttgggcttcagttctcttacccaccaaataggcactgtgtggcccttgactcataattgttgygaggcttaaatgagttaacacatgcaaagctcttaaacaacagcaactcacaggaggccctccccacgtgttggctgaggctgtttccatcatcatcttaagagcatgggcttggagaatcaagagttctgagttaagtttctggtacttcctcgaattagctccctggtttgggcataatcgttgagcctcattttcctcatctgagcaatgggaatatcgttcattaccttaaagcattaagaagaggggtgaagaatataatgctggaaaaccacacctggcacactggaatcattagataccattttgtttacattacacggaaaaaaattatttgcaaa

SEQ ID NO: 719233 - DNA, 2653 bp, Homo sapiens
gctgcagtaatatagatctcctcagttctcaggtggccaagtgaggccttgggaagctaaagttcctggactggccacctctggctgttagcaacctcattggtttacctctgtgcctgcaaatattcttgattttatgtatagtatattatagagaagtctggaagggaatgctttaaccagcaaagtcaatccattaaacaaaaaggtatgggagagacacgttaagagatcagtaaccatgttgtagtttaaaaaaaaaatgcgaagtctttgttcagaccctcggggtaagcagaagtagactggtctccagtggcaggcatgagagggaatatcctgcccgcagtgatggacattttggtttcaggcagagaggcaggaagctgccctctgaatcagagtaaatgctcacattttgaccttctagcaagggccctctttttcttggcaagaattccttcgaggatcattttcagtttgaggttctgtctgatgttttattttacaattaagtcactattcccatattcattactctgtaaaataagtcaagtaggtaagaggtgtggtagacacttccttctgcctcctgaggatccattttgcagccttcctcactacagaatcctgacagtacggccagttaacaactgacctgcctggattccttgcagtttctgaccaataagctaaaggcaaggcatcctgttgaaaatttcatatgcacagtaacgacactaacctcccgagaagagggcttccttgtccttttctttcttttttgagacggagtctggatctgtcgcccaggctagagtgcagtgacgggatctcagctcactgcaagctctgcctcccgggttcacaccattctcctgcctcagcctcccgagtagctgggactacaggcacctgccaccactcccggctaattttttgtattttagtagagacggcatttcactatgttggccaggatggtctcgatctcctgacctcgtgatccgcccacctcggcctcccaaagtgctgggattacaagcgtgagccaccgcgccaggctgtccttttctttctaaccttgttctgctcctctttttgtagactgaaatgcagatgtcattctgtgggggtgcatgctaacagagagatgatacagcgatggagagaggatagagaggaacctactctgggctacctgtccgtgggatttcttgttatttgaggcaaacccaacctggtgaaatgactgtattgaggtcatctgttccatgaaagctagaaacagaaacaaaacaatcatctaaaaacaaccttccttacattagaccggctgaacgacagcaataaactattaggcctgccattaagatattagttaaaaaatacttccagaagttttgaaagaacttctgggcatcaacaacgaatgcttacaacagttgtggcattaagtctccggcccattatcatttcctaatggagcaaaatctgccatgaaaaatgagccgacatgcctaacgccccgggagctgcatcatttgaatatttttgactctaaatatagtgaagtagttggctcttttttctaaaactacaatttactgatcagtgatatcaagagaaataagaacacagcagtgatcaacaggaaacacaaaacaggaacgcattgtttattctgttctcggtggacactgccagatcattgttcagagagctttcaacagggttgcttcgatggagtttagggagtttttaaatctaaattgaagatgaaatgtgtcctcgggacagaaaaagcaattttgaaaaggttattcaaggccataaggtattgactttgagcgtttaaaaaaaaaaacaaaaaacctgtaagaatcttactgtggtttcttaaaatggtgaatgctgtcagtcataatggaggggaaggtaggtttgattaggcggccggtgaattttcagagttaaacaaagttaaaaatacacaggcaacatgaaaattgttctaagcgttcctgtgtcatggtttctgattaagtatcatgaatggaagaaatgaatataaatcataacgattccgttttataacagacagtctcgtgtaaatattttgtctttctagtcacatgtgccaagagctgtgtgagagtgtaatgatggagagcgtggtctgtacttacccgccaccatcaaacccaactctattactgccagcttctgtggctgctacaatcttcttgggcttcagttctcttacccaccaaataggcactgtgtggcccttgactcataattgttgtgaggcttaaatgagttaacacatgcaaagctcttaaacaacagcaactcacaggaggccctccccacgtgttggctgaggctgtttccatcatcatcttaagagcatgggcttggagaatcaagagttctgagttaagtttctggtacttcctcgaattagctccctggtttgggcataatcgttgagcctcattttcctcatctgagcaatgggaatatcgttcattaccttaaagcattaagaagaggggtgaagaatataatgctggaaaaccacacctggcacactggaatcattagataccattttgtttacattacacgraaaaaaattatttgcaaa

SEQ ID NO: 719234 - DNA, 693 bp, Homo sapiens
tgtgaacaatataaattgtcattaaatattaacaaggccgggtgcagtggctcaagcctgtaatcccagcactttgggaggctgaggcgggtggatcatgaagtcaggagtttgagaycagcctgaccagcattgtgaaaccccatctctactaacaatacaaaaatgagccaggtgtggtggtgcgcgcctataaatccagttactcaggaggctgaggcaggagaatcgcttgaacccaggaagaggaggttgcagtgagccgagatcgcgccactgcactccagcctgggcgacagagtgagactccgtctcaaaaaaaaaaaaaaaaattaactaaaataaacacactgcaccaaaaacattaaaaacaacatctggaagtttcatataagacttaaagtaggccagaaacggtggctcacacatgtaattccagcattttgggaggccaagacaggcggatcacttgaggtcaggagttcgagaccagcctcgtcaacatggtgaaacccgtctctactaaaaatacaaaaactagctggacatggtggcacatacctgtaatcccagctactcaagaggctgaggcaggagaattgtttgaacctgggaggcagaggttgcagtgagccgtgatcacaccaatgcactccagcctaggtgacagagcaagactccatctcaaaagat

SEQ ID NO: 719235 - DNA, 3572 bp, Homo sapiens
tctaaaagcagaatattaatacaaaatgcaaacctgatttttcttttcctcagagaagttaatcctacaagatttcaggggacctgagccaactctctctccatttaacatccactttataaattctatgtagtaactagtggctgctgaatgtttcctgggctgattttgtacttttacactaatctttcatgtaaagaaagtactggaaggcagtggaggaagaaacatttggggaacaactattcctcttttctattaaaaaaaaaaaaaaaaatcaaatcactccccatctcacatacctgtcaagaaatcaaacagtgatggttaatgccaaagtagtccttgctcctgacagattttcagaggaaaccttagctgcccctgcaacagctgtgctgtgctcctccgccagctatggagtcatgagcacccgaacccatttcacaggtgtcacagatgtcaaatctctggggggtctaccctcagccccggctccaacacagcacagccctatctcctgcctccagtgtagcccttcaccccaatcccaccaccttctcttccacagaaaagagccccgatgcaatgtccacatcttcatatttatttccacagtgttaacatggaatagacttagcaaccattgcagagaaaaaaaaaatctctcattggtttatgagttaaatcctgtaacaatgaatttcaaccattcgaagtcttctgctgcttaacatttactgaatcaaaggctgaagtaaatggactctcatctaggtctcagaaatcacacagctggcctcgtgatgtatttacgatgggatttaacttctaatacaaggcaagtttgacagttacagccaatgaagtgcacgactctgtacatggatttcttgacctaacattcaaaaggacatttcatagtactagtttaattctgatctctctctagaaggcagaaaccacatcccacactcctatgcaatttgttattttggtattgtaaagtaaatgaataagaaggggtggaggcataaagaaaatctagtttctggctgggcagggtggttcacgcttgtaatcccgcactttgggaggccaaggcgggtggatcacgaggtcaggagattgaggatcatcctggccaacatggtgaaaccccgtttctactaaaaatacaaaaattagccgggcttggtgacatgcgcctgtagtcctagctactcgggaggctgaggcaggggaatcacttgaactgggaggtggaggttgcagtgagccaagatcgcaccattgcactccagcctgggcaacagggtgagactctgtctcaaaaaaataaaataaaataaaataaaaacaaagaaaaaaaaataaaatctttaggcattcccagacacaaagatctcagagacagacaacagagagcctccgtgttcatctgcccgaggctgtttgtcacagttcccttaaaagatgcctggaaatgctcccaacaacaagggactcaagtatggggctgagtttgttaaaaaagcagctaaatgtgtttaggaaacacacgaagtgaaaccagacagtgatggcccatgtacaagacttgtgcttgaagctttggtgtgcctccatggccaatttttcaggcaccaaaacccattcctgattaattattgatatacaatgcaaaccaaactatgaaaacacagactttttttcagaagagggaaataaaggcacagaaacctgccaaaatagatatttttttccataagaatagtatggttgattaaaatagtttatcactagtaaaacttgtatcactagagcagacaatacaaattagttttttaaaaaatgacattcactgaattcttggtctgtgcattcaatgtgaataatcatcaaaaatatattacaattaaaggtttgtaaggagctctgtctgggatttctgcagtatattatttcggaggagaagaaccaccataaagtatgagctatccactgttcctttttatgtcatgtatggtaatcagtctatctcctaatgcaggctcacaaacttccacggtgagatgtctaagtgacttagtgaccttcacactcattaaaggcagccctgtcyatcaaactccatacctagaaagttcaataaactgtattacattttaataaatatttctgtgtactttttgttttttgcttttaagctcagcttaaattttgtcaaggaaaccatttcacaagacagtatgtcacagcctactatcagcaatagtccttgtttattagaatctgcagatgtccatattacatcaaatataaatatatattatatttacatttccttcttagctttcaatttaggtgagtgtatttatagataatgccactaacgcaccactattctaatcctcagtgcaactcataccttctttccattagatgctcattaatgtaagacagcatcttaaaagaggggtactgttcttttttaaaataaaaggaaagaaagggaatccaagaatggaggtctagacatttcctaagagatttttgttttgttttttatacttagaaatacttgaaaaatgtggtccctttttgtagtactagtctctacttggggacaagaaaatagaatatgcaactcagaaaggaaagagcccaaagacgagagaacctgcttgttagctcattaacctgtttagtaaagatctgctttaaaatgcctgatgctgtgcagtatcatacaaaacaatcttcagccttcaaagcagctgatgcaccttctcagagatctgtttgtctgattaacagtctgctgccttggtgggccttggtcttggtcactttcggtcatcgatggttttaatgaattctactgctgctgtgaactgcatccaccaataggactcctctccagacagacagctagcataaaagctactgatatactgcacagtagacagcaaacagggtggatttgcctagagaagtgaaaaataaaaaagaatcaattactcagatgtcatagctctgccaaaatcatttaagtgttcttcgaatgttcttctatgaaagacataccaatccttttgaaaacaaccccaaagttattttttggaagtaatctgtgaaccctagtttccatgagtagcaataatatgctggaaaggcaacccaggttctaatctcagctaatctatctagaggtttctatccttgcaagtccttaacctcactgatttctaagaaggctgaactaatctctgtggtcttactcaacatccccggatttcagaatgttagataacaaaataaatgctgtaggcaaattgagttatatctggtaagtccagggagaataagctgagaaagaaaaaactaaaaaagatgacatgccctctgttgccagaggtaacagaggacatctcctgaattttttttacctttttcatgtggtgagaaagggcacaggctgttaaatggttaagaggaagagctagggccttttccttaaaactagcttaaactggctctacacaggaactagatttatcacatgtgga

SEQ ID NO: 719236 - DNA, 642 bp, Homo sapiens
tcagagaaaatgcaagaaggttgaacctgaagaatgagttaggagaactgaagcaaaacaaacaaacagaaaatattctgggcagagagaataatatacactaagtcctttcactggaattaagtttggatyccccaagaatgccaggatagataagtcatattcaagagagactagctaaaaaattcaaaacatagccaggccagatactatagggccatgggaagtctttgaaggatgtcttacatcagaccacataatctgctttgcagcttctacaaagatcgttctggttgctccgtgcagaattatttggagggaggcaaaaaatggatgtggcgaaaccagttgagatgctaccatggcatcctctgcacgatgcaagtccattagaacaataataacaatgataacggccaaaacgttagaacttaaaaatggtagccactggtctttgtgctttaggtgttattaactggttaaacatatctgagacaggtgagggcattgggatgagaagggaacaaattacagaaatattaccggtattattaattttattattattacttcttattacatatattatatattgcattacttatattacaggtaagattagccaaccagaaaacaaacctg

SEQ ID NO: 719237 - DNA, 642 bp, Homo sapiens
tcagagaaaatgcaagaaggttgaacctgaagaatgagttaggagaactgaagcaaaacaaacaaacagaaaatattctgggcagagagaataatatacactaagtcctttcactggaattaagtttggattccccaagaatgccaggatagataagtcatattcaagagagmctagctaaaaaattcaaaacatagccaggccagatactatagggccatgggaagtctttgaaggatgtcttacatcagaccacataatctgctttgcagcttctacaaagatcgttctggttgctccgtgcagaattatttggagggaggcaaaaaatggatgtggcgaaaccagttgagatgctaccatggcatcctctgcacgatgcaagtccattagaacaataataacaatgataacggccaaaacgttagaacttaaaaatggtagccactggtctttgtgctttaggtgttattaactggttaaacatatctgagacaggtgagggcattgggatgagaagggaacaaattacagaaatattaccggtattattaattttattattattacttcttattacatatattatatattgcattacttatattacaggtaagattagccaaccagaaaacaaacctg

SEQ ID NO: 719238 - DNA, 642 bp, Homo sapiens
tcagagaaaatgcaagaaggttgaacctgaagaatgagttaggagaactgaagcaaaacaaacaaacagaaaatattctgggcagagagaataatatacactaagtcctttcactggaattaagtttggattccccaagaatgccaggatagataagtcatattcaagagagactagctaaaaaattcaaaacatagccaggccagatactatagggccatgggaagtctttgaaggatgtcttacatcagaccacataatctgctttgcagcttctacaaagatcgttctggttgctccgtgcagaattatttggagggaggcaaaaaatggatgtggcgaaaccagttgagatgctaccatggcatcctctgcacgatgcaagtccattagaacaataataacaatgataacggccaaaacgttagaacttaaaaatggtagccactggtctytgtgctttaggtgttattaactggttaaacatatctgagacaggtgagggcattgggatgagaagggaacaaattacagaaatattaccggtattattaattttattattattacttcttattacatatattatatattgcattacttatattacaggtaagattagccaaccagaaaacaaacctg

SEQ ID NO: 719239 - DNA, 642 bp, Homo sapiens
tcagagaaaatgcaagaaggttgaacctgaagaatgagttaggagaactgaagcaaaacaaacaaacagaaaatattctgggcagagagaataatatacactaagtcctttcactggaattaagtttggattccccaagaatgccaggatagataagtcatattcaagagagactagctaaaaaattcaaaacatagccaggccagatactatagggccatgggaagtctttgaaggatgtcttacatcagaccacataatctgctttgcagcttctacaaagatcgttctggttgctccgtgcagaattatttggagggaggcaaaaaatggatgtggcgaaaccagttgagatgctaccatggcatcctctgcacgatgcaagtccattagaacaataataacaatgataacggccaaaacgttagaacttaaaaatggtagccactggtctttgtgctytaggtgttattaactggttaaacatatctgagacaggtgagggcattgggatgagaagggaacaaattacagaaatattaccggtattattaattttattattattacttcttattacatatattatatattgcattacttatattacaggtaagattagccaaccagaaaacaaacctg

SEQ ID NO: 719240 - DNA, 580 bp, Homo sapiens
ctttttgttttgtttgtttttgtttttgagggggctcactgcaacctccacctccaggattcaagcgattctcctgccccagcgtcccaagtagctgggattacaggcacctgccaccacgcccggctaattttttgtatttttagtaaagacagggtttcactatgttggtcaggctggtctcgaactcatgacctcaggcgattcacccgcctcggcctcccaaagtgctgggattacaggcatgagccacygaacccagcctcgacagttcttagactgttaatggttataattctctgcaagattcttgaaatgttagagtttattagagtaaatccgtaagttacacctttcatttaatgttgattctttgacccaggaatggctccagtttggaatgattttttttttttttttttttttggagatagagttttgctctgtcccccaggctggagtgcagtggtacgatcttggctcactgcaacctctgcctcccaggttcaagtgattcttctgcctccgcctcccaagtagctgggactataggtgtgtgccaccatgcccagctaatttt

SEQ ID NO: 719241 - DNA, 1089 bp, Homo sapiens
atatgaaaattaaagaaggaaagtaaggtgtagaaaactacttactataggatgccagtttctgagatttttctgttaatttcatttaatcctcaccttacaaggaagatatcattattgtcactttttacagagaaacaaaacccaaaaaggattaagtaacttgccaaagttacagtgccaggatttctctacatcccactgcctctcccatagattgaggctcctatataaggaggaaactgttctggttttctcttccttggccaatttggaaatctaggagggcagtggaaacttttaggcagatagaaaaagtggggctaggagggagagtgacttatgatggctttgggggcactctggcttcccctccgaccactgaggggacccagctcctctgctggctctgctacttcaggctggccctctcagaaggtaacacctacccctaatcacatcctcattggcttgcagtatgcaggcctcccctgcatcaactcactggaatccatttataacttctgtgacaagccatgggtggaaagtgaggcccccttcccccaggtaaaaggctaggatccagaccctgcatcttccaggcccctaggagggacttctggaccccaagatgcagtaagcccttcttgttttgtaaaaatgaaatttcagctgtcacacgccctggattgccaaggttcctggaacttgtgtctaattgtgaagtttccacrcctttacaccactcagagagctgaagaggggtgtgtgtgtgtgtgtatgtgtgtgtgtatgtgtgtgtgttaaccaaacagatctgtcacttctgatcttgatcttttttttcaccctggaactaacagctttctttttccttttgaagccagggagagcttggagtgtaagaaaaagatcaatggacaagtagtcaggagggctgggagctgccatggttaaggagggggttgggttcccaagctccacttgttcagcctttccttctgcgtggcctgaggcatctggaatcctagattctgcagaaacacgctaacagagtgtgattttagtatgttgccaatcacagaagag

SEQ ID NO: 719242 - DNA, 1204 bp, Homo sapiens
gatgtttggcaagtctaaaaatttaaaaagcactttagtggccgggtgcagtggctcacacctgtaatcccagcactttgggagaccaaggcaggcagatcactcgagcccaggagttcaagaccagcctgggcaacatggtgaaaccccgtctctactaaaaatacaaaaagctactacaggtgaagtaacacacacctgtggtcccacctacttgggaggctgaggcacaggaatcatttgaacctgggaggcagaggttgcagtgagccaagatcatgccactgcactccagcaagagtgagactctgtcgcccccaaaaaattaataaaataaaataaaataaataaaaagcactttagttagaaaaaaagaaatgcagccaaggcatcaatctggaaatgacactgcaaggatacagcaccatcccccaggatgcagtattcaccctgaatcaacagccatttatgagttgttgattaagagctcaagtgcatgctctttgcaggcatgtagagagacatcagatggtatttccagattggggctgaggctgtcttgtcgaagtagaataaatggatctgggaatccgggggtgtaagtatgagtgggtgctctcactgtactcccagtgagctgctgggagaaatcagtcctttcatctgtacagctctaggctctataggtctagaagtcctcattcccagcaggaggatgcttcccccaggaggccaataaaatttgtcttatcaaaccagctgccacctggtcacttcaggctccttacaccaacagaccagcaggcaaaaaaargagtcatgttcttggcaggttaaatgatcaccaggaggaggcagggctgctgttgcacaacaggatggggagggactcatctaacactccagcagatctattgcggtgattcttggttcttctctgaccaactttgatggttaatagacagatgcggcaaccatgacctgagacaagcatggtgaccatggtctcaaacctctcagggccatctcactaggtaagccacctagaccagcagagacgctggccgagggtgaggggatctagaatgcacaggagaggagggagaagaagactatcagctgtgccctgagaccagctgcagcgtgacagctgccattcattccactaaccttctcaaacttccccagaaaaagagatgaaaaa

SEQ ID NO: 719243 - DNA, 1035 bp, Homo sapiens
  misc_feature 963, 970, 972, 974, 979: n = A,T,C or G
taaatgttaagatttcttcctcagtcttgccattttacaccatcccaaatggtatgaaaagttgaatagcagtcattttttattggtttttgtcttttgatgggatctcattatatgtaatccagatttcctcaagtttttcagttaaaaggaattgataggacaatgttccaatatgctgagacacaagacaataaaatgcttgactgtgtaactgaattagtgtgttgaattgtatcactcaccagttgatgtacatttaaaacaggtgcactaaatagttttagrtaattattgataattctctggttcttttcaattatagcgctggataaaacaagccttagaagaagggatgactcaaacatcatctgtaccccaagagactagaactcagcacctataccaaagcaatgagaatagtagctcttctagtatctgcaaagacaatgcaggtacgtatctaaaacctttctgattatatgaccaatgattgtttcaggtctgcataaaaaatttaagtatgagtatttctgatacaaaaagaaatggcgtgttttctaaatagttactttacatctgtctttacagaggaagagagagatctcaagtcagggatcagttttcccaggacgacaaagaaggactagacagtgtacagataacagcagaaatggttataaaaaaggttagatacatttaaagtagtaagtttaggaaatttatattcatatttataagatggggcaagggcaagaaagtggtggaacactaatattcaggaaagaattaaaattctgagtgattaagttgggtgggacatggttgagggagcaggggatgaatgaaataagtgaaaaattattatcaattgattgttttcaaaggggcttgtataattagcatacaatttttaaaagaacagccgggcgctgtggctcgcacctgtaatcccagcacttngggaagncnangtggntggatcacctgatgtcaggagtgccacaccaacgtgtacaccatggtgaatccctg

SEQ ID NO: 719244 - DNA, 850 bp, Homo sapiens
tttgtgcgtaactattacttgatggtgcaggcctttattgacctgagcaaaacagtgtttaaatcgatgtsattcccacattatgctgacatcattaccctatttataaataacatgtgagttaattcacatcatagaagtatgcattgtactaaaacagactgtagtcctatatagctatcatttttcctttgctcagttgttccactggtgatttagaaaggtgtacatgttacatttattctatcagtaatcacttctaagtattttaaaacacatctaagtctatttttcatttccatgcaatctcccagtctcagatggtttgacctaaagacttcttgtttcagcatcatggatggaatatctttatacacgaagaattatctaaaatgttctcatttattgtaataactacattacaggatggcagttgttctgaatagttgttctgaatattcggctgggatgcaaggtgagttctttacgtttaattgaaagagaatgcatgaataatatatttatatgtgcagcaatatatttcaggttaacagagaggatattttaaggtaatccaatactaaaaggtggggtattatggtacaaattggctagctgttctccaactttttttccttcctcatgggcacatagctagactatattccccagccttattcaagtcaggatgacccttacgactaaattctggccaatagtctttagacacaattggtttgcagtcttcccagacttgacccatggagccttgtttgtagtatcccagttctctcctccccttgactctcggctgcctgccaacaaccagagtattcctgggagtcatgca

SEQ ID NO: 719245 - DNA, 850 bp, Homo sapiens
tttgtgcgtaactattacttgatggtgcaggcctttattgacctgagcaaaacagtgtttaaatcgatgtgattcccacattatgctgacatcattaccctatttataaataacatgtgagttaattcacatcatagaagtatgcattgtactaaaacagactgtagtcctatatagctatcatttttcctttgctcagttgttccactggtgatttagaaaggtgtacatgttacatttattctatcagtaatcacttctaagtattttaaaacacatctaagtctatttttcatttccatgcaatctcccagtctcagatggtttgacctaaagacttcttgtttcagcatcatggatggaatatctttatacacsaagaattatctaaaatgttctcatttattgtaataactacattacaggatggcagttgttctgaatagttgttctgaatattcggctgggatgcaaggtgagttctttacgtttaattgaaagagaatgcatgaataatatatttatatgtgcagcaatatatttcaggttaacagagaggatattttaaggtaatccaatactaaaaggtggggtattatggtacaaattggctagctgttctccaactttttttccttcctcatgggcacatagctagactatattccccagccttattcaagtcaggatgacccttacgactaaattctggccaatagtctttagacacaattggtttgcagtcttcccagacttgacccatggagccttgtttgtagtatcccagttctctcctccccttgactctcggctgcctgccaacaaccagagtattcctgggagtcatgca

SEQ ID NO: 719246 - DNA, 440 bp, Homo sapiens
cttcatattttgtaacttcaaacttttatgtttcttttctgtaccagtcttgtgtctccaaaaagatggaaaacttaagtgtctctctatttaattccaacacccagtgtgagacctcacagattgttggcagagaaaatgtcaatagtgatatctgtgagaggagctgcttttggtaggctgtagtgatagagcctctagcagccaatccacctcagcgtttttattcaatcactttttgctcatgctgagaaattcctgaggcattcaagaagtaggcmtttctgaaaagccccatctactacttaagtgaccttgggaatattatttagtccgtctgtgtcttggttccctcatctttaaaacgaacctaagatcacatatctcagaagcttgagtaaaaattagaagaaataattctttgttgagtgactggcatg

SEQ ID NO: 719247 - DNA, 628 bp, Homo sapiens
ttaaatagatttgtatgcttttctcttgttaatttgtcttttgttataggcgtctcagccatgagtctagcaatagatgagaaaaaaatctttactcccctactatgcacatagatacacacaaacacacacacaaacacaggtactgtacatttccatgcatacataattctttgaagtgcaagaatagaaaaaaatgtatttactgtatgataaataaataattatatttatataaagtgaaagataagtcaacagtaacctctatgaggatggtagaattagtgacaggaaatggaaccctgagaatctatctggtgtgatagaaatattttatgtcttgatttgtgtagtggttaccttggtgaatacatatataaaatgccattgagtggtacatttaagacttgcatatcttagtctatgctaattatacttcaagaaaaagtttaacaataataatcwaaggcaacaagatacaaaaataagtgtctttaaatcaagaaatatgtctaaagaacagttgagaaaaacaaacagtatcttttgtcagtttttttctttagccctaataaattaaggaacctgttggcttttgtgtaaagtttactaatggtatcaggcaggc

SEQ ID NO: 719248 - DNA, 628 bp, Homo sapiens
ttaaatagatttgtatgcttttctcttgttaatttgtcttttgttataggcgtctcagccatgagtctagcaatagatgagaaaaaaatctttactcccctactatgcacatagatacacacaaacacacacacaaacacaggtactgtacatttccatgcatacataattctttgaagtgcaagaatagaaaaaaatgtatttactgtatgataaataaataattatatttatataaagtgaaagataagtcaacagtaacctctatgaggatggtagaattagtgacaggaaatggaaccctgagaatctatctggtgtgatagaaatattttatgtcttgatttgtgtagtggttaccttggtgaatacatatataaaatgccattgagtggtacatttaagacttgcatatcttagtctatgctaattatacttcaagaaaaagtttaacaataataatcaaaggcaacaagatacaaaaataagtgtctttaaatcaaraaatatgtctaaagaacagttgagaaaaacaaacagtatcttttgtcagtttttttctttagccctaataaattaaggaacctgttggcttttgtgtaaagtttactaatggtatcaggcaggc

SEQ ID NO: 719249 - DNA, 169 bp, Homo sapiens
atcctttagagaaagagctacctcctccaaagagaagtttgcaagccaaattataaaccrcaagtgtgaaagaagctataaaatattgtgaaagaggctataaattactgaactaaaatgattaaagagataaagtataaattatatatacccatatatatgtgtatat

SEQ ID NO: 719250 - DNA, 926 bp, Homo sapiens
taggatgttgccaacctgaataggcactcaggatttaatttatttcagggaccgattctttactgaatctttactagatctactaggctgagaatgtgctagcaattctcaacacttgccttcaactaaagtcctcttctacctctttcccaacaacaacaaccasaaaagatgagttgctgtttgttgtgggctgctttataagatggtccctagtcatccccaaagtcaggtattcacacagatgcttgcgtgtgggctggccccagtgactcacctctcataaacagaatacagcaaaagtgacaggaggctacatctgaaagtaaattacaacctctcttcctctctcatttgctcactttgatagaatccagctgccttcatgggcactaccccatgagaagcccacatagtaaggaacttagagccaacagcctgcaatgaactgaatcctgtcaatagccatgtgcgtgagcctagcagtagatccactcggatggaggttaaagaggaccccagccacacttgatatcttgactgtggccttgtgagagacttcgatccagagaacccagttaaactgtgcctgcgctcctgatgcaaagacagtaaaaatgttgttttaagccactaaatgatcaaatacagactacagataatatatataatcacattaatactttcataggaatataatttgtatataattatttagcggactacatttaaaaaaaatttgaaggcctctttgttgttagatcgaggggatgttggggcatctttagaaccataagacagagtgcctgacacataccagctgcttatcatgtttaaggagatagtttcttaaaacttttttcccgaagcttgaaacttcactaaatgtgtaagatacattctcaaagaattagctgtatatacaa

SEQ ID NO: 719251 - DNA, 926 bp, Homo sapiens
taggatgttgccaacctgaataggcactcaggatttaatttatttcagggaccgattctttactgaatctttactagatctactaggctgagaatgtgctagcaattctcaacacttgccttcaactaaagtcctcttctacctctttcccaacaacaacaaccagaaaagatgagttgctgtttgttgtgggctgctttataagatggtccctagtcatccccaaagtcaggtattcacacagatgcttgcgtgygggctggccccagtgactcacctctcataaacagaatacagcaaaagtgacaggaggctacatctgaaagtaaattacaacctctcttcctctctcatttgctcactttgatagaatccagctgccttcatgggcactaccccatgagaagcccacatagtaaggaacttagagccaacagcctgcaatgaactgaatcctgtcaatagccatgtgcgtgagcctagcagtagatccactcggatggaggttaaagaggaccccagccacacttgatatcttgactgtggccttgtgagagacttcgatccagagaacccagttaaactgtgcctgcgctcctgatgcaaagacagtaaaaatgttgttttaagccactaaatgatcaaatacagactacagataatatatataatcacattaatactttcataggaatataatttgtatataattatttagcggactacatttaaaaaaaatttgaaggcctctttgttgttagatcgaggggatgttggggcatctttagaaccataagacagagtgcctgacacataccagctgcttatcatgtttaaggagatagtttcttaaaacttttttcccgaagcttgaaacttcactaaatgtgtaagatacattctcaaagaattagctgtatatacaa

SEQ ID NO: 719252 - DNA, 629 bp, Homo sapiens
gaggctgaggcaggagaatcacttgaacccgggatgtggaggttgcagtgagccgagatcgtgccactgcattccagcctgagcaacagagtgaaactctgtctcaaaaaagaaaagaaaagtttagaaaatactggattttgattttattggaattcatagtggtaagtttaggatacatgggcaagagggacagagaagtttaaatatcaaaatgcaggatcacctctaatcaacatattctcctttatcagtcaaaacataaggagagtttatgtcatcaggtaagctgtttgtcccmccttaccctcacatggctgagaaaggaatcatattctagttaaatttgtacagtgaggccaggtgcggtggttcatgcctgcaatcctagcactttgggaggccgaggtgggcggatcacctgaggtcagaagtttgagaccaatctgaccaacacggagaaaactcatctctattaaaaatacaaaattagctgggcatggtggcacatgcctataatcccagctacttgagaggctgaggcaggagaattgcttgaacccaggaggtggaggttgcagtgagccagtcgcaccattgcactacagctgggcaacaagagcaaaact

SEQ ID NO: 719253 - DNA, 596 bp, Homo sapiens
ggatccattagcagtagctattccataggtttccattttcttgagccattctcattccttttgtcacacttccttgtcattaatgacaaaaatttgtaaaattagagaattctgttatcttggaaccaagtttcagaatgtctaaactgacaaggcccttagcaaatgcttccaactcaccaatttcccacttcacattgcagaggggaaacctgaagtccaaaaatggaaatgacttgccaaaaattacaaagcaaatacatgagcattgttttattttattgyatttcattttattttatttatttatttttttgagacagagtcttgctctgttgcccaggctggagtgcagtggcgggatgtcggctcactgcaagctctgcctcccaggttcacgccattctcctgcctcagcctccctagtagctgggactacaggcacccgctaccaagcccagctaatttttttgtaatttttttagtagagatggggtttcactgtgttagccacgatggtctcgatctcctgacctcatgatctgcccgcctcggcctcccaaagtgctgggattacaggcatgagccaccgtgcc

SEQ ID NO: 719254 - DNA, 596 bp, Homo sapiens
ggatccattagcagtagctattccataggtttccattttcttgagccattctcattccttttgtcacacttccttgtcattaatgacaaaaatttgtaaaattagagaattctgttatcttggaaccaagtttcagaatgtctaaactgacaaggcccttagcaaatgcttccaactcaccaatttcccacttcacattgcagaggggaaacctgaagtccaaaaatggaaatgacttgccaaaaattacaaagcaaatacatgagcattgttttattttattgcatttcattttattttatttatttatttttttgagacagagtcttgctctgttgcccaggctggagtgcagtggcgggatgtcggctcactgcaagctctgcctcccaggttcacgccattctcctgcctcagcctccctagtagctgggactacaggcacccrctaccaagcccagctaatttttttgtaatttttttagtagagatggggtttcactgtgttagccacgatggtctcgatctcctgacctcatgatctgcccgcctcggcctcccaaagtgctgggattacaggcatgagccaccgtgcc

SEQ ID NO: 719255 - DNA, 2059 bp, Homo sapiens
tttactcctttatgtgagaccatgtcacatatgtgtatatatttccacagaatgtagaaccctgctggttcttaactacattatagttaactaaaacagaaatctttatattaaaacaacagaaaagaattttctcaacttagataaaattttgatgtaaatccttaaatattctagttgttaatattgttaacaatagtcattagactgtcattagactgtcagatggttttctattttaattatgttccaagctaatctggtaggggttaaaaaaacctatgctaaattgtttggaaggatgttttagtatgatttctttaaaactttaaaatatccctaacaacatgaaaatatagaaaatcaattcccattcaggtttttttaaatcatgatttgagaagaaattgttatttgtaactacaccatcatttcacccaagacaaatcaagatgggactgtgggataagaaagagatctctaaaagagagtcagcactacactaaattaaggatcacaagagctgagtaggatacttttaataattatgactaaacagtcttgttactgtgggcaaaatatcctcttaggctaccaaccccttattaattacgaggagtttgaatatatcgttattgtaaggttcctttcaatttaaagatttttattatggaattagataaactaccattaagtgtcattttgctttatgtttggtgcttttcaatttgtggataagttgctctactgaacccaaggtggaggtcccattacgaggtctgaaattgcctttctgttgaaattgtggactttattttctgattagacctttagagtaagattttgtatccatgacattggttgaaaatgtatattttgtgagatactattaattagccaaaatgaatcacaaaagagtgaagaactcacaatgatgaaagagatatctagaactttcctgggtggtttattctttgagttcagctaggaaaatggcattttctctttccagattttggaagggtattcgatttggagcactgtttatttttaattttaaaaggtaacgtgattgaccaataaactatttcctcagtgtttgacacctgtaacacatgaaactgaatagatgtggggaacaatgctgcagatgacagcaaagattacctttagggaggagacctttgactgtgggttgattaggattcattgttttcaatgttcacagttgagtctgtgtgtagatggggtggtggtagtgatgtcctctcacacttactttgagaggtatatagcatttccctattaactgattaatcatcatcttggggcagcattcttctccatatgaagaaaacttggaataatccattatctactgtatcattaatacatttatttgttctccccgttgtcctttgtcttttcttaatgatttagagttctataaaatattcctattttgtcacagaattgctttccgttttgggataggtyaatagaagttttattttggcacatttctgatggtgatcatttctattttgctaataaaaaatatatcgaatattaaatatatgccaagcattggcacaaatatttaatcctcacaattatctttaagttttcagcctccgttgtatatagtagaaaacacaggtacaaagaggaaaattcatatgactagaatagagtagctactaaatggttaggtagtggacctattatttgaccctggacttctgattccagttccaatattctatccattattcaggcttctaagtgaaatctcatagccgacagaagtgtatatcatttcatgttttttgtctttccagttgcttttctatgtaatgttgcaatgcattttctctaacatgtcagcaaagcctagagataagccagaaatcatcttggtcatagtcaaagaacacctctaggtggcatggaagaatactttttcttcagagtcaaaactatgatgtcttcagctgggattctgggacaacaaactagacagagtctttaaacatgtgatattttacttacaaagtca

SEQ ID NO: 719256 - DNA, 2059 bp, Homo sapiens
tttactcctttatgtgagaccatgtcacatatgtgtatatatttccacagaatgtagaaccctgctggttcttaactacattatagttaactaaaacagaaatctttatattaaaacaacagaaaagaattttctcaacttagataaaattttgatgtaaatccttaaatattctagttgttaatattgttaacaatagtcattagactgtcattagactgtcagatggttttctattttaattatgttccaagctaatctggtaggggttaaaaaaacctatgctaaattgtttggaaggatgttttagtatgatttctttaaaactttaaaatatccctaacaacatgaaaatatagaaaatcaattcccattcaggtttttttaaatcatgatttgagaagaaattgttatttgtaactacaccatcatttcacccaagacaaatcaagatgggactgtgggataagaaagagatctctaaaagagagtcagcactacactaaattaaggatcacaagagctgagtaggatacttttaataattatgactaaacagtcttgttactgtgggcaaaatatcctcttaggctaccaaccccttattaattacgaggagtttgaatatatcgttattgtaaggttcctttcaatttaaagatttttattatggaattagataaactaccattaagtgtcattttgctttatgtttggtgcttttcaatttgtggataagttgctctactgaacccaaggtggaggtcccattacgaggtctgaaattgcctttctgttgaaattgtggactttattttctgattagacctttagagtaagattttgtatccatgacattggttgaaaatgtatattttgtgagatactattaattagccaaaatgaatcacaaaagagtgaagaactcacaatgatgaaagagatatctagaactttcctgggtggtttattctttgagttcagctaggaaaatggcattttctctttccagattttggaagggtattcgatttggagcactgtttatttttaattttaaaaggtaacgtgattgaccaataaactatttcctcagtgtttgacacctgtaacacatgaaactgaatagatgtggggaacaatgctgcagatgacagcaaagattacctttagggaggagacctttgactgtgggttgattaggattcattgttttcaatgttcacagttgagtctgtgtgtagatggggtggtggtagtgatgtcctctcacacttactttgagaggtatatagcatttccctattaactgattaatcatcatcttggggcagcattcttctccatatgaagaaaacttggaataatccattatctactgtatcattaatacatttatttgttctccccgttgtcctttgtcttttcttaatgatttagagttctataaaatattcctattttgtcacagaattgctttccgttttgggataggtcaatagaagttttattttggcacatttctgatggtgatcatttctattttgctaataaaaaatatatcgaatattaaatatatgccaagcattggcacaaatatttaatcctcacaattatctttaagttttcagcctccgttgtatatagtagaaaacacaggtacaaagaggaaaattcatatgactagaatagartagctactaaatggttaggtagtggacctattatttgaccctggacttctgattccagttccaatattctatccattattcaggcttctaagtgaaatctcatagccgacagaagtgtatatcatttcatgttttttgtctttccagttgcttttctatgtaatgttgcaatgcattttctctaacatgtcagcaaagcctagagataagccagaaatcatcttggtcatagtcaaagaacacctctaggtggcatggaagaatactttttcttcagagtcaaaactatgatgtcttcagctgggattctgggacaacaaactagacagagtctttaaacatgtgatattttacttacaaagtca

SEQ ID NO: 719257 - DNA, 2059 bp, Homo sapiens
tttactcctttatgtgagaccatgtcacatatgtgtatatatttccacagaatgtagaaccctgctggttcttaactacattatagttaactaaaacagaaatctttatattaaaacaacagaaaagaattttctcaacttagataaaattttgatgtaaatccttaaatattctagttgttaatattgttaacaatagtcattagactgtcattagactgtcagatggttttctattttaattatgttccaagctaatctggtaggggttaaaaaaacctatgctaaattgtttggaaggatgttttagtatgatttctttaaaactttaaaatatccctaacaacatgaaaatatagaaaatcaattcccattcaggtttttttaaatcatgatttgagaagaaattgttatttgtaactacaccatcatttcacccaagacaaatcaagatgggactgtgggataagaaagagatctctaaaagagagtcagcactacactaaattaaggatcacaagagctgagtaggatacttttaataattatgactaaacagtcttgttactgtgggcaaaatatcctcttaggctaccaaccccttattaattacgaggagtttgaatatatcgttattgtaaggttcctttcaatttaaagatttttattatggaattagataaactaccattaagtgtcattttgctttatgtttggtgcttttcaatttgtggataagttgctctactgaacccaaggtggaggtcccattacgaggtctgaaattgcctttctgttgaaattgtggactttattttctgattagacctttagagtaagattttgtatccatgacattggttgaaaatgtatattttgtgagatactattaattagccaaaatgaatcacaaaagagtgaagaactcacaatgatgaaagagatatctagaactttcctgggtggtttattctttgagttcagctaggaaaatggcattttctctttccagattttggaagggtattcgatttggagcactgtttatttttaattttaaaaggtaacgtgattgaccaataaactatttcctcagtgtttgacacctgtaacacatgaaactgaatagatgtggggaacaatgctgcagatgacagcaaagattacctttagggaggagacctttgactgtgggttgattaggattcattgttttcaatgttcacagttgagtctgtgtgtagatggggtggtggtagtgatgtcctctcacacttactttgagaggtatatagcatttccctattaactgattaatcatcatcttggggcagcattcttctccatatgaagaaaacttggaataatccattatctactgtatcattaatacatttatttgttctccccgttgtcctttgtcttttcttaatgatttagagttctataaaatattcctattttgtcacagaattgctttccgttttgggataggtcaatagaagttttattttggcacatttctgatggtgatcatttctattttgctaataaaaaatatatcgaatattaaatatatgccaagcattggcacaaatatttaatcctcacaattatctttaagttttcagcctccgttgtatatagtagaaaacacaggtacaaagaggaaaattcatatgactagaatagagtagctactaaatggttaggtagtggacctattatttgaccctggacttctgattccagttccaatattctatccattattcaggcttctaagtgaaatctcatagccgacagaagtgtatatcatttsatgttttttgtctttccagttgcttttctatgtaatgttgcaatgcattttctctaacatgtcagcaaagcctagagataagccagaaatcatcttggtcatagtcaaagaacacctctaggtggcatggaagaatactttttcttcagagtcaaaactatgatgtcttcagctgggattctgggacaacaaactagacagagtctttaaacatgtgatattttacttacaaagtca

SEQ ID NO: 719258 - DNA, 2059 bp, Homo sapiens
tttactcctttatgtgagaccatgtcacatatgtgtatatatttccacagaatgtagaaccctgctggttcttaactacattatagttaactaaaacagaaatctttatattaaaacaacagaaaagaattttctcaacttagataaaattttgatgtaaatccttaaatattctagttgttaatattgttaacaatagtcattagactgtcattagactgtcagatggttttctattttaattatgttccaagctaatctggtaggggttaaaaaaacctatgctaaattgtttggaaggatgttttagtatgatttctttaaaactttaaaatatccctaacaacatgaaaatatagaaaatcaattcccattcaggtttttttaaatcatgatttgagaagaaattgttatttgtaactacaccatcatttcacccaagacaaatcaagatgggactgtgggataagaaagagatctctaaaagagagtcagcactacactaaattaaggatcacaagagctgagtaggatacttttaataattatgactaaacagtcttgttactgtgggcaaaatatcctcttaggctaccaaccccttattaattacgaggagtttgaatatatcgttattgtaaggttcctttcaatttaaagatttttattatggaattagataaactaccattaagtgtcattttgctttatgtttggtgcttttcaatttgtggataagttgctctactgaacccaaggtggaggtcccattacgaggtctgaaattgcctttctgttgaaattgtggactttattttctgattagacctttagagtaagattttgtatccatgacattggttgaaaatgtatattttgtgagatactattaattagccaaaatgaatcacaaaagagtgaagaactcacaatgatgaaagagatatctagaactttcctgggtggtttattctttgagttcagctaggaaaatggcattttctctttccagattttggaagggtattcgatttggagcactgtttatttttaattttaaaaggtaacgtgattgaccaataaactatttcctcagtgtttgacacctgtaacacatgaaactgaatagatgtggggaacaatgctgcagatgacagcaaagattacctttagggaggagacctttgactgtgggttgattaggattcattgttttcaatgttcacagttgagtctgtgtgtagatggggtggtggtagtgatgtcctctcacacttactttgagaggtatatagcatttccctattaactgattaatcatcatcttggggcagcattcttctccatatgaagaaaacttggaataatccattatctactgtatcattaatacatttatttgttctccccgttgtcctttgtcttttcttaatgatttagagttctataaaatattcctattttgtcacagaattgctttccgttttgggataggtcaatagaagttttattttggcacatttctgatggtgatcatttctattttgctaataaaaaatatatcgaatattaaatatatgccaagcattggcacaaatatttaatcctcacaattatctttaagttttcagcctccgttgtatatagtagaaaacacaggtacaaagaggaaaattcatatgactagaatagagtagctactaaatggttaggtagtggacctattatttgaccctggacttctgattccagttccaatattctatccattattcaggcttctaagtgaaatctcatagccgacagaagtgtatatcatttcatkttttttgtctttccagttgcttttctatgtaatgttgcaatgcattttctctaacatgtcagcaaagcctagagataagccagaaatcatcttggtcatagtcaaagaacacctctaggtggcatggaagaatactttttcttcagagtcaaaactatgatgtcttcagctgggattctgggacaacaaactagacagagtctttaaacatgtgatattttacttacaaagtca

SEQ ID NO: 719259 - DNA, 2059 bp, Homo sapiens
tttactcctttatgtgagaccatgtcacatatgtgtatatatttccacagaatgtagaaccctgctggttcttaactacattatagttaactaaaacagaaatctttatattaaaacaacagaaaagaattttctcaacttagataaaattttgatgtaaatccttaaatattctagttgttaatattgttaacaatagtcattagactgtcattagactgtcagatggttttctattttaattatgttccaagctaatctggtaggggttaaaaaaacctatgctaaattgtttggaaggatgttttagtatgatttctttaaaactttaaaatatccctaacaacatgaaaatatagaaaatcaattcccattcaggtttttttaaatcatgatttgagaagaaattgttatttgtaactacaccatcatttcacccaagacaaatcaagatgggactgtgggataagaaagagatctctaaaagagagtcagcactacactaaattaaggatcacaagagctgagtaggatacttttaataattatgactaaacagtcttgttactgtgggcaaaatatcctcttaggctaccaaccccttattaattacgaggagtttgaatatatcgttattgtaaggttcctttcaatttaaagatttttattatggaattagataaactaccattaagtgtcattttgctttatgtttggtgcttttcaatttgtggataagttgctctactgaacccaaggtggaggtcccattacgaggtctgaaattgcctttctgttgaaattgtggactttattttctgattagacctttagagtaagattttgtatccatgacattggttgaaaatgtatattttgtgagatactattaattagccaaaatgaatcacaaaagagtgaagaactcacaatgatgaaagagatatctagaactttcctgggtggtttattctttgagttcagctaggaaaatggcattttctctttccagattttggaagggtattcgatttggagcactgtttatttttaattttaaaaggtaacgtgattgaccaataaactatttcctcagtgtttgacacctgtaacacatgaaactgaatagatgtggggaacaatgctgcagatgacagcaaagattacctttagggaggagacctttgactgtgggttgattaggattcattgttttcaatgttcacagttgagtctgtgtgtagatggggtggtggtagtgatgtcctctcacacttactttgagaggtatatagcatttccctattaactgattaatcatcatcttggggcagcattcttctccatatgaagaaaacttggaataatccattatctactgtatcattaatacatttatttgttctccccgttgtcctttgtcttttcttaatgatttagagttctataaaatattcctattttgtcacagaattgctttccgttttgggataggtcaatagaagttttattttggcacatttctgatggtgatcatttctattttgctaataaaaaatatatcgaatattaaatatatgccaagcattggcacaaatatttaatcctcacaattatctttaagttttcagcctccgttgtatatagtagaaaacacaggtacaaagaggaaaattcatatgactagaatagagtagctactaaatggttaggtagtggacctattatttgaccctggacttctgattccagttccaatattctatccattattcaggcttctaagtgaaatctcatagccgacagaagtgtatatcatttcatgttttttgtctttccagttgcttttctatgtaatgtygcaatgcattttctctaacatgtcagcaaagcctagagataagccagaaatcatcttggtcatagtcaaagaacacctctaggtggcatggaagaatactttttcttcagagtcaaaactatgatgtcttcagctgggattctgggacaacaaactagacagagtctttaaacatgtgatattttacttacaaagtca

SEQ ID NO: 719260 - DNA, 861 bp, Homo sapiens
ctttacgatgtaattcatctgatccatattgactaaacatttctttaaaaagttacaaggagggtaaaattccatagtgatctttttatgggaataagataaattaatttgatctttcttcaccacaatataatcattttagttggaaactacttcaccatggggtaaattctccatactccaaattttgatcatgctagctgaatccatttttcatgtttcgtattcatggattagccaaatctaaatccaagacctgcaggtattgactttcagccaaaccgttgagtcatttaagtttggcagtgatttgaaatgtgaraaaaaggatcatgagaaattggattgagaatctgaattcttttaagaaggggcttaaacagaagagtccttatctatgacagtgactttaggtttctacatatttgacatatgtctaattgtgtaacttctattgcatgttaattactcactaagccttctttctctcacctctgtctcctggggaaatgtaactgtgtttttgcttttttctcaccgctaaaattttgactgtatacaaagtaacaaaataaaaattgcttaattattcttattgtttttacttaatgttcatctctaattattagaaggtagtttgagttacttttctggcaaaacacaggacagagtacatgagaaataaatgtgccactgtcaaagaaaataaaaacttcactgtttagaggttttgagggaaaggattgtgtccttctggctcattgaaattgttacatgccattaggcttactgtaaactatcccttgataaattatttgctggacaatgagcttaagaatctgaggtgtcttcttgctttta

SEQ ID NO: 719261 - DNA, 567 bp, Homo sapiens
ataccagcctgacatacatcagttgaaagaagaaaaaaaaaaagagaaaaccctctgctgttctctttcagcttaatggttgatatatttttctttcttctctgactttgccatttattgaagcatagacgggtgccctaccctacatgaaagctatttcctactgcttgtgaaagaaaaaaaatatgaaataaacacttactattctgttacaaggtaacaatagagtgctaattgctgagtaaagtcatgtagccccaggattatgttgagggactccactataaatttgaagacacccataatccatgtatcaggcagaaaatgatttgctgtgctgcacttctcctttaacagtttctatygaactatttaattaaatggaataataattattattccctgatccaaattagaacactttcttgtttaacgttcctagtaagtgcacaataaatattaatgttaatggtgatgatgatggtgttgatgtgttttatggtaagaaccaagaattatgggagcacagaaggtggatgacttttcccttttgggcaggagcagtca

SEQ ID NO: 719262 - DNA, 1133 bp, Homo sapiens
tcttttttttttttgagacagagtcttgctctgtcgcccaggctggagagcagtggcgcgatctcggctcactgcaagctccgcctcctgtgttcaagcaattctcgtgcctcagactcccaagtagctgggattacaggtgtttgccaccatgcccaactaatttttgtatttttagtaaagatgggtttcwccatgttggccaggctggtctcgaatgcctgacctcaagtgatctaccccccttggccccccagaatgctgggattacaggcatgagccaccatgcctggctttgtaaaaaatttttaaagccaatttgcttgtttaaaaaactgaatccacactggtaagttttgttttaataaaaaaattgtgagtaagttgtaaagcttttgataagttcagtggctcctgtaggcagacaataaattgctaagtcccaaagtgttgcaagattctggagagtactttgttcatactttgaagaatatgcctgattataaggcaacacaaattactgaagccttgaaatgatgaggttgtttccatttactcgcacataaaataatatatctaaaacatctagcaactctcaaaagaagagagtaaaaagcttttgagaaatcaaatacaattcattccaattcaacttgaaaattcccaacagtccgtgttgcattttatacatcttgaaccaaaccatggctttgagtaaaggcttcatttaaaaacctaacctatatatggtgggtgttcatgttctattaaagcaaggtccctgtcctagttggagggaacttccctaggtccggcagcataaaccagtgcctgtcgaccagggagtgtcaggaggatgtgctgcttcctgccccctcccacacagggagcaaggctgtgctgaatggagatattctagtaaggaggagagtgtatgtgagaaggtgtatgtgagaaggtgtggcatccacaacaaaactaataaagcatcagcaaccttaggtgatgcggtttggctatgtccccacccaaatctcatcttgagttcccacatgttgtgggaggtaattgaatcacagggacaggtctttctcatgctgttctcgtgatagtgaataagtgtcataagagct

SEQ ID NO: 719263 - DNA, 1133 bp, Homo sapiens
tcttttttttttttgagacagagtcttgctctgtcgcccaggctggagagcagtggcgcgatctcggctcactgcaagctccgcctcctgtgttcaagcaattctcgtgcctcagactcccaagtagctgggattacaggtgtttgccaccatgcccaactaatttttgtatttttagtaaagatgggtttctccatgttggccaggctggtctcgaatgcctgacctcaagtgatctaccccccttggccccccagaatgctgggattacaggcatgagccaccatgcctggctttgtaaaaaatttttaaagccaatttgcttgtttaaaaaactgaatccacactggtaagttttgttttaataaaaaaattgtgagtaagttgtaaagcttttgataagttcagtggctcctgtaggcagacaataaattgctaagtcccaaagtgttgcaagattctggagagtactttgttcatactttgaagaatatgcctgattataaggcaacacaaattactgaagccttgaaatgatgaggttgtttccatttactcgcacataaaataatatatctaaaacatctagcaactctcaaaagaagagagtaaaaagcttttgagaaatcaaatacaattcattccaattcaacttgaaaattcccaacagtccgtgttgcattttatacatcttgaaccaaaccatggctttgagtaaaggcttcatttaaaaacctaacctatatatggtgggtgttcatgttctattaaagcaaggtccctgtcctagttggagggaacttccctaggtycggcagcataaaccagtgcctgtcgaccagggagtgtcaggaggatgtgctgcttcctgccccctcccacacagggagcaaggctgtgctgaatggagatattctagtaaggaggagagtgtatgtgagaaggtgtatgtgagaaggtgtggcatccacaacaaaactaataaagcatcagcaaccttaggtgatgcggtttggctatgtccccacccaaatctcatcttgagttcccacatgttgtgggaggtaattgaatcacagggacaggtctttctcatgctgttctcgtgatagtgaataagtgtcataagagct

SEQ ID NO: 719264 - DNA, 1133 bp, Homo sapiens
tcttttttttttttgagacagagtcttgctctgtcgcccaggctggagagcagtggcgcgatctcggctcactgcaagctccgcctcctgtgttcaagcaattctcgtgcctcagactcccaagtagctgggattacaggtgtttgccaccatgcccaactaatttttgtatttttagtaaagatgggtttctccatgttggccaggctggtctcgaatgcctgacctcaagtgatctaccccccttggccccccagaatgctgggattacaggcatgagccaccatgcctggctttgtaaaaaatttttaaagccaatttgcttgtttaaaaaactgaatccacactggtaagttttgttttaataaaaaaattgtgagtaagttgtaaagcttttgataagttcagtggctcctgtaggcagacaataaattgctaagtcccaaagtgttgcaagattctggagagtactttgttcatactttgaagaatatgcctgattataaggcaacacaaattactgaagccttgaaatgatgaggttgtttccatttactcgcacataaaataatatatctaaaacatctagcaactctcaaaagaagagagtaaaaagcttttgagaaatcaaatacaattcattccaattcaacttgaaaattcccaacagtccgtgttgcattttatacatcttgaaccaaaccatggctttgagtaaaggcttcatttaaaaacctaacctatatatggtgggtgttcatgttctattaaagcaaggtccctgtcctagttggagggaacttccctaggtccggcagcataaaccagtgcctgtcgaccagggagtgtcaggaggatgtgctgcttcctgccccctcccrcacagggagcaaggctgtgctgaatggagatattctagtaaggaggagagtgtatgtgagaaggtgtatgtgagaaggtgtggcatccacaacaaaactaataaagcatcagcaaccttaggtgatgcggtttggctatgtccccacccaaatctcatcttgagttcccacatgttgtgggaggtaattgaatcacagggacaggtctttctcatgctgttctcgtgatagtgaataagtgtcataagagct

SEQ ID NO: 719265 - DNA, 1133 bp, Homo sapiens
tcttttttttttttgagacagagtcttgctctgtcgcccaggctggagagcagtggcgcgatctcggctcactgcaagctccgcctcctgtgttcaagcaattctcgtgcctcagactcccaagtagctgggattacaggtgtttgccaccatgcccaactaatttttgtatttttagtaaagatgggtttctccatgttggccaggctggtctcgaatgcctgacctcaagtgatctaccccccttggccccccagaatgctgggattacaggcatgagccaccatgcctggctttgtaaaaaatttttaaagccaatttgcttgtttaaaaaactgaatccacactggtaagttttgttttaataaaaaaattgtgagtaagttgtaaagcttttgataagttcagtggctcctgtaggcagacaataaattgctaagtcccaaagtgttgcaagattctggagagtactttgttcatactttgaagaatatgcctgattataaggcaacacaaattactgaagccttgaaatgatgaggttgtttccatttactcgcacataaaataatatatctaaaacatctagcaactctcaaaagaagagagtaaaaagcttttgagaaatcaaatacaattcattccaattcaacttgaaaattcccaacagtccgtgttgcattttatacatcttgaaccaaaccatggctttgagtaaaggcttcatttaaaaacctaacctatatatggtgggtgttcatgttctattaaagcaaggtccctgtcctagttggagggaacttccctaggtccggcagcataaaccagtgcctgtcgaccagggagtgtcaggaggatgtgctgcttcctgccccctcccacacagggagcaaggctgtgctgaatggagatattctagtaaggaggagagtgtatgtgagaaggtgtatgtgagaaggtgtggcatccacaacaaaactaataaagcatcagcaaccttaggtgatgcggtttggctatgtccccacccaaatstcatcttgagttcccacatgttgtgggaggtaattgaatcacagggacaggtctttctcatgctgttctcgtgatagtgaataagtgtcataagagct

SEQ ID NO: 719266 - DNA, 638 bp, Homo sapiens
ggaagactgcagatataaatgacaagtgatttattttgttttcagcctccagagctttagctttagagtcagataggcagagctgggtttatatatcatcctgagtaactaacctcagcatctgaacctcagtttattaattggtaaaaaaaaaaacraacaaaaaaaaaaaaaactggggagataataactgctacttcatagggtgattgtgcaaagaactaagctacatagatctcctcacctgctcatgtgagctctcagagcagtgagggagggatgcagagacaggtcatccaagtgcagggaagaaatggctgcagtccaggctcagggaacggagaggatgcagggcaaaaaaggatggactcctggagaagggaagtgtatcatccagagaaatgatctagtttatacgccttcttcatggcacagcccactgtgggaaatcgttttcatttgctcccttggtacagaaggaaggccagccccaccaggctccacagttttgttcaccaaatcctcaagtgatatctggcacagagtaagccaattaatgaatgttgactgggtgaaggaacaagccaatggaaaattggcttcctagaggaggtgtcgtctgagtttgagccttgagc

SEQ ID NO: 719267 - DNA, 638 bp, Homo sapiens
ggaagactgcagatataaatgacaagtgatttattttgttttcagcctccagagctttagctttagagtcagataggcagagctgggtttatatatcatcctgagtaactaacctcagcatctgaacctcagtttattaattggtaaaaaaaaaaacaracaaaaaaaaaaaaaactggggagataataactgctacttcatagggtgattgtgcaaagaactaagctacatagatctcctcacctgctcatgtgagctctcagagcagtgagggagggatgcagagacaggtcatccaagtgcagggaagaaatggctgcagtccaggctcagggaacggagaggatgcagggcaaaaaaggatggactcctggagaagggaagtgtatcatccagagaaatgatctagtttatacgccttcttcatggcacagcccactgtgggaaatcgttttcatttgctcccttggtacagaaggaaggccagccccaccaggctccacagttttgttcaccaaatcctcaagtgatatctggcacagagtaagccaattaatgaatgttgactgggtgaaggaacaagccaatggaaaattggcttcctagaggaggtgtcgtctgagtttgagccttgagc

SEQ ID NO: 719268 - DNA, 638 bp, Homo sapiens
ggaagactgcagatataaatgacaagtgatttattttgttttcagcctccagagctttagctttagagtcagataggcagagctgggtttatatatcatcctgagtaactaacctcagcatctgaacctcagtttattaattggtaaaaaaaaaaacaawcaaaaaaaaaaaaaactggggagataataactgctacttcatagggtgattgtgcaaagaactaagctacatagatctcctcacctgctcatgtgagctctcagagcagtgagggagggatgcagagacaggtcatccaagtgcagggaagaaatggctgcagtccaggctcagggaacggagaggatgcagggcaaaaaaggatggactcctggagaagggaagtgtatcatccagagaaatgatctagtttatacgccttcttcatggcacagcccactgtgggaaatcgttttcatttgctcccttggtacagaaggaaggccagccccaccaggctccacagttttgttcaccaaatcctcaagtgatatctggcacagagtaagccaattaatgaatgttgactgggtgaaggaacaagccaatggaaaattggcttcctagaggaggtgtcgtctgagtttgagccttgagc

SEQ ID NO: 719269 - DNA, 638 bp, Homo sapiens
ggaagactgcagatataaatgacaagtgatttattttgttttcagcctccagagctttagctttagagtcagataggcagagctgggtttatatatcatcctgagtaactaacctcagcatctgaacctcagtttattaattggtaaaaaaaaaaacaaacaaaaaaaaaaaaarctggggagataataactgctacttcatagggtgattgtgcaaagaactaagctacatagatctcctcacctgctcatgtgagctctcagagcagtgagggagggatgcagagacaggtcatccaagtgcagggaagaaatggctgcagtccaggctcagggaacggagaggatgcagggcaaaaaaggatggactcctggagaagggaagtgtatcatccagagaaatgatctagtttatacgccttcttcatggcacagcccactgtgggaaatcgttttcatttgctcccttggtacagaaggaaggccagccccaccaggctccacagttttgttcaccaaatcctcaagtgatatctggcacagagtaagccaattaatgaatgttgactgggtgaaggaacaagccaatggaaaattggcttcctagaggaggtgtcgtctgagtttgagccttgagc

SEQ ID NO: 719270 - DNA, 562 bp, Homo sapiens
gcaggcacctgacctgtgtctccatatggctgagtggcaggtgtctcccttggatggggcaaacactgaagtccccagcattcccctatatactacacctggccagttttttaatgcatttacattaacaaaatcatcatatctggttaatacattctgagtgaagtgggaacgaggatcagaactgtgagaacacagcactcatgtggagaataagtgctaatattgatggttcgggactagcctgctgacagagaacgtggaggcgataaatagcaggaattaggtaatgatggggagtttcctcagtttaaatatatattttagtgcaaaataaatgttgaagcatatttggaycttattagtcaagtcaggaatagatagaatgaaatctggataaagacaagctttgtggtaagtcaagtggtggaaacaatcaattaaattcacatatcatatagaattcttgatactggcatactatttccccaaaggtaatttaattagcttgtaacaatggttaagctgtagcagttgtaagcagtcattaatactgttcaaa

SEQ ID NO: 719271 - DNA, 562 bp, Homo sapiens
gcaggcacctgacctgtgtctccatatggctgagtggcaggtgtctcccttggatggggcaaacactgaagtccccagcattcccctatatactacacctggccagttttttaatgcatttacattaacaaaatcatcatatctggttaatacattctgagtgaagtgggaacgaggatcagaactgtgagaacacagcactcatgtggagaataagtgctaatattgatggttcgggactagcctgctgacagagaacgtggaggcgataaatagcaggaattaggtaatgatggggagtttcctcagtttaaatatatattttagtgcaaaataaatgttgaagcatatttggaccttattagtcaagtcaggaatagatagaatgaaatctggataaagacaagctttgtggtaagtcaagtggtggaaacaatcaattaaattcacatatcatatagaattcttgatactggcatactatttmcccaaaggtaatttaattagcttgtaacaatggttaagctgtagcagttgtaagcagtcattaatactgttcaaa

SEQ ID NO: 719272 - DNA, 852 bp, Homo sapiens
ataatccttgcaagcaataattatgagagcttgagctagaaaagaagcaagaagagagatgagtgggtattttgttggtagaaccaatagaaatggatgacattctgattatgcggtgggaggaagagagagagagaagtcagtgtgactttcaggtttctggcttgggggtgtcayatgaaacaagttttaggaaaagtcacatgtgaaagtatcatgttggaagactgtggaagaaaatatagacctggaattagaaatggattcttaacaattaagcacttaatcgcatactttaaaaaatcttattccaattaaggtttgtgaatagtcttttctatttagatgccacctcatttttttgtttcttctactcacaatgctgagctaatagcaggactttgacaaagagttgtgattgactgataggctaaaacatatattttttaaaacttagttaactacttcctccccaatatttgctagaattacagatttgacacactgctagatgatttacaaattcattttccccttcttccagagtaatagaattttatctggacacatgattactcagctaaaaactatattttccaggtacgcttttaattggatgaggccatgtcactgaggtcaggccaagcaatgatagtggaaacaatatgtgccatttccacaccttagcctaaaaaacaggactgtgctcccatttgatctggtctgaagtgaaacagacccttttgagacccagctttgacatgaagattaagtaaaatgccttggggcatagtagagaaatgagttggaaggaacctggatccttgaatgacctggtggagcagagctgcc

SEQ ID NO: 719273 - DNA, 1153 bp, Homo sapiens
tccctgaatcagtgggaggaagaagagaggcaactggttggatgaggactgagtttcattttaattatctttgtatccccagtgccctaagtaaaatcgaagctcaaatatgtttatttgartagagtaactaattatagccagaatgttgtcaccaatctactgtaggcaaaacatttgtctcctctgagccttgatttccaagtctatcaagtagaaatgttaataatgatccttgtagtattgttcaaggattgacataaaattccacatatgaacaccatttggaaactctaaagcactctagcatataaaggataaaaggtcaggaaacggcctccacatggcaaattctcaaatagtcccattgccaattttgttgttgacattcttccattcataaaatatatgcaatttaagttgcaagaaaacagatatttctattataatgtgatatattcattcctaaaagcaatcttgtgttttctacaaaatcacacataaaaatcatacagcttatgataaaaacagagttggggcagtcaactcaaagtccatacacctttttagctaaaacataaagtcgaaacaactcaaataaaaatactagcataattttaaaggcatttagattcctaataaattctatactaaataaatgattacagtggaatgaagtaagaaaatgttaaggctgaatagttgtggggacaagggcaaaatgaactaagtttggggccaattatataagcccttccaagaaatcacacacagcaaaactaggcaaagaggaagaatacaaggagaatgggaattccttacaatactgtatgagtatatgcttactgtgtccaactcttagtgtatttggcattcaagtggtggcattggtagtataaacattaaggtgctagggaaaactgaattatagtgacttatgtattatagtgacatcatttttccatttaccaattctgtatgagcaaatttccttatagcaacattcattgggagggaatattcttattttttatgaatatcagtggggccatcttcacacggaatggggtgaggagagctgtctaaaaacatacttttttgactgacataggttcctagacttcggaacagatttaacagtttagaccactgg

SEQ ID NO: 719274 - DNA, 2169 bp, Homo sapiens
gtacattcaatatttcccaacagatgttttcaatactccagcctatcgtaagggcatagatcttgtctttcttccctcctatatggttcaataccattccaggatggaacacaaccatagaatgttgtccatataaagataaagcttcaccttcaggcaaaaggtccaggaagtgagcaagctgtgctgccatataaggcgtcatgtcccactcagcacctcagggccctacactccttctcgagggatgtctgtgttcttcgcatccattcttgttggcttcgcttgatgcttcagcagtcccgagtcacctcattggcttactggactcacctggcctgagctaactggctgatttgactcacctgggctgcaggggctgtaatctgaaatgacctttaatctagattttatttggggattttttacacagacatacttacaaatgaacattacatagacatactcatataatgctgtatgtgtgcgtttacttatgtgcctatctatatacaaaagaaagccccataaaaaaactaggtcagtggtcatctctcatttcagctgctccagcccaagtgaatccaatcagccaattagctcactacaggtgaatctaatccaagccacacaccatactccattctcctacctgtgacaaagtccgtgttacctggcaccccaggtgtttttaattcaagggctcaggaaaccagcccagtggggttctgtccattcagctaggactgggaagagctggctaacatcagtgggtaaagcctttgacaaaaagaacaattggcctgaccgatacagccagttttggccctagagtgcatgttgaccctggcctgttgccttttgcccaggtaccatgcaccctaacatttgctctcagtacaacagtctattttcagggaatatatctaggcttctcttcccataaccaaaaagacctttctccagccagcaaaaattaacgacaagagtgtattcctacatcacacatttatagaaaaaaaataaagctcctgtcctgatgaaaagcctgaagagaagaagtcggcattctcagatttgggcgagggcctttggactggggctggttcatctctggcctggtgctcaccagaggaggaaggattaacatcgatcttgcaatgaatgatgctttggccttaatacgtttttctactcacagaagagcaacaaaaatgaatggtttcctagtatatatgaaatgcagcaggatgtatgtcagagtgtacctttatttgtgtactattgtggmtatggcttatagggcagataggtcttcacatgtatggaagtttctttttatattattttcactgcctccatctaccaatacttctattttctatagtgtgactctgtatgaatatagacagatatagatagataaataaacacacacacatacatgatgatatgagcgtgtttatggaaatattcatgtatacatacagtattccccagcagaggttttcagtaccgcagcctattgtaagggcacagacctagaatttcctccctcctatattactcagtaccattccagaatggaatgaaatcatagaatgctatatgtataaacataaaacatcacctttagaggcagtgcctgggaagtaagtgggaagcagcttctctggcttcctctctccatcacctctcagctcacaagtctgcactgcaaagaggctgtctttgaccaaccaacagaaattaggccgatctatctatttgattaaaatatctcagtacaagcagcaaatattgtatttattttcttctaattgtttccttatgtattacatatctccctctctaaaatataaacttgaccaatatagccatcataactaccttatttacctatttgtttccagcatatagtaacatgtttggggtagatgtgtgcacaataaatatttttgaaatacttagataaatgttctcccatcaatcaaactgaatgaaatgtctgaggctcttttgataggtctaagatgtaagtaactctatatcattctagcatggtttgctaaaaggcaactcatgggctataaaggcagagacaaggtaagtatggaagtttatattattagtttggtaaataatattatgaaaaacatataagctttc

SEQ ID NO: 719275 - DNA, 1643 bp, Homo sapiens
atacagcatattctgaatataaagacggtgacattttaatcccccccaaaatgaatatttctggaaaattgcattctatcagttttctttgttacctattttacattaattttggctatgctatatgtttcagaaataccaaaaatttctcacttaaacagtaacaagttaatttcagttaagattgtttatttgcgaaagctgtttaactgcagctatgagaggcactgtggggaggtagtctgcaaactgttaagatagaaaaaaattctcatggaagagtgaatgtgaggcattgtttgctagaaaaagaataaacaagaataagctagtgagaaagaaaacaaaaaattacaaatgtaaaaggaagcaaatatgttcctctcttcctaggaaaaacaattgtcttcccatcaatagtaaaattaggaaagtaaggatagacagtagattttgactttgtaatattaggtgagaggaattgaatttaaattttagtattctggctttaaaaatggaataatcttgtgttgacatcctaattttttgttttgaaattttactgaaytattaaatccaaaaacactagaaaccaattgatactaaaaaagatagaagtgacacataaataaaaacagaggcagaagtatcagtgagatgtatttatcattagaaactatcagatgacatggcagcagaagacgggttctctgtttaatctcctgaagtgccatgacagactagtaagactgagtttgacaccttggtagaaactcttttgccaagttggtttgtcatccattaaattaatgttaaattacaagagttgaccagattaatgttactccagaaagaagatgagtattgtttttagatattcaagcaatttttagaaggtagatattccaaaccacagatactctataaactaatagctaggaaacttcacataaagttgaagtaacatagatacagcactgtttaaatggtgatattttacagttattcaaggatttttatgacagattcatgaatttatgttttttataaaaattatttattaaatattgcttatagtttgacctaattgatattcatagatcaaatgagaaagtagaaaaataggtttatactgtgttcttaaaagcttcagaattcatgttcttaaataatacattttagccaaaaaaaaaaaaaaaagagtttttaaaaaaattacttggaaactggaatgtttaaggcctgatttcccaaatcagccatgtttagatgacttggtcaaaataccacttaaagaaattgatcatttaaaatgacttgttatgtaaacagaaagatctgagcaaacttcttagatttattaataaaagagggaagaaagggaaagaaagaaaggaaacaggaaaataaaaggagggagaagagattgaagaaagaaagttgctgaggacatcacactatagaacagcaatacattaatttttgaaacaatgaagtatttgtttaggtggctgaaggtgtgtgtctggcatccatttgtgtgtctggcatccaattgctaaaactcgaaaatgtttgacatcatgcttaaaaatttcttatttttaagaaataacttatttcttattaattatattaattta

SEQ ID NO: 719276 - DNA, 617 bp, Homo sapiens
gaagttaacttttctaaggtcacccacttagtatgcgctgaaatcaagatccaaattcaggctgtctgtgtttttgactattattttatgatgcctatcactaggataattgtctttcttcctattccaaatcctacattcattgttggagacactgcaatgttaatattcttgacatcttcgtcttggtgaatatccatcttcaatttactttatcaatgcattcctatggcctatcatagattttgtcatcatttagacttgctgcatatcagactgtaaastgaatatcccatatttgaatcacatactttatgacttcccttacctatattcaccacatttgtagatggcctcacaggaatttccattctttcctgtctcacttatttctcaatttagtttgtattatatgtttatgtggcctatttcttcatccaatctcttgccaattgtagaaaacttgctcaaatattttctgcatcaagcatttggatgaatcttatctcacctctaccttattcccatctgtatccaagttgctgaaaaacaatggtgggaaaatatttatcaaattgattatgatacaaatttgtgtttaaatttgcattccaaaa

SEQ ID NO: 719277 - DNA, 1342 bp, Homo sapiens
tattttaattaataaattgtcaatgcaaaattaagaaaactacagtaatttcaaaaatgtaattgctttgtttaggattacataatttgtattagaacaagaaagagaactgaccttttacaaaaccacagttgggcttcttatgaaagaaacaagctgttctgtctgaaagaaacaaaagaaaacccaaaacaaacaaacaagaattctgtgtttattattccataattgtttacatttcttactaatataaaactgagccttttaacatttcgttataacatcctatagctattttacaagaaaatatatcttttgtattctatttaatatttgatataaattttcttactaactgtaaaaggattaaattttattttgtcaaaaattaaatgatgaattgttatctctcctttattttattttacataggtataacatagaaaatttactcatttggccgggygcggtggctcacacctgtaatcccagcactttgggaggccaaggcgggcagatcacgaggtcaggagatcgagaccatcctggttaacacggtgaaaccccgtctctactaaaaatacaaaaaattagctgggcatggtggcgggcgcctgtagtcccagctactcgggaggctgaggcaggagaatggcatgaacacaggaggcagagcttgcagtgagccgagattgcgccactgcactgcactccagcctggatgacacagcgagactccgtctcaaaaaaaaaaaaaaaaaattactcatttatttttattcaaaaagtataactaaaaacagtcaaaattgtatatccttatattcaatgaaattcaactttttctgacatctataaatttttttaacattttaaataaagcataaaatacatagggaaggtggacacatcacacgcgtacaacttgatgaatattcacaaaatgaatgcatctatttaaactccactctcatcagaaaacaggacattaagaacactttagaagccctccttgtgctcccatctaacattttctcttccccaaagttaactattattttgatttttgttattataaagtacattttttaatttttgaagtttatacacatagaattatgcagtatgacacctttactttctgcctgcatttgctctatattatatttgtgatattcatctctgtggttggatgaagctgttcattcttttcattgacataatatggtattttattaaatgaatgtaccaccacttacttaaaaagtttatgatttattggtgtcattattggttttcattgttcccagtttggggctaatactaaaatatgatgtgaaca

SEQ ID NO: 719278 - DNA, 1342 bp, Homo sapiens
tattttaattaataaattgtcaatgcaaaattaagaaaactacagtaatttcaaaaatgtaattgctttgtttaggattacataatttgtattagaacaagaaagagaactgaccttttacaaaaccacagttgggcttcttatgaaagaaacaagctgttctgtctgaaagaaacaaaagaaaacccaaaacaaacaaacaagaattctgtgtttattattccataattgtttacatttcttactaatataaaactgagccttttaacatttcgttataacatcctatagctattttacaagaaaatatatcttttgtattctatttaatatttgatataaattttcttactaactgtaaaaggattaaattttattttgtcaaaaattaaatgatgaattgttatctctcctttattttattttacataggtataacatagaaaatttactcatttggccgggcgcggtggctcacacctgtaatcccagcactttgggaggccaaggcgggcagatcacgaggtcaggagatcgagaccatcctggttaacacggtgaaaccccgtctctactaaaaatacaaaaaattagctgggcatggtggcgggcgcctgtagtcccagctactcgggaggctgaggcaggagaatggcatgaacacaggaggcagagcttgcagtgagccgagattgcgccactgcactgcactccagcctggatgacacagcgagactccgtctcaaaaaaaaaaaaaaaaaattactcatttatttttattcaaaaagtataactaaaaacagtcaaaattgtatatccttatattcaatgaaattcaactttttctgacatctataaatttttttaacattttaaataaagcataaaatacatagggaaggtggacacatcacacgcgtacaacttgatgaatattcacaaaatgaatgcatctatttaaactccactctcatcagaaaacaggacattaagaacactttagaagccctccttgtgctcccatctaacattttctcttccccaaagttaactattattttgawttttgttattataaagtacattttttaatttttgaagtttatacacatagaattatgcagtatgacacctttactttctgcctgcatttgctctatattatatttgtgatattcatctctgtggttggatgaagctgttcattcttttcattgacataatatggtattttattaaatgaatgtaccaccacttacttaaaaagtttatgatttattggtgtcattattggttttcattgttcccagtttggggctaatactaaaatatgatgtgaaca

SEQ ID NO: 719279 - DNA, 1750 bp, Homo sapiens
ccagataaatgagccagagtcactccagccacctaaacagaacagaagataggtaaacaggagtcactccttttgcccaaacagaaactgaaaccaaggctccatgagtcaattaactaaacaccaggactcaggagtcaaaacagatgacaaggagaagatgaagggaaaatatggaaaggagaaacaagagggaagatagagggaagaagaaagggaacagggacccacctagagtccagacctgactcaccaaggcaccaatgcaaaaacaatagtccagaatggccacttttgttcatgtcctgtcagctgcctccatcctctggccagtcacactgactaccctaaaaggtcctaaaagaagtgttccatctggggtgccaggaaacattaccacagccctagactcttatagtctctccagatagaaatcagggaagctcaccaaacatagcagcaaaggaaagtttattcagcttgtgtacaagggagccagcactgataaaggaaatgggctgctccccgagggtagtgtatgggttagttgtatagggtctttctatagggaagggttgcatcagggcatatataggaggggtttttctagtttttgtgccatggctcaacatgtttcatacatcataagtagcattagctttttatgaataaatatccaacccggggcatgatttttagcattaaaattaagaagggttacctatagtttagggaaatctgtgtttacagggctcttgggaagtttctaacccctgaaataggagtttgaagttaatatcctcttgggtcttctgttactgattggctgaaagttatataagcttaagcttgagtgaagggctttaatccttttcctccaaatcatcttaaaataggggatcaaccagcctgcctgcctgtctcagtgttatagtaggcaaagatctatcagatgtgaagaataaccatttaaaaagattgcattttgttagatatttaaaactatttttgagacattaagaaaatgaaaagggaagtcacaaatcgagagtaatattttaaattatatactaacaaagtacttgtattcagaatatacaataaataaaatctggaccaatatttaagtaaatacttttcaaatatacatatatataaagtggatataattatgtggaaaaagttttacatggttagtaattaaggcaatacatattaaaaccacaytgagataccactgtacaccaactttaatggctaaaaataaagtgagtgataacagtgctagcaagatgtaaaatgactggaatgtgaatatgttagtgttaggaatggagattagtacagcaactttcaggagaagattgtcagtataagcatgtgctgcctcgtatagacctataatttagaaattttcttgcctatattttagtactattttcatgacattcaccaaaattaggacagtagttatttattacttgaatgactgtgatgagatcagcaaattaaaaaaggttacaactctttttttttgagttgtgtgttatgtatatgggtatagtgagtgtgtgtgtgtgtgtttgttgtcaatgtatacaagatctaaataattcaaatggcttctaaactctcctccccatcataggcatttgctctattacttgaaattataccttgccatatgacttccttgggtaaaaatgtgctgtttgtaccttgtctacagaattaaaacattccatttatg

SEQ ID NO: 719280 - DNA, 1750 bp, Homo sapiens
ccagataaatgagccagagtcactccagccacctaaacagaacagaagataggtaaacaggagtcactccttttgcccaaacagaaactgaaaccaaggctccatgagtcaattaactaaacaccaggactcaggagtcaaaacagatgacaaggagaagatgaagggaaaatatggaaaggagaaacaagagggaagatagagggaagaagaaagggaacagggacccacctagagtccagacctgactcaccaaggcaccaatgcaaaaacaatagtccagaatggccacttttgttcatgtcctgtcagctgcctccatcctctggccagtcacactgactaccctaaaaggtcctaaaagaagtgttccatctggggtgccaggaaacattaccacagccctagactcttatagtctctccagatagaaatcagggaagctcaccaaacatagcagcaaaggaaagtttattcagcttgtgtacaagggagccagcactgataaaggaaatgggctgctccccgagggtagtgtatgggttagttgtatagggtctttctatagggaagggttgcatcagggcatatataggaggggtttttctagtttttgtgccatggctcaacatgtttcatacatcataagtagcattagctttttatgaataaatatccaacccggggcatgatttttagcattaaaattaagaagggttacctatagtttagggaaatctgtgtttacagggctcttgggaagtttctaacccctgaaataggagtttgaagttaatatcctcttgggtcttctgttactgattggctgaaagttatataagcttaagcttgagtgaagggctttaatccttttcctccaaatcatcttaaaataggggatcaaccagcctgcctgcctgtctcagtgttatagtaggcaaagatctatcagatgtgaagaataaccatttaaaaagattgcattttgttagatatttaaaactatttttgagacattaagaaaatgaaaagggaagtcacaaatcgagagtaatattttaaattatatactaacaaagtacttgtattcagaatatacaataaataaaatctggaccaatatttaagtaaatacttttcaaatatacatatatataaagtggatataattatgtggaaaaagttttacatggttagtaattaaggcaatacatattaaaaccacattgagataccactgtacaccaactttaatggctaaaaataaagtgagtgataacagtgctagcaagatgtaaaatgactggaatgtgaatatgttagtrttaggaatggagattagtacagcaactttcaggagaagattgtcagtataagcatgtgctgcctcgtatagacctataatttagaaattttcttgcctatattttagtactattttcatgacattcaccaaaattaggacagtagttatttattacttgaatgactgtgatgagatcagcaaattaaaaaaggttacaactctttttttttgagttgtgtgttatgtatatgggtatagtgagtgtgtgtgtgtgtgtttgttgtcaatgtatacaagatctaaataattcaaatggcttctaaactctcctccccatcataggcatttgctctattacttgaaattataccttgccatatgacttccttgggtaaaaatgtgctgtttgtaccttgtctacagaattaaaacattccatttatg

SEQ ID NO: 719281 - DNA, 1532 bp, Homo sapiens
tgccaggtggggttttgagcctagacatgcctgctctaaactcaagagcggtgccatgccatagatcactgtgtggatgtggaggcctacagaggagacacctgaggtggcagtgggaatggagggggagggatgagaagcaggagctgcagagggaggcctcctgggcagatggcagtgctgtgttagtcaggcttgggggagtctctaggtgcctgtgtgacccccaggaggcactatccagggtgccgtctggctatgcctctttaagcttgatgggaaccctgggtgtgagggggccagccagggctgaaggtaaggtgcctggggagggaggggacagagacaagccttgtgccttgggccctcaaccctcgccactggagagtgatgttgcctgctcagaccaagtggggtgggactgagagaaagtggtgactgtttataaagcaaggccaagtgcaagaactgctgagtgactgggaacttcctgtgtgcagaccacacctgctttttttttttttttttttgagagtcttgctccgttgcccaggctggagtgcagtggcacgatcttggctcagatcctgggttcaagcaattctcctgcctcagtctcccaagtagctgggattataggcatgcaggcatgcaccaccatgcctggccaatttttgtatttttagtagagacagggtttcgccatgttggccaggctggtctcaaactcctgacctcaagtgatccacccgccttggtctcccaaagtgctgggatgacaggcgtgagccaccatgcccggccgacacccgcatttttaagtagccttctttttcagcagtgtgacttttgcggggcartactcagcaaccaggatgatgtggagcttccggaagccaagggcaggccaggagacagtttgataagaggggcattcacgtgagactgcctagtgacctgaggcaggaaaggagacaaactgcaagagcagggttgtggtgctgggtggtgaaaagggttgagccattgccccaaagggtgtcagaaagtgaagcattggagaatcaccttggggccgccgccccgagcccagggcagtggtccagcctctcagcagctgcggggtttagggcacagcctcaaacctttaggggcaatctgggtagtgaaaagggttgagatatttaggggcaagtcctagggcaaggtcaaaggaggtgcggaggtcaggagagaggccaggtggaaagctccctaagccacctgaaatatccacagctagaataaaacaaggcagccttttcccaatacacagaaaaatgctggctctagaattcggccagctccattttcagtgtcttttacaccaacattttaactttaccttcagtgccttttactgcttagtggcaaatgttcctagatgaccatgggaatcaatgagcagaaagcactgtattgatgactggaaatccttactgagagacacactcatcttcactggagagcttgtgtatgtatatgcatgtgta

SEQ ID NO: 719282 - DNA, 1532 bp, Homo sapiens
tgccaggtggggttttgagcctagacatgcctgctctaaactcaagagcggtgccatgccatagatcactgtgtggatgtggaggcctacagaggagacacctgaggtggcagtgggaatggagggggagggatgagaagcaggagctgcagagggaggcctcctgggcagatggcagtgctgtgttagtcaggcttgggggagtctctaggtgcctgtgtgacccccaggaggcactatccagggtgccgtctggctatgcctctttaagcttgatgggaaccctgggtgtgagggggccagccagggctgaaggtaaggtgcctggggagggaggggacagagacaagccttgtgccttgggccctcaaccctcgccactggagagtgatgttgcctgctcagaccaagtggggtgggactgagagaaagtggtgactgtttataaagcaaggccaagtgcaagaactgctgagtgactgggaacttcctgtgtgcagaccacacctgctttttttttttttttttttgagagtcttgctccgttgcccaggctggagtgcagtggcacgatcttggctcagatcctgggttcaagcaattctcctgcctcagtctcccaagtagctgggattataggcatgcaggcatgcaccaccatgcctggccaatttttgtatttttagtagagacagggtttcgccatgttggccaggctggtctcaaactcctgacctcaagtgatccacccgccttggtctcccaaagtgctgggatgacaggcgtgagccaccatgcccggccgacacccgcatttttaagtagccttctttttcagcagtgtgacttttgcggggcaatactcagcaaccaggatgatgtggagcttccggaagccaagggcaggccaggagacagtttgataagaggggcattcacgtgagactgcctagtgacctgaggcaggaaaggagacaaactgcaagagcagggttgtggtgctgggtggtgaaaagggttgagccattgccccaaagggtgycagaaagtgaagcattggagaatcaccttggggccgccgccccgagcccagggcagtggtccagcctctcagcagctgcggggtttagggcacagcctcaaacctttaggggcaatctgggtagtgaaaagggttgagatatttaggggcaagtcctagggcaaggtcaaaggaggtgcggaggtcaggagagaggccaggtggaaagctccctaagccacctgaaatatccacagctagaataaaacaaggcagccttttcccaatacacagaaaaatgctggctctagaattcggccagctccattttcagtgtcttttacaccaacattttaactttaccttcagtgccttttactgcttagtggcaaatgttcctagatgaccatgggaatcaatgagcagaaagcactgtattgatgactggaaatccttactgagagacacactcatcttcactggagagcttgtgtatgtatatgcatgtgta

SEQ ID NO: 719283 - DNA, 591 bp, Homo sapiens
atgtcctttacccactttttaatggggttgtttttttcttgttatttgagttccttgtcaattctggatattagacctttcttggatgtgaggtttgcaaatatgttcttccatctgcagactatctatttattctgttgattatttcttttcctgtgcagaagcttttcagtttaattaagcctcatttgtctatttttgtttttgctgcatttgcctttgagatattaaccataattattttcctaggctgatattctgaagagctttttctaggttttcttctagtatttttacagtttcaagtyttgcctttaagtctttaacacatcttgagttaatttgtgtatatgtatgtaagtatttatccacatatatttagtgcaaacctaaattattagaaaatcgtgtccaaaattactaaaattattggataatttgagaatttaaagtattaaattctacataaataatgtaataaattctacacatacaatgtgaccccttgtgttctttgaatctatgtagttcagtcatgctccaaaatataggctgagcacagtggcccatgcctataatcacagcactttg

SEQ ID NO: 719284 - DNA, 958 bp, Homo sapiens
cttttatgcctctaaaatactcacatactttctttaataccatgacaaatttatcataagcattgactaaaatactatttatatcccactgtctcaagacaaaattgaaactgaattacttgtctcagcatgtgactgcccagttctgtaacttgcacaactatagagctcactaatgaatacacacktcttaccagttattttccagtgatccaaagtcacttaatattaatgagtaaaaaaattaattcatcatctctgccacccatctctatcctattccaatcttgctgtctgccatatctcagtaaatccatattatctacccaatatgataagatgtaaatctaagaactagaattatcttcatactcagtaatcctcacacctattgaatcacataatcttataagtgtacatcctaataatttatcattctgtttcaatttattctttggccactgtccttgttcttgtctaagtatttatcatattatgactggagctttacaaaattccttgtgtcaatttcacattctctagtcacatccctctatcctgtcttctcctccactgcccctagtggtcatcctaacatgattatatcaactcgcaacttaaaatcatttgatagctcctcagcagctacagaataacatttaaacacaagataaaatctcaagtcaaaaagttacatcatctcaattccttcttccatggtctgattcttcacttctctctttggtctttatactcaagtgatgccatagttcatggtatatattagttttgtgttactgctgtaacaaatcataccaaatttggtttctcaaaagaatatacattagttatctcatagttttataggtcagaagtctaagttgacctggctgtttcctgtgctctaggtttcataaggctgaaatcaaggtgtcagccagctgggctggatttttat

SEQ ID NO: 719285 - DNA, 958 bp, Homo sapiens
cttttatgcctctaaaatactcacatactttctttaataccatgacaaatttatcataagcattgactaaaatactatttatatcccactgtctcaagacaaaattgaaactgaattacttgtctcagcatgtgactgcccagttctgtaacttgcacaactatagagctcactaatgaatacacacttcttaccagttattttccagtgatccaaagtcacttaatattaatgwgtaaaaaaattaattcatcatctctgccacccatctctatcctattccaatcttgctgtctgccatatctcagtaaatccatattatctacccaatatgataagatgtaaatctaagaactagaattatcttcatactcagtaatcctcacacctattgaatcacataatcttataagtgtacatcctaataatttatcattctgtttcaatttattctttggccactgtccttgttcttgtctaagtatttatcatattatgactggagctttacaaaattccttgtgtcaatttcacattctctagtcacatccctctatcctgtcttctcctccactgcccctagtggtcatcctaacatgattatatcaactcgcaacttaaaatcatttgatagctcctcagcagctacagaataacatttaaacacaagataaaatctcaagtcaaaaagttacatcatctcaattccttcttccatggtctgattcttcacttctctctttggtctttatactcaagtgatgccatagttcatggtatatattagttttgtgttactgctgtaacaaatcataccaaatttggtttctcaaaagaatatacattagttatctcatagttttataggtcagaagtctaagttgacctggctgtttcctgtgctctaggtttcataaggctgaaatcaaggtgtcagccagctgggctggatttttat

SEQ ID NO: 719286 - DNA, 1825 bp, Homo sapiens
cttatcaaattactgaggaaaaatactgacaaatttcctcctctcgaccatttaagaatgaagaaaaataagaaaatatttaatttcactgtcaatataataaatcatttaatacgtctaccaatgcctaattttcttttctttcttctttttttttttttttgttcctgaattgaaagcagggaagtatgctgagggggacaggagacagaatataagacaacttcagagatcagagggctctgaaacttacctctctgaaaccaggaggtcataaccatttaatctctcaaaattttaagcttcataattttataaagacatttttaagaaaaacaaaagtacttttgtatatatcttaccaaattttactatttctcaatattttctccttgttaaaaacagcttttaagcattttaatacattaaaattaggagtcagaaatacattggcaagaatatgtgttttgtttaattctgcaaaagatagctgtagtgactttccttgcttgtatgaggaagatagtggtgattcgacataagctgttactcatggggtgagaagtaagtgctttacctatgattaaatttaatgaatcagggaacttagctattttatttttcaagtcccaaagtaaacagcatgccacttttaaaaatatcaattataactttttttcacatgagaggaacgaaactgataaagataagggaaattgtacaattaatgcttttacttttagtagaaacttttaaaaatgtttcatctcaagtaaatttaaagaaaaataatcaattttgtgtaacaaagagaatgtatggatatttgtaaaagccctggtttgaaaatatttcaataaaataaagatatgactaattgaccaatgaattaaccagtaatacatatatatctatgtatatatttaaaaaattaattaacttatcaatttaataacaaggacaaactatacacggataatctgataatttcaaatgtatatattaaaattcaccttccaatttatgtgttccttaaaggaaaatagcatttttattattgttatagctccacaatacgtggtacaaataatatgattgttaaacgtgagttgactttttaaattatatgcctaaaggcaaagtatgacataattagttaataatatggaacaaagaaattgtcagtagtcagtaaatatccaggtttgtcataaacacagttgtcagaaactagcgggaaaaaatgctcaatacataggcccctatgaagagtaaataaagcaaacattttgagaatagaaaataatgattaagaatataagtaggtaatatatgttgagaaataaaaacaaaatcctaagccccccaactgactgaacagaacccctctttcccaaggggtccccagagtaaacttgaaacctgagttactggcaaggatgaaatgggaggtcagacaggtttccatatacccccttccttgccagctactcttaggctttcttccctaagggctaaacagaaaccacccctattgtgagactaccattgatgtcaaccaactgcctgatgctacccctcccttttgtagtttcagcacaacaaccaagcagcattttttcctaagagtctatggaccatcgggtggtcatggcaagtctatggagactgtgcaggaagggttctygtatcctatgcttcatcatttgatgttagaggacagaaaactccacacttggattatgctaactctgccattttttgatcctgggtcccaagaaggggcatgaaacttgattgtgcatgtgcacatttctcctgttat

SEQ ID NO: 719287 - DNA, 1757 bp, Homo sapiens
tttgcaaaatatgcattaaaactggaagctttataataaattattactttatctgaatttaaccccacttgcattatctttctcagctataattatctgtcccaaagaatatctccagcttttgcaacagtaatcttgacctctctgcttgctcagggcatatctagaaatgaacccagttgcctcgaacctgtaatttctggaaacaatatttacagattcagagagaatctgaaaacagacagagatatgacctgttttaacatgggagctcagcaacaatctttacattgggattatcctgaggtatttgggatgcaaaaaaaaaaaaaaagtactcaagtttctgtgtatgctgttttcataaagggtgactcttttttctttcattgaggacaatacacaactcaattaagcagaattatttcatttccaattaaatattttcatatcatgattgtcagtcagttatataaatttaatcatttctgcatgcaaaatggaaaaacatacatattttatatattgcttaataaagtgcaaactgtaggttatttgcctttttataaaagataggaaagaagttccttaaaatatacattttattttgtataatttgtccagaacttggacaaaaaaattattctgtagatcatttatgaggaaatttattcacagaaggtaaaatgtgaatcaagctaaaaacacataatttctttatgttgttcctgtctgtatcacttttacacattaataagtcaaatttctctctatttttatattataccaaattataatctcaataaaggcaatttttatgttcatggggccatattacaaaatagtttttaaattttagcaatctaaagcattgaatatttttgttgttttaaaacaaagaataccatccaaacctttgagataaaataggagctttgaacattatatatagtgaaaacagtaagtggtttcacatggtgaaacgtaatttagccatgttaaaagtcctttagcctagatgttgtaaaaatagattttaaaggaaactccaagataaaaataagagtaaaacatacattggactacatccatacacatctctttcaaaacctccttctcacatggagattaatattcaaattcttcaccatgctctaactctgtaaattactaaaatagtataatccctttcccattgcctttgttcatttgctttacccacattggcctttttgctggtcctggaatagggcaatcacactcatgactattaccatagttcaktgtattctctcctcctggaattctctttccccagatttttacttggttcatttcctagagacacccatattttcaccttaatgtctatcttactacctgctttttaaatttatttattataattgacataatcttacaataaaaatttatggatagtatttttcataaaactgtaaacatcatgagtgcagagacattatctgtcttctttacctctagaagctgagaatgaccttttgccaaaggcagcagggaaaggaggacttcagttttaccaattgaattctgtcaataccttgaattagtcaagaagtagatttgtctccagaggccagtcctgttgacaacttcattttgaacttgtgaaatttgaagcacaaatatcagctgagcgcaccaaacttccaacctacagaatcacaataaattagtgttgtattaagcctttaactatgtggcaaatttttatggca

SEQ ID NO: 719288 - DNA, 831 bp, Homo sapiens
ctctgaaatttaccagcattgattgcaacaattataacttttaactgactgtatctttagtttttagacagcacatgtaacctagtagatggtcaatatatttaatcctgtcactttatttcgccttcaagatggtgacatttcccatgtctgtgttgccttgacagatgaacttcttaccctttgactagatcttcaagctaataaccatttacacatttaatacaatagttagttaagcatctttattttagtctctcagactcaccaatgttttatatgaatctacatgaaaataagaagtaagtgaatctattatttttttaacagaacaatgatgtcagttttaggttaccttctcttttgatcttccacttatgttgcaaaatggctgcaacatatccaatccacatttctatgaatcagcatttctaaatactgaaatggacagaaaaggactctattttgcattattttcttttatcaaagattaaattttttttagaaatatgatctatgacactaacactttctcattattcacactggccaagatttaatcatgtatctgttattctggctgcagagatagctgaaaaaatacgtgcctggcattttcataatatagtggaaggcagtctccactatattatgaaaggaaaaagtgtgggaagagggctctttttaaagcaaaccacaatgcctgkcactgtcactgtctatgtctattttgtttgttaaaacatttacctacaagggtactttttgcccctaaaaatatcaaatatgtatgtgcgtgtgtgtgtgtgtgtgtacatatatatatgtatg

SEQ ID NO: 719289 - DNA, 2304 bp, Homo sapiens
atagataacagaaattaatttctcaccattctaaaggctgtacatccaagatcagggtgccagaattggctgggttctggtgagggctctcttcctggcttgcagatagccagtttctcactgtgtcttcacatattggagagagagagagagtaaacaagctgtccggtgtttcttcttataaggatactaaccccagagtgccctttactgataaaaccatagtcttaggctctccagagttcaggtgacatattgctaagactacattatttaggcgcttagagaagtattgttgcagtgctatcactcttatggggttttcatctctaagaaaatacttagtctccactgactgtttatacatcaatttctctctaattttaacagcattgaggttttaactgaattctgtagaaatagaagaaattagatgcttgtcaaatattcatgagaaacaaactactgacctaaacaaaaaataaaaaaattaaattatcatgttttatacraagaaaaaaattataaataattctgaataaatcggcaacggcatacttgaatctgtttctactgggcgatgaatttaacaatatcttctcacagagctggctggcaataaaaatgtttactatgagaaagtgttaaaaatattaaaatgtttatggaatgtttagcagtagataaaaggttctatacatgtattagacacatttagatgtgaaaaaattggaatagtttggaatattatttttggatgtatttaagtaacattttgagaaaattatgatttatgagttgtggtacacataaacataagctactatttgtatagtttgaatggatctggaaatattattgcactaccaaagactttctatttaaggctaaacacatactttaaaagtcattaaaaatgccccttctctcctgcttcaatgaagctcagagtaggtaggaacttatcactttatctatttctgtcacacgccaatctgcagaatgaaatactgaaatgtttaaaatgaattacagtcatttcaggtcagtcaattatacatagagcagagaaactttaatttagtcacacatatactttaaaatttatgctttccttatatgattgccttacggcttccatatctgttcagagattgataatctaagccattcaattcactgaacatttcagagtgggttatttacagttttgactagagtatcatttcaatgcaatatcaattatgcataaaatgcaattatgatgaaatgtgtttacttagtgcttacaaatgaaaacattaatttgggctatccttgccaaaaatacattgttttatatggctctaattttggatgtttttagtaactggaatgtcatcagaatttagcaatttgaaatgcccattggcagtacacacttctctttcaattctacacataataatgcttaatttaataatgggatccaatttgttctctgagcatgaacattttaattatgtaaaatataaatagagaaagcttggtaacggaaattcttcctgtctcaaagtaagacaataattctcaggaaatcatttaaaatgaaaatgtattcacctagactaacaaattataaacattaaatctggtaaatcttagtttttaaatatgcgtctgagacataacataatattgtgactcttaataaaatgaaataaatgaggtagtaagacaataacatctcatggaaagagatatgtgagatagtaaacatatagtttaccatccgtatggcttataatggagctgattatatgttattattttcagagactgtaaggtaaaagataaaattattaacatctttagaagtacagttactctggaaggtaacatttgagaaacagaaaaatatgaaaatgtatttatcacatatatttctctctgtgtgccttagacatagatttgttcttacttacttacatagatttgttcttacttagacatagatttgttcttacttagatatagatttgttcttacttagatacttacatagatttgttcttacttgtagatttgttcttacttaagagtactttctagtaattctcctttttataaaatggtttaaatagaaatcttcaccagagtttgccattaactctaacattttttagaagataccaaaggattatgtacatagtaaagaaaagagaatgagaatgatcataaataggaatataaagtctgaaatatatttagtggaaattattacagacacatttcctttattcggattgcattgtaatttatata

SEQ ID NO: 719290 - DNA, 2304 bp, Homo sapiens
atagataacagaaattaatttctcaccattctaaaggctgtacatccaagatcagggtgccagaattggctgggttctggtgagggctctcttcctggcttgcagatagccagtttctcactgtgtcttcacatattggagagagagagagagtaaacaagctgtccggtgtttcttcttataaggatactaaccccagagtgccctttactgataaaaccatagtcttaggctctccagagttcaggtgacatattgctaagactacattatttaggcgcttagagaagtattgttgcagtgctatcactcttatggggttttcatctctaagaaaatacttagtctccactgactgtttatacatcaatttctctctaattttaacagcattgaggttttaactgaattctgtagaaatagaagaaattagatgcttgtcaaatattcatgagaaacaaactactgacctaaacaaaaaataaaaaaattaaattatcatgttttatacaaagaaaaaaattataaataattctgaataaatcggcaacggcatacttgaatctgtttctactgggcgatgaatttaacaatatcttctcacagagctggctggcaataaaaatgtttactatgagaaagtgttaaaaatattaaaatgtttatggaatgtttagcagtagataaaaggttctatacatgtattagacacatttagatgtgaaaaaattggaatagtttggaatattatttttggatgtatttaagtaacattttgagaaaattatgatttatgagttgtggtacacataaacataagctactatttgtatagtttgaatggatctggaaatattattgcactaccaaagactttctatttaaggctaaacacatactttaaaagtcattaaaaatgccccttctctcctgcttcaatgaagctcagagtaggtaggaacttatcactttatctatttctgtcacacgccaatctgcagaatgaaatactgaaatgtttaaaatgaattacagtcatttcaggtcagtcaattatacatagagcagagaaactttaatttagtcacacatatactttaaaatttatgctttccttatatgattgccttacggcttccatatctgttcagagattgataatctaagccattcaattcactgaacatttcagagtgggttatttacagttttgactagagtatcatttcaatgcaatatcaattatgcataaaatgcaattatgatgaaatgtgtttacttagtgcttacaaatgaaaacattaatttgggctatccttgccaaaaatacattgttttatatggctctaattttggatgtttttagtaactggaatgtcatcagaatttagcaatttgaaatgcccattggcagtacacacttctctttcaattctacacataataatgcttaatttaataatgggatccaatttgttctctgagcatgaacattttaattatgtaaaatataaatagagaaagcttggtaacggaaattcttcctgtctcaaagtaagacaataattctcaggaaatcatttaaaatgaaaatgtattcacctagactaacaaattataaacattaaatctggtaaatcttagtttttaaatatgcgtctgagacataacrtaatattgtgactcttaataaaatgaaataaatgaggtagtaagacaataacatctcatggaaagagatatgtgagatagtaaacatatagtttaccatccgtatggcttataatggagctgattatatgttattattttcagagactgtaaggtaaaagataaaattattaacatctttagaagtacagttactctggaaggtaacatttgagaaacagaaaaatatgaaaatgtatttatcacatatatttctctctgtgtgccttagacatagatttgttcttacttacttacatagatttgttcttacttagacatagatttgttcttacttagatatagatttgttcttacttagatacttacatagatttgttcttacttgtagatttgttcttacttaagagtactttctagtaattctcctttttataaaatggtttaaatagaaatcttcaccagagtttgccattaactctaacattttttagaagataccaaaggattatgtacatagtaaagaaaagagaatgagaatgatcataaataggaatataaagtctgaaatatatttagtggaaattattacagacacatttcctttattcggattgcattgtaatttatata

SEQ ID NO: 719291 - DNA, 2304 bp, Homo sapiens
atagataacagaaattaatttctcaccattctaaaggctgtacatccaagatcagggtgccagaattggctgggttctggtgagggctctcttcctggcttgcagatagccagtttctcactgtgtcttcacatattggagagagagagagagtaaacaagctgtccggtgtttcttcttataaggatactaaccccagagtgccctttactgataaaaccatagtcttaggctctccagagttcaggtgacatattgctaagactacattatttaggcgcttagagaagtattgttgcagtgctatcactcttatggggttttcatctctaagaaaatacttagtctccactgactgtttatacatcaatttctctctaattttaacagcattgaggttttaactgaattctgtagaaatagaagaaattagatgcttgtcaaatattcatgagaaacaaactactgacctaaacaaaaaataaaaaaattaaattatcatgttttatacaaagaaaaaaattataaataattctgaataaatcggcaacggcatacttgaatctgtttctactgggcgatgaatttaacaatatcttctcacagagctggctggcaataaaaatgtttactatgagaaagtgttaaaaatattaaaatgtttatggaatgtttagcagtagataaaaggttctatacatgtattagacacatttagatgtgaaaaaattggaatagtttggaatattatttttggatgtatttaagtaacattttgagaaaattatgatttatgagttgtggtacacataaacataagctactatttgtatagtttgaatggatctggaaatattattgcactaccaaagactttctatttaaggctaaacacatactttaaaagtcattaaaaatgccccttctctcctgcttcaatgaagctcagagtaggtaggaacttatcactttatctatttctgtcacacgccaatctgcagaatgaaatactgaaatgtttaaaatgaattacagtcatttcaggtcagtcaattatacatagagcagagaaactttaatttagtcacacatatactttaaaatttatgctttccttatatgattgccttacggcttccatatctgttcagagattgataatctaagccattcaattcactgaacatttcagagtgggttatttacagttttgactagagtatcatttcaatgcaatatcaattatgcataaaatgcaattatgatgaaatgtgtttacttagtgcttacaaatgaaaacattaatttgggctatccttgccaaaaatacattgttttatatggctctaattttggatgtttttagtaactggaatgtcatcagaatttagcaatttgaaatgcccattggcagtacacacttctctttcaattctacacataataatgcttaatttaataatgggatccaatttgttctctgagcatgaacattttaattatgtaaaatataaatagagaaagcttggtaacggaaattcttcctgtctcaaagtaagacaataattctcaggaaatcatttaaaatgaaaatgtattcacctagactaacaaattataaacattaaatctggtaaatcttagtttttaaatatgcgtctgagacataacataatattgtgactcttaataaaatgaaataaatgaggtagtaagacaataacatctcatggaaagagatatgtgagatagtaaacatatagtttaccatccgtatggcttataatggagctgattatatgttattattttcagagactgtaaggtaaaagataaaattattaacatctttagaagtacagttactctggaaggtaacatttgagaaacagaaaaatatgaaaatgtatttatcacatatatttctctctgtgtgccttagacatagatttgttcttacttacttacatagatttgttcttacttagacatagatttgttcttacttagatatagatttgttcttacttagatacttacatagatttgttcttacttgtagatttgttcttacttaagagtactttctagtaattctcctttttataaaatggtttaaatagaaatctycaccagagtttgccattaactctaacattttttagaagataccaaaggattatgtacatagtaaagaaaagagaatgagaatgatcataaataggaatataaagtctgaaatatatttagtggaaattattacagacacatttcctttattcggattgcattgtaatttatata

SEQ ID NO: 719292 - DNA, 3635 bp, Homo sapiens
tgaacaaagctttaaaatacaagtattcattaataatcttccaaatttgaatgacaatagtataggctcaaatgtgcagataaaaacattaaaaagtgcttagttgtttacatcattttctttcattttatagacctctctttaatttgcrtaattctacacaataaatagtatacaagtttatatggtaaattgttgtcttctattaggaaagtttaatacctagtgattgcaaagaatgcctttaccactctgaagatagctcagttttccaagattgtacctcttacctcctttccacacctcacttatccaactgtgttaatgtattcagacctagggtattttgctgttcaaagaatgtttttcttgattaataagcccatggtataaacaaagtctgctaacaacccctctaacttggtgacacacagctgcaaattctcctctgtggatctggtcagagattggtttggggctttgtaaaggcaggtccagggaaagccttcctctttagagcatgtcacttactcctgaggtgaggcctctgatatttcatctgaatgtcaatgtaaactagatctctccactctaactagacaaaggacaaacctccaaaacctccaagcattgctgaaattctagtcgatctgcctccttcttaaagccatcagcagacattgtttgataagcctcatttagtttcatcctgtgcatgtgcattagtaggacaagcacttgtgggaaatggctcaagtgacttcttgtcttcccttctgcacagctccatcccctccatggccttgaatcttagctaccagtcatgtcagcagccctggagttctccaatatctgactcttcatctcagcagaaccactgtgctctggaacctagttccctgccccatggtctagaaattagcccagtgagagagccctgagagatcacaggactcacctcaaaagtacccctttccacaggttttcagtcttatgctgccctttgtgcaattttctaaaaaatcagtaatctcatatattctttttcaagtttatatttgtttatggtaggagagcttattctttacaagttattgctcattcagtggcattaatgagttttaatttttaagctgtaacaagatatcatttccagaattataactatatatcaaaatttaaaaatatgatattctacttgaagtgtcttgtctcccagtgagccatattttggaattctagaggtgggagaagacttttccaacccaattaatctttaaacaaattcatatacataaaacttacgttaacgttgcccatagttgtctcacataaaaaatcctcttcaaaagcttagaaatacatttgaaagttaatatttattcacagtcttattattttagcttcatatatgaggaacaatttgatatatatgatacaatgttggaatcagggaattagaatcatatatttaaaataaaataaaggaatgagattatttagtttaaaaaaattatttcaagccaggctcagtggtgggaagctgtagttctggctactcagaagactaagacaggaggatcccttgaccccaggaattaaagctataatatgccatgatggtgcctaaatgttgccactgaactccagcctattcaacatagcaagattcccatctcttaaagaggaagaaaaaaagaaatcattttaaagtgtgaagttttctcttaaacgaaagactttctacttttttcaagacatgcaaatattgtgatataaaagaaacaataacatttaattccttgggaagaatgtttggtacatgataatagtttcacagatggaatattcagacaagactttgaatgtattttatgtacaaattaaatgccttttacatttatatagaattaaaaacaaatagaacattctaactgcctttctatcttgaaattcgaagtacttctgacttaataaaaaatatttcaaagggggctaaaagtactgtaacacattaataattttaactttatagagtcatgcatatattaatagaaaataatatacataaaattaatgatcttgtgtgtcaaaagagaaaaggtatttgtgatttctatcctttggttacctgtaaatacatgtttcagagagagatgctgagtctctcctagaaatttgaaaccacaaatttcttccaatgtgattgatttattgttcaacaatttgaggataaaatcaatttttgttgtatatctataatttcatttacaaaaaatgctagacagatatagaaaattacaccaaactaaattcagttatgtagaaatattgataatgcattcctttattggaaagtagaatcactctttctttaattaattcacaatgtaactacctcatctgttggttgacaaatctggaaaccgaaattattactttcaactcaagcaaagttacctgcctattccagaatgcataggtgcatgtttagctgaaataatggattaaagtggatcagttagttcatttatcatgggtttgactacacaactaaataagtgaaatcaatctaaaattcattaagtagtgccatgttttagttttgtagataaaaccctagatgtgaaggctgttactccccaccgccaaaatattctctagtctgtggataatcccaaaccccacaaatttgtggcactgccctgctggatgctcgtggcaactatagaagatcattctgttcgataatgactcaattagtatttcatatatgaaaaatagaaatctcctcttctataaccagactctaaactggccctgataattccaaactccttgcattaattcttagcctaatttcctccccttgacctatgacttgattctaaacaaaacatatgggaaaactgatgagatgtcactcctgtaattatgctgcataagactgccatgtctgtttttctggaagactgtctccttgttggctttgacgaagcaagtggtcatgttggggaaggtcacatagcaaagaattgagagtagtttccagccaactaagaagtagaactaagggtgacctttagctaacagccaggaagaaattggggccacagtctgacagctgacaaggaatttaatgctgcgaacaaccacatcatcttggaagtggatccatctccagttcagcctgtacatgagaaaccacatctggctggcatgattgtagctttgtaaaggagccacctaagtggtgcttagacttatgattccacatatggaaaaactatgagataataaatgtgtgttttttaaagctgctaagtatgctaaatgtaaggtaatgttatggaacaacagataatacaccaaacattcaaaaatgcttgacaatttgacaatgatttagccttaccaaatacatttctcaatattgtctttaacctaaattcaggaaaaggaagacagtcagtcctgctgtaccacttgtgttgaaaccgcacatttcttccagtgtgaatgatttattattgaacaatttgaggatgaaatgaattttttgttgtgtatctaatttcgtttgcaaaaattactagataggtatagaaaattacaccaaactaaattcagttata

SEQ ID NO: 719293 - DNA, 3635 bp, Homo sapiens
tgaacaaagctttaaaatacaagtattcattaataatcttccaaatttgaatgacaatagtataggctcaaatgtgcagataaaaacattaaaaagtgcttagttgtttacatcattttctttcattttatagacctctctttaatttgcataattctacacaataaatagtatacaagtttatatggtaaattgttgtcttctattaggaaagtttaatacctagtgattgcaaagaatgcctttaccactctgaagatagctcagttttccaagattgtacctcttacctcctttccacacctcacttatccaactgtgttaatgtattcagacctagggtattttgctgttcaaagaatgtttttcttgattaataagcccatggtataaacaaagtctgctaacaacccctctaacttggtgacacacagctgcaaattctcctctgtggatctggtcagagattggtttggggctttgtaaaggcaggtccagggaaagccttcctctttagagcatgtcacttactcctgaggtgaggcctctgatatttcatctgaatgtcaatgtaaactagatctctccactctaactagacaaaggacaaacctccaaaacctccaagcattgctgaaattctagtcgatctgcctccttcttaaagccatcagcagacattgtttgataagcctcatttagtttcatcctgtgcatgtgcattagtaggacaagcacttgtgggaaatggctcaagtgacttcttgtcttcccttctgcacagctccatcccctccatggccttgaatcttagctaccagtcatgtcagcagccctggagttctccaatatctgactcttcatctcagcagaaccactgtgctctggaacctagttccctgccccatggtctagaaattagcccagtgagagagccctgagagatcacaggactcacctcaaaagtacccctttccacaggttttcagtcttatgctgccctttgtgcaattttctaaaaaatcagtaatctcatatattctttttcaagtttatatttgtttatggtaggagagcttattctttacaagttattgctcattcagtggcattaatgagttttaatttttaagctgtaacaagatatcatttccagaattataactatatatcaaaatttaaaaatatgatattctacttgaagtgtcttgtctcccagtgagccatattttggaattctagaggtgggagaagacttttccaacccaattaatctttaaacaaattcatatacataaaacttacgttaacgttgcccatagttgtctcacataaaaaatcctcttcaaaagcttagaaatacatttgaaagttaatatttattcacagtcttattattttagcttcatatatgaggaacaatttgatatatatgatacaatgttggaatcagggaattagaatcatatatttaaaataaaataaaggaatgagattatttagtttaaaaaaattatttcaagccaggctcagtggtgggaagctgtagttctggctactcagaagactaagacaggaggatcccttgaccccaggaattaaagctataatatgccatgatggtgcctaaatgttgccactgaactccagcctattcaacatagcaagattcccatctcttaaagargaagaaaaaaagaaatcattttaaagtgtgaagttttctcttaaacgaaagactttctacttttttcaagacatgcaaatattgtgatataaaagaaacaataacatttaattccttgggaagaatgtttggtacatgataatagtttcacagatggaatattcagacaagactttgaatgtattttatgtacaaattaaatgccttttacatttatatagaattaaaaacaaatagaacattctaactgcctttctatcttgaaattcgaagtacttctgacttaataaaaaatatttcaaagggggctaaaagtactgtaacacattaataattttaactttatagagtcatgcatatattaatagaaaataatatacataaaattaatgatcttgtgtgtcaaaagagaaaaggtatttgtgatttctatcctttggttacctgtaaatacatgtttcagagagagatgctgagtctctcctagaaatttgaaaccacaaatttcttccaatgtgattgatttattgttcaacaatttgaggataaaatcaatttttgttgtatatctataatttcatttacaaaaaatgctagacagatatagaaaattacaccaaactaaattcagttatgtagaaatattgataatgcattcctttattggaaagtagaatcactctttctttaattaattcacaatgtaactacctcatctgttggttgacaaatctggaaaccgaaattattactttcaactcaagcaaagttacctgcctattccagaatgcataggtgcatgtttagctgaaataatggattaaagtggatcagttagttcatttatcatgggtttgactacacaactaaataagtgaaatcaatctaaaattcattaagtagtgccatgttttagttttgtagataaaaccctagatgtgaaggctgttactccccaccgccaaaatattctctagtctgtggataatcccaaaccccacaaatttgtggcactgccctgctggatgctcgtggcaactatagaagatcattctgttcgataatgactcaattagtatttcatatatgaaaaatagaaatctcctcttctataaccagactctaaactggccctgataattccaaactccttgcattaattcttagcctaatttcctccccttgacctatgacttgattctaaacaaaacatatgggaaaactgatgagatgtcactcctgtaattatgctgcataagactgccatgtctgtttttctggaagactgtctccttgttggctttgacgaagcaagtggtcatgttggggaaggtcacatagcaaagaattgagagtagtttccagccaactaagaagtagaactaagggtgacctttagctaacagccaggaagaaattggggccacagtctgacagctgacaaggaatttaatgctgcgaacaaccacatcatcttggaagtggatccatctccagttcagcctgtacatgagaaaccacatctggctggcatgattgtagctttgtaaaggagccacctaagtggtgcttagacttatgattccacatatggaaaaactatgagataataaatgtgtgttttttaaagctgctaagtatgctaaatgtaaggtaatgttatggaacaacagataatacaccaaacattcaaaaatgcttgacaatttgacaatgatttagccttaccaaatacatttctcaatattgtctttaacctaaattcaggaaaaggaagacagtcagtcctgctgtaccacttgtgttgaaaccgcacatttcttccagtgtgaatgatttattattgaacaatttgaggatgaaatgaattttttgttgtgtatctaatttcgtttgcaaaaattactagataggtatagaaaattacaccaaactaaattcagttata

SEQ ID NO: 719294 - DNA, 1075 bp, Homo sapiens
ccagtgaatgatccttgagctagtataaaaatgcaaccccccaggccccacagcagcacctcagttatcattattatcaacaacctactgaagacaaaaagaaaagcaacatgtgctgaccaaggaggctccacagttaaagattctccctctgctaagtttcacttacaacaaaaaaaatttgacttgccaatacacatatattaacattgatgtccgctgcygctcattaaatgcttagaatgtgccaggttatcaagcactttacaggcaccatgtcaataactgaagcctctgtgaggaccattcttacctccacagtcagatttcatagaggcccatggagattagatagcctgatcaaagttctactcccagtgagtgcccgagcagcaatctgaacccacatcttcatctctaaagacactgctcttgcctgagacactccaacaattaaatctcccagacgcagaattttcagaagtaacactgatatttttgaaagtgaattcagagagccgaaggttcattctctgttaccatcattcaattctcttatggttttctatgggtcttgccaaaagagcactttgatttctatcattctatttccaacctgtaagaaaagttcccagcaaaagtagcagcttcatctatgtgggatcttccagtggtgacttttagatcaatggagttccaggtgacaagaacagagactccttttaaaagaatgctatttgtattagtcagggctctccagagaaacagaaccaataggacatatatatacagatatataagaagaagtttatttataggaattggctcacatgactggctcatgtgaattggccaaggagtcccacaatatgctgtctgcaagctaaagaaccaagaaaactggtggtatatttcaatccatgatggtataaactcccaatccaagccagaaggcttgagaacctggggtgggtaagggcagcactggtataaatcctccagagaccgaagacccagaaaccaagagctccaatgtccaagggcaggagaagatgggtgtcccagctcaagaaga

SEQ ID NO: 719295 - DNA, 1075 bp, Homo sapiens
ccagtgaatgatccttgagctagtataaaaatgcaaccccccaggccccacagcagcacctcagttatcattattatcaacaacctactgaagacaaaaagaaaagcaacatgtgctgaccaaggaggctccacagttaaagattctccctctgctaagtttcacttacaacaaaaaaaatttgacttgccaatacacatatattaacattgatgtccgctgccgctcattaaatgcttagaatgtgccaggttatcaagcactttacaggcaccatgtcaataactgaagcctctgtgaggaccattcttacctccacagtcagatttcatagaggcccatggagattagatagcctgatcaaagttctactcccagtgagtgcccgagcagcaatctgaacccacatcttcatctctaaagacactgctcttgcctgagacactccaacaattaaatctcccagacgcagaattttcagaagtaacactgatatttttgaaagtgaattcagagagccgaaggttcattctctgttaccatcattcaattctcttatggttttctatgggtcttgccamaagagcactttgatttctatcattctatttccaacctgtaagaaaagttcccagcaaaagtagcagcttcatctatgtgggatcttccagtggtgacttttagatcaatggagttccaggtgacaagaacagagactccttttaaaagaatgctatttgtattagtcagggctctccagagaaacagaaccaataggacatatatatacagatatataagaagaagtttatttataggaattggctcacatgactggctcatgtgaattggccaaggagtcccacaatatgctgtctgcaagctaaagaaccaagaaaactggtggtatatttcaatccatgatggtataaactcccaatccaagccagaaggcttgagaacctggggtgggtaagggcagcactggtataaatcctccagagaccgaagacccagaaaccaagagctccaatgtccaagggcaggagaagatgggtgtcccagctcaagaaga

SEQ ID NO: 719296 - DNA, 1075 bp, Homo sapiens
ccagtgaatgatccttgagctagtataaaaatgcaaccccccaggccccacagcagcacctcagttatcattattatcaacaacctactgaagacaaaaagaaaagcaacatgtgctgaccaaggaggctccacagttaaagattctccctctgctaagtttcacttacaacaaaaaaaatttgacttgccaatacacatatattaacattgatgtccgctgccgctcattaaatgcttagaatgtgccaggttatcaagcactttacaggcaccatgtcaataactgaagcctctgtgaggaccattcttacctccacagtcagatttcatagaggcccatggagattagatagcctgatcaaagttctactcccagtgagtgcccgagcagcaatctgaacccacatcttcatctctaaagacactgctcttgcctgagacactccaacaattaaatctcccagacgcagaattttcagaagtaacactgatatttttgaaagtgaattcagagagccgaaggttcattctctgttaccatcattcaattctcttatggttttctatgggtcttgccaaaagagcactttgatttctawcattctatttccaacctgtaagaaaagttcccagcaaaagtagcagcttcatctatgtgggatcttccagtggtgacttttagatcaatggagttccaggtgacaagaacagagactccttttaaaagaatgctatttgtattagtcagggctctccagagaaacagaaccaataggacatatatatacagatatataagaagaagtttatttataggaattggctcacatgactggctcatgtgaattggccaaggagtcccacaatatgctgtctgcaagctaaagaaccaagaaaactggtggtatatttcaatccatgatggtataaactcccaatccaagccagaaggcttgagaacctggggtgggtaagggcagcactggtataaatcctccagagaccgaagacccagaaaccaagagctccaatgtccaagggcaggagaagatgggtgtcccagctcaagaaga

SEQ ID NO: 719297 - DNA, 1120 bp, Homo sapiens
atcctatatccttttggaagatacaatttgacccataacagtgagattcttacttgcaaattgttaaaggaaaaaaatgaaagcaggatgtctgcagacgtcagcctgttagacagctgcaggaagctatcattcactatataataatttttggggtttgttttgagatacggtctcactctgtcactcagacttgrgtgcagtggcacaatctcagctcactgcaacctccacctcccaggttcaagtaaatcttgtgcctcagtctcccaagtagctgggattacaggctcccgccaacacatctagctaatttttgtatttttagtagagtcaggatttcaccatgttgcccaggctggtctcaaattcttgggctcaaacgatctgcccaccttggcctcccaaagtgctgggattacaggcataagccaccatgcccagcctataataattttttttttttaaacaaaggagatagtttgatggtcgtattagtttgctagggctgccataaccaagtaccacaaattggacagcttccaccacagaattcactgtctcacagttctgatggccaggagtctgaaatcaaggtgttagcagggttgattccctctgggggctgtgatggaaggatctgttccaggccctctccttggagtgtagacagctgtcttcttgctccaagtcttcacatcatcttccctctgtacatatttctgcttccaaatttccccttttcataaggactccagtcgtattggattaggacccacctaacaacttcatttttacttggttacctttataaaactccatctttaaataaagtcacattctgaaatactgggggttaggacttcaacacaggaaaattgtgggggaaggctgggctataattcaacccaaaatgatagtgttgtgccagttctgctttctacagagtgatggggagaactgagcccactgcagctgcacacaatgactgacaggttgcctttctaagccacagctcatcagccaacacatccccttctttgagaaatgacagaacggcccaagagaagcagcagcaagctctatccatcctatgaaagcttcctgatttccagaggca

SEQ ID NO: 719298 - DNA, 888 bp, Homo sapiens
gagctcaggagttcaagaccagtctgggyaacatggcaaaaccccatctctaccttttttttttaaatttggctgggtgcagtggctcatgcctgtaatcccagcactttgggaggccaagcagggtggatttcttgaggctaggagtttgacactagcctgggtaacagggttaaactccgacactactaaaaatacgacaaaaaatttagcctggtgtggtagtgtgcgcctgaagtcccagctactcttgggcagctgaggtagaagaatcacctgagcctgggaagtcaaggctgcagtgagctgtgttcgtactactgcactccagcctagaaaatgagagtgagaccctatttgggaaaaaaaaaaattatatatactgggtttttgcttatcctcactcctgagtgcaaaatgaatgctaaacctggaaaacacatgtctgcaaaccaaagttctttaaaaatataactctctagttatttttgttaaagtcaagacatcaccaaacagaaccacttctttaacttttatttatttcttctcaccatttcattatggaagatttcagacatatacaaaaatacagcctggtttattgaactccatgggtttaacaattatcaactcactgaacattttgtttcaatccctgatggaattggcttgaagtgcatcccagatagcacataatctctttatatacttcactatatttctaaaagataaggactttaaaaaatagacacaatatcattcttacaattaaaaataaataataatgccttaatatcaagtatcaaaccatgatttaaatttctctatctcaatttttttaatagttgatttgtatgatcagcattcaaatatggtccacacatcaca

SEQ ID NO: 719299 - DNA, 1057 bp, Homo sapiens
gttagtgttgtctccatgtggcttatgtgcctgaggtcctatggctatgtatattagccagagtgatatgtaacgttgttttgcctgtttcctccaaatcttgatcagctcatttcacattccctggagtcagaacacaatgcccaggccagctgccccctcggactaccagatgtcaggctgccctttgcggacttctcacttgccaacctcttccttttccttttctcctcaccttggacactgccttccttttcttcagccccttctcatggcaccaagtggttcaactccattgttttggaacaagggaaagagaaacaagaaaaataaatatatcgccccaattcactggaggagtctggaattgagcaaaattaaaacaatttctctgtagccagcaccacagcaggagctgggctctctgacacatgtgaaacactctttctgtgtgtaaatatttttaaattgccttgttaaagaaaagaggaaacccaggcagagtcatacattgcccagatgtatcggatcagaagaatgaaagtgcaaaaggtcagagactctattctgaagaggagagaatatctctattatttataaagggcagaatgaggattacgcgcatgaaggagasagatacagacaggctgcccctggaaaattaatggagcactggaaggtgcaagcagaaaaaaatcctggccacctgtgaattgggttagagaaaagaggaaaggcttttgtacagatatcctgcaatatgagggctaaaggtctccctacaagtaggtgattgcttattgatcctaatttcccctatgtacactactgaggaacaccaagaagaaaagttcttccaacaaaaacaacgttttgatgtctgtccctcactcaattttaaaaattttcaaggtggactttggagtcagactactcagactctattacttatttattaatgatgtgaccttggacaagtcacttaacctctatctctaaatattttctcatttataaaatgacaatattattagtatgtaccttatgggctttcatt

SEQ ID NO: 719300 - DNA, 1083 bp, Homo sapiens
aagggcttagatcagatcatttaatatatgcatctgtcttgtctgtcagtaaaatagctcgctttatttaataatataatttaataagatttcagatttagtacctcttttcacttagttttttaaagaaatatttgcaactatatatgttcaaatatgcaatactatgtatasaaatttaatattaaaatttcatgacatttttgtccagtaattaggaatatgtatttgagaataaaaaactgctgactcatttatccattcaaaaattcattattcattattcactatgtgccataatactttctgcagaagtacaagttgggctgtagagataaaaagatgaaaatgacatgttccctattatcttatgatctgttgggaaaacaatgcaaaaaatataaaaagttgaaatggcacaaataattgtgagaaatcaaaaaggaaggcttctagaggggacagaggaacataaaaaaactttaaaaatgaacatttaaatactaagtattaaaaaggactgggtgggctggtggaattttctttgcttttgaaagtcacgctgtagtggacttttgtgaactgtgtcctcagcactaatacaggccattttcagcaataggtttgggttggttgcccataggcagatccagggataggccctgattggcttaagtataatctatactcaaaagactggttctgaaatgggcacatgataaagatatggctgacgggactttcagaagggaaaaagggcttctcttatcctagagcttcataacaggactcttttttttttttttttttttaacttggacaaggaccagaaaggatgaaaccatgggagctgtctgcagctatatttcaccaatgagaaaaacacctgcctgaaaagagaattagcattgaagagactaagcagaaaaatgaaaaccaagccctggtgaatcctgaatcaagtcatgcttcatggttatatgagcaaacacattccttttattgtaaccagattgagttgtataatctatatcttgcaacctagagagtcctaatatacctatttaaaaattaatatcaatg

SEQ ID NO: 719301 - DNA, 947 bp, Homo sapiens
ggctggagtgcaatggtgccatctcggttcactgcaacctccgcttcccgggttcaagtgattctcctgcctcagcctcccgagtagctgagactacaggtgtgcrccacaatgtccagctaatttttgtatttttagtagagatgggatttcaccatattggccaggatagtctccatctcttgaccttgtggtccacctgcctcggtctcccgaagtgctgggattacaggcgtgagccaccatgcccagcctccttctggatattttaataacaagatgtttatatttccaaggttctgatatatttccctagttttcttcttaaattcagcatcatgagcctgtgtatgtatgtgtgttgtttattttcatcctaacacccatagaaagatatatatttttaagaaagaaggctcatctcttctaaagccagtttttagttgaaagcaaaagaaaaagccaaaataatggcaatttttcttcagttgagatattgtaataggcctactttttgttagcctaacataaagccacgctccccaaagcctccctgctaatgcaataggggatctttctaggttactttcttcattgagcttggccataactttgctttttactggacttgtgttgccattttgaacttttctgttcaacaaagtttggcaaatgcttatagttcaacataaacaaccacaacaaaaaaggtaatttttgttgtaatgaactgtataatttacttcatttattaaaagaggcacagtagaaacaaaaggttatataggccaggcacagtggttcacacttgtaacccagcaatttgggaggccgaggtaggaggatcgcttgagaccatgaattcgaaaccaacctggcaaacatggagagacaccatctctaaaacaaaacaaaacaaaaaaaaaaaacaagaaaaaaacccaaaa

SEQ ID NO: 719302 - DNA, 947 bp, Homo sapiens
ggctggagtgcaatggtgccatctcggttcactgcaacctccgcttcccgggttcaagtgattctcctgcctcagcctcccgagtagctgagactacaggtgtgcgccacaatgtccagctaatttttgtatttttagtagagatgggatttcaccatattggccaggatagtctccatctcttgaccttgtggtccacctgcctcggtctcccgaagtgctgggattacaggcgtgagccaccatgcccagcctccttctggatattttaataacaagatgtttatatttccaaggttctgatatatttccctagttttcttcttaaattcagcatcatgagcctgtgtatgtatgtgtgttgtttattttcatcctaacacccatagaaagatatatatttttaagaaagaaggctcatctcttctaaagccagtttttagttgaaagcaaaagaaaaagccaaaataatggcaatttttcttcagttgagatattgtaataggcctactttttgttagcctaacataaagccacgctccccaaagcctccctgctaatgcaataggggatctttctaggttactttcttcattgagcttggccataactttgctttttactggacttgtgttgccattttgaacttttctgttcaacaaagtttggcaaatgcttatagttcaacataaacaaccacaacaaaaaaggtaatttttgttgtaatgaactgtataatttacttcatttattaaaagaggcacagtagaaacaaaaggttatataggccaggcacagtggttcacacttgtaacccagcaatttgggaggccgaggtaggaggatcgcttgagaccatgaattcgaaaccaacctggcaaacatggagagacaccatctctaaaamaaaacaaaacaaaaaaaaaaaacaagaaaaaaacccaaaa

SEQ ID NO: 719303 - DNA, 947 bp, Homo sapiens
ggctggagtgcaatggtgccatctcggttcactgcaacctccgcttcccgggttcaagtgattctcctgcctcagcctcccgagtagctgagactacaggtgtgcgccacaatgtccagctaatttttgtatttttagtagagatgggatttcaccatattggccaggatagtctccatctcttgaccttgtggtccacctgcctcggtctcccgaagtgctgggattacaggcgtgagccaccatgcccagcctccttctggatattttaataacaagatgtttatatttccaaggttctgatatatttccctagttttcttcttaaattcagcatcatgagcctgtgtatgtatgtgtgttgtttattttcatcctaacacccatagaaagatatatatttttaagaaagaaggctcatctcttctaaagccagtttttagttgaaagcaaaagaaaaagccaaaataatggcaatttttcttcagttgagatattgtaataggcctactttttgttagcctaacataaagccacgctccccaaagcctccctgctaatgcaataggggatctttctaggttactttcttcattgagcttggccataactttgctttttactggacttgtgttgccattttgaacttttctgttcaacaaagtttggcaaatgcttatagttcaacataaacaaccacaacaaaaaaggtaatttttgttgtaatgaactgtataatttacttcatttattaaaagaggcacagtagaaacaaaaggttatataggccaggcacagtggttcacacttgtaacccagcaatttgggaggccgaggtaggaggatcgcttgagaccatgaattcgaaaccaacctggcaaacatggagagacaccatctctaaaacaaaacaaaacaaaaaaaaaaamcaagaaaaaaacccaaaa

SEQ ID NO: 719304 - DNA, 647 bp, Homo sapiens
tttgttctggtcttctcttgcctccccgtaatttcttttcttacataagtttcagctttgcctggcaatcagacaccttatatttttctttattatttattattttttttttgagatggagtctcgctctgtcaccaggctggagtgcaatggcgcgatctcggctcactacaacccccacctcctgggttcaagcgattgtctaatttttgtatttttagtagagatggggtttcaccatgttggccaggatggtctcgatctcttgaccttgtgatccgcccgcctaggcctcycaaagtgttgggattacaggcgtgagccactgcgcccggccttttctttattatttctttaatttgtctgcaattaatgtcttccaggttgtggcctctcccagaagactttatattttaaaaagaacagatcacagaaggataattttatggggcaggtggcctcctatacatgacttcccatgctttcatcctaacatcaaaatgtctcagaggggaaataattgcacctgtgagaaatgcaatggacttgtcaaaatacatgtataatatatagatccacatacattatatacctatatatgtttctatgtgctttgtgacaagaaaaaaatcacaatgtcacgtaat

SEQ ID NO: 719305 - DNA, 1939 bp, Homo sapiens
tcaaccctctctagctctgaagaggtgacactattatagaataacatgtgcaaacacttattcaaagtgatatatcccagtgtgagctgtcatatagtatagtgctttatgcctttcttttccttgctgggttgatgatatgaaaaatgttcctaatgcaattgaaaggttcttgagttcaccaaagcaaaggtccattcttctgcatctgagagtttgtaagtcaaccatgtataagagtaaatatagacgtgttctcaaatttttacattctgaaattttccatttcctgttaagaagaataaccaactaaaatggtatggattttatagggttgaaaaggaagatatacagtatagtaacttctggcaaaggtggtgaaaatagtgtctatctatttaaccttaatggatgcctataaaagtgcatgaaaatacagtctctagtctgtgatgtttggggacattcttgaagtcatcagtgaaattgctagggtggattgggtagtggggcatatgtatctttaaagatggcatagacttggcactctctggcagggtttaaaacccccttctgatttaggacagaacaaggtttagggattcgaatgtatacatttgaatcaagatcaaggagaagctggttagcagcaggaagtatataatgggtgagtgaatggtttggtgtgctgatgttggggcttgatagagggtgttaatttatagaatttatctgcaggaagtgatttctaattatattgcttctttttccctcaaaattggtgacatcattttggatatgcctaagattttgggtaagattttagtgctaaaatgggctttaagaataaaccttctcaaacactttattctagccatcctcactttccagttgaagctcgctacagactaacttgccctaagttcaatatctagttagtattagaacttaygccaaatcagacctgacttctagacaagagctcttttcctttatgccaggttacatccaatcaagaaacagggaatacaaaaagaactattttttatcttttattaatgcataatagtaaaatattcattttatttctttttatatcacaaacatgcatgcatttggtaagtggagattattttcttagtctgaggtaaataaaatagggatattaatgctctctgaaagctaaaggaaacagaaaaattttttcgcatcagatggataatgtgctgacataacaagattggaaggaggcatgtctcacatgtgagcgtaaaaacagagttatcatgcttgtgaaccacaacatggtcagacaaaatttttatttacgaaacttccaaggtcttactttgtcttaggttatgctgacattggatctattattttcttagttcaatgtagaaaacaggataggtactcatatacatttgtttaatgaataattaaattaagtcaagcattcgctggggacctagtatatgccaggcctgctgaatattttccaatccttaagattcacaactcctttcccacctctcttaaatcctttataaaagcctctgaaatccttataaaaaagtcctctttgtatagctatagcccatattatttgcttatttttcccatctggcatttttaaacgactatttagttacatgttcatcagccattactgctgtttgtatgttccagattatcttaggaaggtcttaaaattatcagagaagtaataggttgttttgggtttaaaggtttgtctacctggagatcaacatttgttttttcattttaaaataatcacagaactgaagtataatgtgactaatttaaatttttttttaatagaaggtaaattgatctccagatagaaccatgtgcattgctggaaattgtgtatgataaacctgacactttaatatctaacaaagataacatataa

SEQ ID NO: 719306 - DNA, 843 bp, Homo sapiens
tgggaaactataggcaaaaatgttcttttcatttaaaataagactgtgccataggacaaacaggaacatgacmggcctcttttatgtatgctatgttttgttcatttacaggtaggggaataaagcaactattccttcactagcaccagtctttactgaggacttttacacatggttttcactgtcttggaagtctttcccctctagtggaagctgccaaaaccctacttgtcttttagggctcagctaaaatgtcacctaaacatacagcgttccctgaattctctcagctgaacttcattagaacatatgctgtgttttcccctttgtgactaactctgacaaatagaggctgaagaattgttctaaggagctgtgttcctatataacttttctagcaagactgagcatgttgtcatttttttttaataaaatagtggccagattagtaatggaccaccttgtatttactctctttccttcctggcgcactgcatttttttctctcactcttgcagccctggattacatctcctattaatccttagtatatttgaaacaagagagggacctgggtgtgggggaatttgccttctgtgctccaattcaaccctgagcattgtgtcactttttatagttactggtatgaatgtcttgcaggaaattctaagaggccaaaacactgtctcactcatcttgctatctcctgcagcctcatccttgcatacagaaactgcttgatctggaaattttgaattaatgaattgttcatctctgcttccacctcatataatatgtcaatgtgtcatattatcaatatttattattgataatatcaatatt

SEQ ID NO: 719307 - DNA, 843 bp, Homo sapiens
tgggaaactataggcaaaaatgttcttttcatttaaaataagactgtgccataggacaaacaggaacatgacaggcctcttttatgtatgctatgttttgttcatttacaggtaggggaataaagcaactattccttcactagcaccagtctttactgaggacttttacacatggttttcactgtcttggaagtctttcccctctagtggaagctgccaaaaccctacttgtcttttagggctcagctaaaatgtcacctaaacatacagcgttccctgaattctctcagctgaacttcattagaacatatgctgtgttttcccctttgtgactaactctgacaaatagaggctgaagaattgttctaaggagctgtgttcctatataacttttctagcaagactgagcatgttgtcatttttttttaataaaatrgtggccagattagtaatggaccaccttgtatttactctctttccttcctggcgcactgcatttttttctctcactcttgcagccctggattacatctcctattaatccttagtatatttgaaacaagagagggacctgggtgtgggggaatttgccttctgtgctccaattcaaccctgagcattgtgtcactttttatagttactggtatgaatgtcttgcaggaaattctaagaggccaaaacactgtctcactcatcttgctatctcctgcagcctcatccttgcatacagaaactgcttgatctggaaattttgaattaatgaattgttcatctctgcttccacctcatataatatgtcaatgtgtcatattatcaatatttattattgataatatcaatatt

SEQ ID NO: 719308 - DNA, 1092 bp, Homo sapiens
attctctgtcaactaaaatattttttagttccctgaaaacttgattctccattcttctcatcaatagaatattctacattaagaacaaaaaaaatggctgtaagatccagaatggattagaattgagtgatttattttttcaaacagggtttatgctcttttctcagttaccatgttcattatggaagaatgagaatgtagctaggaatggatctgaccttaaccgtcactgcctctacctggtctaaatcgtgaaaygagcatcacatctcaggctttcttgctgctgcacagactttttccccatgagtagatttgtgttccatgaatttcaaagttactaatatatgaagattaaacgctacttatgatgccactgtttaaaaattacatagtaagcatttggaaaaggaataataaaggtcctttaggtcccatcatttctttccttttcccttttttttttttggtctgagtttaataggcctaggaccatgcttccctgaactctttgaagcacactatccagaaaaactttctggggtggtagaaattgtttcgatccatcgatagagtagccactagccaggtgtggctattgagcgctcaaaaatagctagtgcaactaaggaactgatttttaaattttatttaatgttaattaaagtttaactttagtttcaatttaatttcattttaatttaaaatatatgtggctagtgactaccatatcggatgacacaattctaaagcgtccttcatattacttctatttccttgggaattatagaaataaccccatttacctggatatctgatatttaggaaaggtaagctttaatctgctagctgaaaaccagagatgagtaagaaaagccttagaatggcaaatagaccacgattatgctacaaaatattatgttgcaaatgatttgtggtaatgtcaaagtgttgttctcagcaggataggttgagccactctgggactcttgtctgaacagttgcgtgcaacatagccagaaaagccagaaacacattgatgtcagtgagaagacatagctaaatggtaggaagaaaagagcaaagactttt

SEQ ID NO: 719309 - DNA, 1092 bp, Homo sapiens
attctctgtcaactaaaatattttttagttccctgaaaacttgattctccattcttctcatcaatagaatattctacattaagaacaaaaaaaatggctgtaagatccagaatggattagaattgagtgatttattttttcaaacagggtttatgctcttttctcagttaccatgttcattatggaagaatgagaatgtagctaggaatggatctgaccttaaccgtcactgcctctacctggtctaaatcgtgaaacgagcatcacatctcaggctttcttgctgctgcacagactttttccccatgagtagatttgtgttccatgaatttcaaagttactaatatatgaagattaaacrctacttatgatgccactgtttaaaaattacatagtaagcatttggaaaaggaataataaaggtcctttaggtcccatcatttctttccttttcccttttttttttttggtctgagtttaataggcctaggaccatgcttccctgaactctttgaagcacactatccagaaaaactttctggggtggtagaaattgtttcgatccatcgatagagtagccactagccaggtgtggctattgagcgctcaaaaatagctagtgcaactaaggaactgatttttaaattttatttaatgttaattaaagtttaactttagtttcaatttaatttcattttaatttaaaatatatgtggctagtgactaccatatcggatgacacaattctaaagcgtccttcatattacttctatttccttgggaattatagaaataaccccatttacctggatatctgatatttaggaaaggtaagctttaatctgctagctgaaaaccagagatgagtaagaaaagccttagaatggcaaatagaccacgattatgctacaaaatattatgttgcaaatgatttgtggtaatgtcaaagtgttgttctcagcaggataggttgagccactctgggactcttgtctgaacagttgcgtgcaacatagccagaaaagccagaaacacattgatgtcagtgagaagacatagctaaatggtaggaagaaaagagcaaagactttt

SEQ ID NO: 719310 - DNA, 1092 bp, Homo sapiens
attctctgtcaactaaaatattttttagttccctgaaaacttgattctccattcttctcatcaatagaatattctacattaagaacaaaaaaaatggctgtaagatccagaatggattagaattgagtgatttattttttcaaacagggtttatgctcttttctcagttaccatgttcattatggaagaatgagaatgtagctaggaatggatctgaccttaaccgtcactgcctctacctggtctaaatcgtgaaacgagcatcacatctcaggctttcttgctgctgcacagactttttccccatgagtagatttgtgttccatgaatttcaaagttactaatatatgaagattaaacgctacttatgatgccactgtttaaaaattacatagtaagcatttggaaaaggaataataaaggtcctttaggtcccatcatttctttccttttcccttttttttttttggtctgagtttaataggcctaggaccatgcttccctgaactctttgaagcacactatccagaaaaactttctggggtggtagaaattgtttcgatccatcgatagagtagccactagccaggtgtggctattgagcgctcaaaaatagctagtgcaactaaggaactgatttttaaattttatttaatgttaattaaagtttaactttagtttcaatttaatttcattttaatttaaaatatatgtggctagtgactaccatatcggatgacacaattctaaagcgtccttcatattacttctatttccttgggaattatagaaataaccccatttacctggatatctgatatttaggaaaggtaagctttaatctgctagctgaaaaccagagatgagtaagaaaagccttagaatggcaaatagaccaygattatgctacaaaatattatgttgcaaatgatttgtggtaatgtcaaagtgttgttctcagcaggataggttgagccactctgggactcttgtctgaacagttgcgtgcaacatagccagaaaagccagaaacacattgatgtcagtgagaagacatagctaaatggtaggaagaaaagagcaaagactttt

SEQ ID NO: 719311 - DNA, 1092 bp, Homo sapiens
attctctgtcaactaaaatattttttagttccctgaaaacttgattctccattcttctcatcaatagaatattctacattaagaacaaaaaaaatggctgtaagatccagaatggattagaattgagtgatttattttttcaaacagggtttatgctcttttctcagttaccatgttcattatggaagaatgagaatgtagctaggaatggatctgaccttaaccgtcactgcctctacctggtctaaatcgtgaaacgagcatcacatctcaggctttcttgctgctgcacagactttttccccatgagtagatttgtgttccatgaatttcaaagttactaatatatgaagattaaacgctacttatgatgccactgtttaaaaattacatagtaagcatttggaaaaggaataataaaggtcctttaggtcccatcatttctttccttttcccttttttttttttggtctgagtttaataggcctaggaccatgcttccctgaactctttgaagcacactatccagaaaaactttctggggtggtagaaattgtttcgatccatcgatagagtagccactagccaggtgtggctattgagcgctcaaaaatagctagtgcaactaaggaactgatttttaaattttatttaatgttaattaaagtttaactttagtttcaatttaatttcattttaatttaaaatatatgtggctagtgactaccatatcggatgacacaattctaaagcgtccttcatattacttctatttccttgggaattatagaaataaccccatttacctggatatctgatatttaggaaaggtaagctttaatctgctagctgaaaaccagagatgagtaagaaaagccttagaatggcaaatagaccacgattatgctacaaaatattatgttgcaaatgatttgtggtaatgtcaaagtgttgttctcagcaggataggttgagccactctgggactcttgtctgaacagttgcgtgcaamatagccagaaaagccagaaacacattgatgtcagtgagaagacatagctaaatggtaggaagaaaagagcaaagactttt

SEQ ID NO: 719312 - DNA, 1901 bp, Homo sapiens
atatggcctttataaggtttcaactagatgccctgggtattcagcaatttttatccactccgacaaactgaaatgttgtccagtactgtgtggcttttggaatctttgttcatcttcyagcccctcagtagcttttctctggcagagttctctcagtctcatcctctggatatgtatctcagtatttggctaatgactcagtaagacccctaaactgagtccaatgggacttcttccctatttggtaccctattcttcacattctatctaactcagcagttccgtgttccagttgactcctcctcttctcagggaatctgctgcttcctgtttgagttcctcttctctgtgccacagtttggaatgccttccccagcagaaacaactctctcatgtgtttccctttcctcaaggattaaaacagttgctgtatgtgttttgtccagatttatagttctttagaagaactctgaaggttaaagtctatatatgttactctgccatggaagtatatacacaagtgtacaaaactttttttttttgctatttgtaatatagttttaaagttttattttgttgacttttaatcatctgtttagattacactggaaatatgttgatatcatcaatacgtattggattctttacacatcattaatcccttctctatgcaacatctcagatattttatgaatagaaaattattggcatttggaagggggttctatgaaacaccattttaaaggagatgtatgagtttttcttttgggatttagcagaaaatgaaggataatgttttgatattatctcttactgctattgcatttttccttttttatattccatctgtttggggttttttttaatgtttgtttccagatctttggattttatttttatttttaatatgtatatttattttaatataatgtttaaattagattttaaagtcaatttattttgagtacattttaaaagagaatttaccagcttgtataaaccctaccataaactgatttattcccttaattatcggcagttttgccatgacttcacaatacatttttatgcaatgagcatgacagacaagtcatttatgtgccattctttaaatatgaaattacaaagcagagcttgcagatctttaagttggataagctatagattaataggatccattattttgaagacagtataagacatgcatcattccaaaagcagaataccaagaggagacaactatagatgtgccacctgaagttcaaaatactgaattattttatcagttgggatttattctttggcaagcaatagtgtcatctattcaaaatatgaaaatagaatttctttaacaaacataacaatgtaaatgtaagccataaaatggtaacacatcctacattgaagcatgaactaatcattcttaggttagtcaacttgttttaggggttctttttaaatagtggatatacttttatttgccatttcatggaatgggaaaaatctgaataactcattcttcaaagattttccagattctagtaagaagcatgtttgggggaattcttggtctaattgtgttttaccattctctcacatttctacctaccctcctttctcttccttcccatgtttttcttactctaggctctcatctggcccctgtcaatttttctttataccatatccaattcaattcatttatcttcctttattctttcctgaacacaaaactgaagacaaatattgcaatatttataaatcagattttttagtcttgttcagtgcctgcccaaatgatgaaataaacacttggcttcatcatcttccttttatcttgggacccagcccctccataattgctcagacttgtgtcaaatccagttccatgatctttattt

SEQ ID NO: 719313 - DNA, 1005 bp, Homo sapiens
ctggggaggagcccagggacatatttcacagctaagtcaactgcttttcttcaaattcagatttaatccttgagtgaaatgagtcactggctcatccagttaagatcatcacccactttcctaacaaaacttctcttcaaagaaggactcgctcatccatcaggtatttatttagcactcactacatagtagatactgttttggcagcttggagcaacagagcaggaaataagagaggcaactagagcagtgttgtatggtggaaagaactctagttctggtgctgagaaacttggcttcacctcctggtctcggaacttactttctgtgcagctctttgaatctggggtataacagatgcctgtttcacaggattgtttttatttatttgtttatttatttaatttttttgagatcaagtctcgctttgtcatccagcctcctgagtagctggkattacaagcatgcgccaacatgccactaatgcccagctaatttttgtatttttagtagagatagggtttcaccatattggccaggctggtctcgaactctagacctcaagtgatccacctgccttggcctcccaaagtgctgggattacaggcatgagccactgcgcttggccccataggactgttttgaggcatgtggtattctggctagacatctgaggttcagacggacttcggatacaatcccagctatgccacttaagatcatgtggccttgggcaaatcacttcacttctttgaacctcagtttcttcatctacaaaacagaaataataaggcatctcttggaagactgttgggatggttcagagctaagagcagcaaatgaaagagttttgtgaaattcaaggcagggagaagatttttccaggccaaactgaaattccttctgatgtttctagcttttcctgaggttctttcacacatttcttaattagacctgcctgaagcaggctgcaagaagactagaatctttgtctttgtttcttcc

SEQ ID NO: 719314 - DNA, 605 bp, Homo sapiens
aaaggtctttactctgaagtagaatatgcagaccctttcctgccatttttcaatgtcaattgttatgcaatttgcatgtaaacatacatcttccagtgaaagttccaaatgacactggcaagcatgctcccttcattctgacttatgtttgagagaccgttcggaggtaacaatgaataacatccttatayagctgaatttcttggaatcatatttattattataagtttaaaataccatccttgctatttcaaatctggggctttcaaagtcactcaaatttaggctgagaatttttcaaataaatataaaaattatttgggcacttctaacataaggctcaagtgtttaacgagaagcatttaatgcaagttgtgggtaatgaataaaaacacggctgtgaataaaaagatgcatatggagacaaattcttagctgttaactatcaaaattaattataaaaagttagatataggccgggcgcagtggctcacgcctgtaatcccagcactttgggaggccgaggcaggcggatcacgaggtcaagatattgagaccatcctggccaacatagtgaaaccccgtctctaataaaaatacaaaaa

SEQ ID NO: 719315 - DNA, 621 bp, Homo sapiens
ataggaaagaacactttataaatagactcttggagggcaaagcatattgtactaaatatctcaaatccaagattctaaagaagagatataaaaaagtatactattcctggatttgactttcaaataccgcaaaaaacagaactagaatgcagcctagaaacctgtaatatatcccatgggtagcccggggccagctgaatgtctgattcttcctcttctcacctgcctcatatttcttttcctgtacagcatgtgaaataaatgtctctatttggaattgtccatatcaagtaaagaaataaaataagaggctgggcgcagtggctcatgcctgtaatcccagcactttgggaggcagaggcgggtggatcacgaggtcaggagttcgagaccagcctggccaacatggtgcaaccccgtttctactaaaaaaaaaaaaatacaaaaattagccatgcgtggtggcacatgmctgtaaactcagctactcgggaggctgaggtggagaattgcttaaacccaggaggtggaggttgcagtgagccaagattgtgccactgcactccagcctgggcaacacagcgagactctgtttcaaaaaaaaaaaaagggccaggcacg

SEQ ID NO: 719316 - DNA, 1189 bp, Homo sapiens
gtagctaggactacaggctcyctccaccatgctgggctaattaaaaaaaattttttttgtggagatagagtcttactgtgttgaccaggctggtctggagctcctggcctcaagccatcctcccaccttagcctcccaaagtgtggagattacagacatgagccaccgtgcctagccctgaaattacaatgctatgaatcataatctttgtttaaatattttcatagtgtgattttaaccaccaaagagcctcgatttgtatagcaatattcagactactaaaacttgactttagagccatttttctacaaagttaattataacctctctcagtttcccatcttgttcctttcaccttacaccatagggtgaggaccaacagggtaaacaaatctttcccatgctatttttattttgtttcataattgttatgattggggaaggagggtggtttaaaaatagcttgtaaagaagcgttaatttttaccaactaatagcttaagttgcctactcaaggatatagtgaaagggaaatctgcacatcccttgaaggatgccttcccctcaaggaatttagagggtttctttttgctatagtgttgtgatatatatatatgtcttaggctttcaaagtttcagtgttctactttaattatctgttttttttctttttttccttaaaaaattttgtttttttgagacacagtctctattgcccaggctggagtgcagtggcatgatctctgctcactgtggcctctgcctcacgggttctagcgattctcctgcctcagcctcctgggtagctggaattagaggcacacaccaccacacccgactaatttttgtatttttagtacagtccaggtttcaccatgttggccaggctggtcttgaactgctgacctcaggtgatccacccacctcgacctcccaaagtgctgggattacaggtgtgagccaccgcacccggtcaataatctttttataaattgagaatgttctactttaactgtcaaagttccttaccccatcacttttttctaaacataattatatatacattcctgcctcagtatccatgaaaggttggtcccaggtccttccatggataccaaaatctacagatgctcaagtccctgatataaaatggcatagtatttgcgtataacctgtacacatcttcctg

SEQ ID NO: 719317 - DNA, 2287 bp, Homo sapiens
aaatatatgaaaaagacaaaataatcaaaactcctaaggcagtccacaggactagagtcatagaatgacaaaattgaaagagaccttggaaatctcatccctccctttcacaaaaggaacactaaggcatagagagatttcccagcatgtccgtgttactcagaactggatatcttcgggggaaagaaccttggtactttcaaatgagatgagcaaacagcgatgcaagaaatgcagaatattattgctaattccacaggtcagaaatgtgacaattatgacataagttaggctggcccatactttagccaatggggtaaaatattagctacgtaagttaacaattccagctatcagtcatcatagttattaagggtttttctctgagccacactagaaggaagagaaggaagttaggagaagcccaggataaggacatggtctctggcttcagagaactttcactttaattgggaagatgaggaaatcacagaaaaatataatgattcaggattatccagcagtatgtagactgtatagcattcatatctatgctacagtttctcttgtccagcccagattttttgaaggcattaatctcttctataaagctctagaggtactcatccaatatctgttaaatttgttgactgccaactccttttcccagtgaagttcattccatttaagaacattccaatcattccacaaagtgtgcataattcaaaacatcaaattgtacatgataaatgtatacaagtttttctgtcaattatagaaagttaaaaagaacattctaaatgataaaaatgtcccatttatatttactgtagattcctttccattttctttctttctttttttttttttttttttgagacagtgtctttgtctcccaggctagggtgcagcggcataatcacagctcacttcagccttgacttctcaggactcaggtgattttcccacctcagcctcccaagtggctgggaatacaggtgtgcaccacmacacccagctaatttttctattttttgatgagacagggtttccccacattgtccaagctggtctcgaactcctgggctcaagccacctacccacctcagcttcccaaagtgctgagatgataggcttgaggataggagaactctgattctccttatattccaaaattgttggatattttaagatactcattgtggctttcttctaccagacactgagttccttcaatcacttctcacataacatggatccaggaccccccactacctgagtgctctccagaccccaacccaacacaccccaacccaggtgtgatttcactggctcagaatgagcgggatgacggtctcttgttctgaaaagtctatgctatttctattctttttgcctaatattgcattaatattttggcatctatatcacatagttgactcatactgagcttaaagtcaattaaaacccctgtatctttttcacatgtgttattgataaatccccccccccaattattcatgtctgcaattgttagtggttttcatttttaaatctacatttgtgcctgttaaatttcatcatgttgtattgagcccattgttgcagcttttggaacatttttttggactcatttttagctctttttcccagctctgtgtcacgcacaggttgatttggccatatgcaacatccaagttaagaacaaaaatgttgattaaccttaggccaaagccaagattcaagagtgaaattcgtttaaggtagaacctattcattagttatacgtctttgggtcttgtcagtaaaagtggatttgaacgtgaggcatcctgagattggatggcagtgatcctaaatgagaatttccttggaaccattgataacatgaaacaaagcaaatctatgtcatgcgtttaagatatattgttgttgtttgtttgtttaagagagggccctctaatgataattcgtaatataggtcaggcttcagctttttgaggaatggtaactggcgagaataaggattcagtgtagcaaattagagtgggagaggaactacagttattgatggagattggttaaaatagatatagaaattataaagaaagagggatagataaagcccatattggcaatcctgaagagtctatataatactcaggattaatctttggcactgtggctcctgaatccagaaggcagtacagtgtcaattaccaccagatgatgtggctgaatatatctcttgtccctagggataaagttgcagttggacctatagctg

SEQ ID NO: 719318 - DNA, 602 bp, Homo sapiens
ttttaattgtaaggttctgccttatacatttggtagttttggaatctacccttttgggtggattccttttggaatttatatttaaacataaatgaggcttcctcagagcactcttctaacaacattatcaaaattaaccacctgacttcccattccccatcaccccctattatccctattatcttaccctattttacttccttccggtgtgtttttttttttttttttttttttaracagagtctcgctttgtcacctaggctggagtgcaatggcatgatctcggctcactgcaacctctgcctcccgggttcaagcgattctcctgcctcagcctcctgagtagctggaattacaggtgcatgccatcatgccaggctgatttttttgtatttttagtagagatggggtttcaccacattgtttaggctggtcttcattttacatttctctctctgaaattatcttatttacctatttgtttaggtgttagaagtggaagaatttctaatttccactaaaaattgaaggatgagagcagggttttggttctcttgcctctcccatgcgaccccatagaagcactaaaaaaaattgtttga

SEQ ID NO: 719319 - DNA, 602 bp, Homo sapiens
ttttaattgtaaggttctgccttatacatttggtagttttggaatctacccttttgggtggattccttttggaatttatatttaaacataaatgaggcttcctcagagcactcttctaacaacattatcaaaattaaccacctgacttcccattccccatcaccccctattatccctattatcttaccctattttacttccttccggtgtgtttttttttttttttttttttttagacagagtctcgctttgtcacctaggctggagtgcaatggcatgatctcggctcactgcaacctctgcctcccgggttcaagcgattctcctgcctcagcctcctgagtagctggaattacaggtgcrtgccatcatgccaggctgatttttttgtatttttagtagagatggggtttcaccacattgtttaggctggtcttcattttacatttctctctctgaaattatcttatttacctatttgtttaggtgttagaagtggaagaatttctaatttccactaaaaattgaaggatgagagcagggttttggttctcttgcctctcccatgcgaccccatagaagcactaaaaaaaattgtttga

SEQ ID NO: 719320 - DNA, 602 bp, Homo sapiens
ttttaattgtaaggttctgccttatacatttggtagttttggaatctacccttttgggtggattccttttggaatttatatttaaacataaatgaggcttcctcagagcactcttctaacaacattatcaaaattaaccacctgacttcccattccccatcaccccctattatccctattatcttaccctattttacttccttccggtgtgtttttttttttttttttttttttagacagagtctcgctttgtcacctaggctggagtgcaatggcatgatctcggctcactgcaacctctgcctcccgggttcaagcgattctcctgcctcagcctcctgagtagctggaattacaggtgcatgccatcatgccaggctgatttttttgtatttttagtagagatggggtttcaccacattgtttaggctggtcttcattttacmtttctctctctgaaattatcttatttacctatttgtttaggtgttagaagtggaagaatttctaatttccactaaaaattgaaggatgagagcagggttttggttctcttgcctctcccatgcgaccccatagaagcactaaaaaaaattgtttga

SEQ ID NO: 719321 - DNA, 598 bp, Homo sapiens
ggggagtagctcatctttctggtttgctatgctgggtagattggatgaggagattaaggctggtgaggatataagtcttactccatatcacttgttcattctgattctatcaggagagagttsggtgcagctgtggctgggggcatagcatgaggaggggagaagcatactttgggctaggccagggctggagttaattagacaatcagtgtaataggagaccactagttgctttctctgaagctgcacctgtgatttattgaaacttggctttgaaccccaaacgtatctttccagcatgttggctcatttctgagttttctctactagcacctccatttaacatttgagtagtatttttcatcctttttcattatgcctaaaaggaaacatcacagtcagaacttgaaatgttactgtagttccactgaaccaatagctttcccctccctcccttttcttcctagtttccttttcactcttttctctttttgtcttaaaaaaaaattggtggatacatgaggaaacagaagttcatagacatcaatctgttagcaacagaatgaggattataatgcagatctcagctttgtgttcc

SEQ ID NO: 719322 - DNA, 628 bp, Homo sapiens
ttagctctgactccctcttaccctaatatccctctaatgatactttttagacatttatgcacttgtgaatatattcagccaccatatccttgctatttaattttgatatcacagatattcatgttttagctatacatatcacacgggttggaaagaatccacaaaagatgctgtgtcagaaagataaagtcacatgtctctcaatagttggtggccaaagcttacactcatgaatcagatgtgctgccctgatgaactctggagatcttatcacagttttagggccaatgataagcaaaatgaatctccctaaaatgcaattggcatttgattgcccttattttagtatttttcttaaaaatgaactttgaatgcaaatacatttttatttgcacatattattgagataatgtgtgattaaataccccaattaagacactttgttttacattttccagaaatgcatacaattaacatttgatgtcatttggaagaaggattccagyggaaacaaaaccatatatgagaggaggactgattattaaactccctcttgatccttcagttgttatttttatcaagctgctcttacagatgcatcagccagtctgaaggaagccagatgtca

SEQ ID NO: 719323 - DNA, 609 bp, Homo sapiens
gagcaatttacttaactcatcctggcctcagttttcccatctgtcaaatgagatgcttgaagcaaataacttctaaagccttggcagtggatcatattattgtttccagttagccactacccttctcgtaagaggattgtgcattactgcccatggccacataactttcagtgcttcccattgatgttgggtttggccatggacttgctttcgtcagtggactgtgggcagatgtgacagagccaccattcagcagaagctttaagagccattgtgtggttccgatactgttccgttactttctgccatgagactaagataggagctgctctccagcctggatcctggaatgcaatagacatcyggagtggagtcgcagagccagacccaacctgcagccaacatgcaatgtgagcgaaaaataagcctttgttgttgtaagccattggaagcttgggactgttcattactgcagccttacctaaggaaaatggacttgtacagtctccagatttgaagttctgggtcttcctgcttctactgcaggatatccctgatcattcctctcccagcagatggcatgctctttctaaaaccagatgtgattgg

SEQ ID NO: 719324 - DNA, 1070 bp, Homo sapiens
gccttgacctcctctggctcaagcaatcctcccacctcagcctcctgagtagctgagactacaggcatgcacccaccatgcctggctaatttttatatttctaagtagaggtgggggtttcgccatgttgcacagactggtctcgaactcctgagctcaagcgatccacctgcctcagctttccaaaagtgctgggattacagccatgagccactgtgcccggacttcttttaaaaaaaaaaaaatctttcttatgatacacaatttgagctcacgaaccagtaatcacaacattgagaataagataaatcataggtaggtttattaatgacttccaactacttaccagcagagggtgctacttatccatattttcacacgtataaagcgtgtttcgctgaactaacaggcaggcttcaatactgtaaatgacattatcttacaaatctgtattatgtgataatgaatcagccacccaaacataaacataataccttcagttttaaaaatctatatttttcttgtctttatttgtgaatttaaatagatgatactgtacatgaatatggtacaaaaatgtacagaaataattaactctttcttctatcccagtcctctagttcctcaattttctcttccaaggttatcattgtctccagtttcttctgtatttatgtgtatgtctgttatgttttgtgtttgtattgtatgtgttttttgttttgttttgtattttaaatcagaaatgctataartgctattcttcagcttagggttgatttataaacaagcccataattttgggattccatatcagtacttatagaacatctttcttttaaacagctatattttattccagtgtgtaaataaacagaaatttatgtaaccagtcctctgttgatagatggtaaggttattttaaatattttgcctttccaaacattagtaaattagtgtatttttacatttatctttgtaaatatgtgcaagtatatttgtagggtaatttcttagggaaaattgggtagccatctgaaaaataatgaaggtatagtttcatctctcta

SEQ ID NO: 719325 - DNA, 660 bp, Homo sapiens
gccaacatgatgaaactctgtctctactaaaaatacaaaaacttagccaggcgtggtggtgggctcctgtagtcccagctacttgggaggctgagacaggagaatcaccagaacctgggrggtggaggttgtagtgagctgagattgtgtgccattgtactccaacctgggtgacagagcaagactctatctcaaaaaaaaaaaaaaaaaaaaaagggccctgttccactgaggcttcagtgcggagcatggagggatactacctccaaattccaaacacgtttgacacatctaaagaaccttctaaaggatgactaaactaattctgcaagctttagcctctaacttatctccaatttatatttaatagaaggctggaaattgaacagaagggaaataagattatttggaaataaaaaattgtcagccaagcaaggagagcttggcatttctggaaacttctttaccctggaagaggtaaaaaagtgattctcccattcccccaacagggcattcactaaaaattaagtgagaaatgctttgcctagaggatctgtagcttgcgaacacttgacttgtgccactggtgtacggaacatagcagtgtcagctctgccctgggacagtcaaggctggctggtgctgcctgtggttagagtc

SEQ ID NO: 719326 - DNA, 911 bp, Homo sapiens
ttttaagataattgaatttttttttttcagcttttaagttccagggtacatgtgcaggtaggtgtgttatataggtaaatgtaagccatggtggtttgctgtacaaatcaacccatcacctaggtattaagcccagcatccattagctattcttcctgatgctcttcctcctcccgccccttccgacagaccctagtatgtgctgctccctgcatgtgcccatgtgttctcattgttcagctcccacttataagagaacatgcagtgtttggttttcttttaatattatttttaactttatgataggaaggagtactttttaaagttggttgaaacattgttactgatctcaaagcactaccttccagttattctgagatactttttcagtctaagatctgatactcctattcctggtttgttgagagkttttgtcatgaatggatgttggattttgtcaattgctttttttgaatctcttgacatgattatgtggttttgtactttattacattattaatgaatgaattatatcaatttatttttggatgttaaatcaaccttattttcctaagctaaatcctacttggtcattgtgaataatccatttttttatcttgctatattcagtttgctaatattttaagaatttttgtttcactgttcatgaaatatattgatctagttttcatttttcttttctttcttttttttttttttttttacatctccctcctcttcctcttgatctagttttctaatacagctgcactccaacttacgatggtcctacttaggagtttttgactgtatgatgtttgaaaacaatatgagtttagtagaaacttactttgagtacacataccattctgtttttttgcttttagtacagtattcaataaattatgtga

SEQ ID NO: 719327 - DNA, 720 bp, Homo sapiens
tggtccatcttgtagtcatgatcattctcactattagggaattcttaactttttgcatttgaatcaccgaggtgttatttaaaatacacatatggaatccaagctccagagactctgagtagatctggtgagtgattgtgatgcctgcccacattcaagaaccttagtacaaaagccctgctgaatggttctctttcactatacactctatcaacttatgtacttgatcacactttggacctcaaaatcaataatttttaaaaatctacttcctaagttgtgaggtacgaattgaaggaaataatgaatactatttggggagtcaacattatttattaacgaataccatttggggagccgacattatttatatttggttggtatatttgtatcaactatcattttctaattaatggtrtaggcagaataaaccatcacttgtgattcagaaaggaacatgatacaaataacatccaataatgtatatggatttaaatagatctgccccctacagatgttacgcaattcatgttggtaatgatcattcattaggttttcgtggtggctacatttgatatgtgaagtactggctggaagactggtgccagtagcttcaggtttgctgggattctttcatcagagatgactagctttacttatctttttatgttgcatgtttctatgatgggcctatcctgtcattgtcttcatagtacaatt

SEQ ID NO: 719328 - DNA, 510 bp, Homo sapiens
tgattaatttgtcagaatagaacacatgcatttattcttaccccccatttatttccggaaagaatgatgcagataagaaatatgtggctcagccaggtgygctggctcacgcctgtaatcccagcactttgggaggccgaggcaggcagatcacctgagttggggagctcaagaccagcctgaccaacatggagaaaccccgtctctactaaaaatacaaaatgagccaggcgaggtgacgcatccctgtaatcccaactactagggaggctgaggcaggagaatcgcttgaacccaggaagcagaggttgcagtgagtggagattgtgccattgcactccagcctgggcaacaagagcaaaactgcatctcaaaaaaaaaaaaaaaaaaagaagaaagaaaaaggaaaaaaaagaaatatgtggctctgtgtagaatggaggcattgtctagggcaagtgagaatgagggtgaagaagtaaatgtataaagcattgagaatttccaact

SEQ ID NO: 719329 - DNA, 1158 bp, Homo sapiens
aaagaacctgttgggtcctagaccagaaatccagcacgttatcctagcatgaaactcccttttaaaaagtgaacacccaaagagatgttacaaatgaagatatagccccttcagcatctctggagaccaataccacaataaggaataataacaacctaggaataaaggcaggagtttttacataggatgcacgatatccaaagggactttataaacacaagccattgagtcttaagacctgacacatggcaaggataggacatgtgagagaaaatggatggacggttgaagaaaagaggggaaaagaccatgcagttgaactaacttctttttaatttcaaacaggtattttttgcatccgtgcgatctggaggaagtagccaagtgtttttcatgaccctcaacagaaattccatgatgaactggtaacagaagagcacttggcacttatcttcatggcgttatttctaatttaaaagaacataactcatgtggacttatgccagtctagaggcagaatcagaaggcttggttgaacayatcgctttccctttttcctctccctccgcccctcccagtacagtccatctttcaatgttgcagcctggttgagaaggagagaaaaaggtggcaggaatttccaggagatccccaagaatgctgccttgtctgtggacaaagatggaccatgtgcccttcggaattagggatagaaacaaatattgtgtgctcttaacgattaagctgtgttatggtgggttttcaggtttttaccttttttctttacccctttactctgcaagaatggggaaagaatgcatactgcgaaaatgagtcttttaaattctgtctgcctactagttttaagtatatggtatgttgtaaaatttccaatgatgagagacagcacaataaatgtaccttatctccttaggctgaaggccataactacatagtggagtaatttaagaactctcttgccttcaccaacccaaaaggttgctttttgatagcaactggctaatgaatttttaaaaagagaagaaaaatactagttttcccctcttttgggaaatagattttaaatggctaaactactagccttaaaactactagtctaataaaatcaactaccacttttgtgaatctgacaggcca

SEQ ID NO: 719330 - DNA, 586 bp, Homo sapiens
cagaagtcaggcatatcttccaaatgtcattttgaacactgaccctgaaaaaaatgagcagaagttgacgcacaagactgtgcaggaaaaatgtgccgagtcataacttccaatgaacatgggttacagcccttcctgcggttctgtcttaaatgaactccataggcagatgagctgtttctgaatgtttattatggcctctggtgagccaataagttttctcttttcctattgctttttagttaaaaaattataaatgcytagagaatccacctgccatcctttggctaagttaaaaggcagtggtaagaagacagccatgctctgttagtggtcccaaacttggcattgattactaggctggcatgtgatgacactgttttcaaaatagcctttatccaattgctaaggcagctgcagccctctcagaacctctgaaacctgggatctcacaagtaaacaatgatcaccatggtgtttatattttattaaatgtcatatagccagatttttctaacctggtatagctttagccagagacaatttctagaggatgaaactcaaggcaattatctaacatgcggta

SEQ ID NO: 719331 - DNA, 586 bp, Homo sapiens
cagaagtcaggcatatcttccaaatgtcattttgaacactgaccctgaaaaaaatgagcagaagttgacgcacaagactgtgcaggaaaaatgtgccgagtcataacttccaatgaacatgggttacagcccttcctgcggttctgtcttaaatgaactccataggcagatgagctgtttctgaatgtttattatggcctctggtgagccaataagttttctcttttcctattgctttttagttaaaaaattataaatgcctagagaatccacctgccatcctttggctaagttaaaaggcagtggtaagaagacagccatgctctgttagtggtcccaaacttggcattgattactaggctggcatgtgatgacactgttttcaaaatagcctttatccaattgctarggcagctgcagccctctcagaacctctgaaacctgggatctcacaagtaaacaatgatcaccatggtgtttatattttattaaatgtcatatagccagatttttctaacctggtatagctttagccagagacaatttctagaggatgaaactcaaggcaattatctaacatgcggta

SEQ ID NO: 719332 - DNA, 611 bp, Homo sapiens
aggcaggagaattgcttgaacccgggaggcggaggttgcagtgagccragattgcgccactgcactccagcctgggtgacagagcaagagtccatctcaaaaaaaaaaaaaagaaaatgcacgagtcattataattctgtagtgctgacatcttaaaatagactaatgtaggctgggcgcggtggctcacgccaataatcctaacactttgggaggccaaggtggacggatcacaaggtcaagagatccaagaccatcctggccaacatggtgaaaccatgtctctactaaaaatacaaaaattagctgggtgtggtggtgcacgcctgtagtcccagctacttgggaggctcaggcaggagaatcacttgaacccgagaggcagaggatgcagtgagccgggatcgcgccagggcactccagcttggcgacagaacgaaactccatctcaaaaataaataaataaataaataaatagactaatgtaataggtgggtatctactacagtagaatgagacttacttctcctacagaaagccttccctaaatccccagattggtctaaaatgttctcctcaaaccatgcatgtaatcactattgcacttcagc

SEQ ID NO: 719333 - DNA, 611 bp, Homo sapiens
aggcaggagaattgcttgaacccgggaggcggaggttgcagtgagccgagatkgcgccactgcactccagcctgggtgacagagcaagagtccatctcaaaaaaaaaaaaaagaaaatgcacgagtcattataattctgtagtgctgacatcttaaaatagactaatgtaggctgggcgcggtggctcacgccaataatcctaacactttgggaggccaaggtggacggatcacaaggtcaagagatccaagaccatcctggccaacatggtgaaaccatgtctctactaaaaatacaaaaattagctgggtgtggtggtgcacgcctgtagtcccagctacttgggaggctcaggcaggagaatcacttgaacccgagaggcagaggatgcagtgagccgggatcgcgccagggcactccagcttggcgacagaacgaaactccatctcaaaaataaataaataaataaataaatagactaatgtaataggtgggtatctactacagtagaatgagacttacttctcctacagaaagccttccctaaatccccagattggtctaaaatgttctcctcaaaccatgcatgtaatcactattgcacttcagc

SEQ ID NO: 719334 - DNA, 611 bp, Homo sapiens
aggcaggagaattgcttgaacccgggaggcggaggttgcagtgagccgagattgygccactgcactccagcctgggtgacagagcaagagtccatctcaaaaaaaaaaaaaagaaaatgcacgagtcattataattctgtagtgctgacatcttaaaatagactaatgtaggctgggcgcggtggctcacgccaataatcctaacactttgggaggccaaggtggacggatcacaaggtcaagagatccaagaccatcctggccaacatggtgaaaccatgtctctactaaaaatacaaaaattagctgggtgtggtggtgcacgcctgtagtcccagctacttgggaggctcaggcaggagaatcacttgaacccgagaggcagaggatgcagtgagccgggatcgcgccagggcactccagcttggcgacagaacgaaactccatctcaaaaataaataaataaataaataaatagactaatgtaataggtgggtatctactacagtagaatgagacttacttctcctacagaaagccttccctaaatccccagattggtctaaaatgttctcctcaaaccatgcatgtaatcactattgcacttcagc

SEQ ID NO: 719335 - DNA, 1645 bp, Homo sapiens
cagaaattattgtcaagtgcttgctatgtgctgggcactgagctagggagttatagctcacagcaaccacgtgacacaatgagcattcttgtctccttttaacggaagaaaaagctgactcttcaactggacaagaaattttctcaaggccacataatgttcagtccgcattcttactttgaatgggttgttatctaatagttcctgttaaaacttttcgaaaaagcaagcaaaaatctcatgcaaatcgttttgtagatgaaaaaataaaatcttaagcccctcgctgagtgagccccattttggccaaggggaccccagagaaaccttaaaaattgagttcccagccatgatgggaaggaaagtcagacactcttcattataccacctcctttttggagtttaggcacaaccacagaccagcattaatgttagaacagggatcctgaggctgacagaacagactctttgtggcagtaagataccaaattataaacaaaacctaaggccatgcaaggcaagtggtaagtcacatctgcagggcattcatcttgctaaacaggtcacattatagctgactgacaccacatctttatcttaatgtaaacattccttcctgctaactccaagtttttagacaaaattttgtcccttaactatttgcagattaaagagcctctgaatccacttatggtttgtaagcccctgatttaagacatcccatgttcttgggaggaactaatgtacaccttccatgtattgatttatgtctttgcctgtaactcctgcctccctgcaatgtatgaaacccagctgtcatctaactgcctaggatataccttctcaggactctttgagactgtttctgtgagctgtatagtcagtcatactggctcagaataagcctctttaaaatactatacaaaatttgtttcttcattaacaatttaaactttacttcttaactacaagtatgaaaaataaagtgaaaaaaggtgatcgaagggagagattgcattgcgttcacgtactagctcttttaaaaaatckttttaatttaaaatatagtatttctttgcagaaaggattgaaagattagtcatagaacatggcaccgttcaaatgaagcctgtttaggaatcaaggttgactgcctccagaatctgttattgtaagattttattttgcctccccaatatgctaactctgtacttcttatctttgttggcttatgtaagtttcttagattccatgagcctcagcttcttcatctgtagaatggagatctttgttgtgaagattaaatcagattgtggctttcaagtgcttagcaaagcacccagcatctactaagccttccataaatagtagttaagagctttgggattttgctcacattgttagcccattcctttccttgctttgatttattccctatcacaattttattgtggatataaagataagattttgtgttaatatctagcatggtatgacataaggaacgctgggatgagggagattagacctcatttcccctctcaggttttttccctaatcactaagctttacctgcgctcaaattcacctgtacggaaaaataatgtaggtataatgagttctgacaacaaatactcaaagttaa

SEQ ID NO: 719336 - DNA, 650 bp, Homo sapiens
aatacagaaatatttgtagatatgtgcgtggagttagaatatacaccgtaaccagtattagctgaaagtagcagtgagtatcccagtagcaatgagcacactagtgccctgaatstggtttctaaacccattatccaataacaggagccaaggctccttcaataaatgattgattctaggattgggcaggaaatatacaagatggacctggagcatcttgtggtgtcagaaaggaggacagtattcaaaagcaaaacaaaaaacaatacgatgatagtggtatgccaaagagacacaggaaccaactgaaattgcttccaatgaccaaagttagaaaactttgagcaacaaaataaagcaatattagtttataacccaaagtgtaaaattaatatcaatgattctatactgatatgaataaatgattgagtaaaaataaatgaacgtgggagaatagacaaatcttccattcagaacctcaaataatttatgtagaaagccatacttagagggctggagccaaactccccacacctcaagggtagcctacacatagtgacttccttctaaagagctcaatatggaaaggggaggggaggaaagagtaacattggaactagacgaattgatgaaataggaacctgacaaat

SEQ ID NO: 719337 - DNA, 1100 bp, Homo sapiens
gacagagcgagactctgtgtcaaaaataaaaaggaaaaaagtaatggtgtgtgggtagaaagaaagaacaaagagaagacttcctttttttgtttttgtttttgttgttgttgttgttttgagatgaaatctcaccctgttgtccaggctggagtgtaatggcacgatcttggctcactgcaacctccgcctcctgggttcaagcgattctcctgcctctgcctcctgagtagttgggactacaggcacgcactaccatgcyggctaatttttgtatttttaatagagacaagatttcgccatgttggccaggctggtctcaaatgcctgacctcaggtgatccacctgccttagcctcccaaagtgttgggattacaggcatgagccactgtacccagcctgacttcctttctttttgtgttaatatgtatatatgccacacaattaattcttgcactatagtatatagttagagctaaaacagaatcctttgagaaacttgcttggaggcccacagttttactcatgtcatttctaagaaaaggatcagtttctttctgttccaattttcccatcgtaaatgaaagaaagggaactttaatttcaaaatcttataaaattttgaccatacccctaccctttctatgcttttagtatcttaagagcttccttcttttttttttttgagacatagtctggttcttttgttcagcctggagagcagtggcgtgatctcagctcactgcaacctccacctcccaggttcaagcaattctcctgcctccgcctcccaagtagctgggactacaggtgaatgccaccacacccagctaatttttgtatttttggtagagatggggtttcaccctgttggccaggctggtcttgaactcttgaccccaggtgatccacccgccttggcctcccaaagtgctgggattacaggcaagagcatccttctttattaaaacaagactgccttgtgcagcttttaaaaacagcctttgatacctttttttagcatgtatgtttatcctcacaggtaattttagaggtgagaaaattgtagctctttatttttttatttttattatttatt

SEQ ID NO: 719338 - DNA, 1100 bp, Homo sapiens
gacagagcgagactctgtgtcaaaaataaaaaggaaaaaagtaatggtgtgtgggtagaaagaaagaacaaagagaagacttcctttttttgtttttgtttttgttgttgttgttgttttgagatgaaatctcaccctgttgtccaggctggagtgtaatggcacgatcttggctcactgcaacctccgcctcctgggttcaagcgattctcctgcctctgcctcctgagtagttgggactacaggcacgcactaccatgccggctaatttttgtatttttaatagagacargatttcgccatgttggccaggctggtctcaaatgcctgacctcaggtgatccacctgccttagcctcccaaagtgttgggattacaggcatgagccactgtacccagcctgacttcctttctttttgtgttaatatgtatatatgccacacaattaattcttgcactatagtatatagttagagctaaaacagaatcctttgagaaacttgcttggaggcccacagttttactcatgtcatttctaagaaaaggatcagtttctttctgttccaattttcccatcgtaaatgaaagaaagggaactttaatttcaaaatcttataaaattttgaccatacccctaccctttctatgcttttagtatcttaagagcttccttcttttttttttttgagacatagtctggttcttttgttcagcctggagagcagtggcgtgatctcagctcactgcaacctccacctcccaggttcaagcaattctcctgcctccgcctcccaagtagctgggactacaggtgaatgccaccacacccagctaatttttgtatttttggtagagatggggtttcaccctgttggccaggctggtcttgaactcttgaccccaggtgatccacccgccttggcctcccaaagtgctgggattacaggcaagagcatccttctttattaaaacaagactgccttgtgcagcttttaaaaacagcctttgatacctttttttagcatgtatgtttatcctcacaggtaattttagaggtgagaaaattgtagctctttatttttttatttttattatttatt

SEQ ID NO: 719339 - DNA, 1091 bp, Homo sapiens
gaggataattcataggaaaaagttgaagcatattgccatcraagcctttaatgtggggtcttctttctgtttcaatccctctccccgcccccggcaataaatcctttcttatctatcctaggcaataagatgtatttgaaaacaaaattactccagatcatctttactgccttgaagactaatacctttctttcatatgaatttgctcagtcagcagattttgtatctctgatggaagtaatcattttttcattgtattagtcttggtaaaatataaaatattaacatatagtatatttcatatatgtctttccatgaaatattttgtgataatgcagggataatattttgatatttttgtggaggtgggatctccatatgtttttcaggttggtcttgaactactaggctcaagcaatcctcctgcctcagcctcccagagtgttgggattacaggcgtgagccactgcgcccagccttaagtaactattttatttactacttgtaccttgcacgtaaatggttaaatttaatgtattaaatttttatttcataacatacctattctgttattaagcttgcaatacatatttggttttttcctttaaaatatggggaaatgtggaaaacaatgatctccaacattataatgttagactaatatttttagataggccggacacagtggctcacgcctgtaatcccagcactttgggaggccgaggcgggcagatcacaaggtcaggagatcgagaccatcctggctaacacggtgaaaccccgtctctactaaaaaatagaaaaaattagccggatgtggtggcaggcgcctgtagtcccagctactcaggaggctgaggcaggagaatggcgtgaacctgggaggcggagcttgcagtgagccaaggttgtgccattgcactccagcctgggcgacagagcgagactcttgtctcacaaaaaaaaaaaaaaaaaaaaaaaatttagagaaagatacaaattaagtcctatttcaacatatttccataaagggaaaaatgaacatttctgtaagcatggaatacaagtttttttgcatataatttttaaat

SEQ ID NO: 719340 - DNA, 1191 bp, Homo sapiens
  misc_feature 391: n = A,T,C or G
gtgcatcaccccacccagctcatttatttatttatttatttttacttttcatagagatgaggtgttacagtattgcccaggctggtattgaactcccaggctcaagtggtcctccccacttgagcctcccaaagtgctggggttacagatgtgagctactgcacccagccctactgttgatggcctctccccaacttgattttaagttctctaagggcaggaacctcatctgtctcattttctaccttatactcactacctggcaccttgggggaccctaataaatatctggtgagggatgttccttgtcaccctgtttataataccaagagayggaaaacaacctaaatgtccatgaaaggagaattattaaatatatcatagcatggcntttacaatggaatactatacacccattaaaaatgaacagggctggcacagtagctcacgcttgtaatcccagtacttggaaggccgaggcaggaggatcacttgaggccaggattttgaaacagcctgggcaacacaatgagaccttatctctacaaaaaaatagaaaaaattagccaggcatggtggtgcatgcctatagtccccagctacccaggaggctgaggcaggaggaagatttaaaaaatgaacaaagtagatggatgtgcactgatatagaacaatctccaaagtgtacagctaagtgaaaaaaagctaggtgtggaatggaatggtatgtatagtatgctattctttgtgtttaaaaaagtaggcattttcaaagacaaaagctccagaatatacataggattacaaaaatactcagcaaggtaaaactcacagttccacaaccagtcaaaaaaaaaaagtatatgtacattttggcttgcttatccataggagattagctatctctacagtgggaacctgcatgtctacatgaggtggaaagggaacttttcactctataccttctgtcttctgaatgtttactatgttcacagcttagctattcaaataatacataatctttaataagtttttgaatgaatgaatggagctggaaaaagaagcccttttcatgctctctatacaaaaatggctaagtcccgtccagcttgggcaatacagtgagacccttctctgcaaaatacaaaataaaaaaactagccaggtgtgggggtgtagtcccagctacta

SEQ ID NO: 719341 - DNA, 1800 bp, Homo sapiens
gcagctctcagatggatgtgtatgtctgactgcacttgtcagaaacccaggtccttgccttccacttcctataccaaagccacgtgccagtgtgcttcttgctgagcacaagccagccactattttcttaatgacaagtgtctaagaattacatataaaaaacaatctgaaagcacattttcaaaagggtagtcagcatttttttttttttttttttgcatttcacgtcactaatttggttacttcttaaaaataatattaaggttccttaaaaaaataacttatctttaaagccctttctctcttgccctctttgatatttaaggtatacaggatggtgaggggtgtgccaggacagtaaggcagggggctacagtgggcagagtagctgggggagtcaggcagacaagggtttcagtcctgcttctacagggcaagctatttatcctctctgaaggtttctgtacctgagaaatgggcacttccatgcccacctctcaaggatactgtgaggagccttgcccagagcctggtcatggtaggagcatgtcagttcatccgcctaaagaaacagactccagggccttaggctggctcaaggggcagaggaaaagacaatggcaataagaccctctggagcttaaaccaaaccactgatgccagggagccagccagccacccttccctgctgcagtgtgtgacgggacacacagatgcccctgcgcccggctcctctctatggaggtttaagcatctcttgagcagttacacatcacttgccccttcctctcaccttcccccatctgtgggatattggtgcaggattgtggcatctgtgcacgtgaatcacacaccccaggtgcaggggctgacatggagcactgtgtctgggcggagagcctcggcgtgccaggtgtgcatccaggcctcttctgctatcaggtgtttcccctcggcctaggcgggacccttctgcagctaggaaccccgtgcaggagtgcagctggcctctcccttcctcactgggtcacagacatgctttactcatgtccccttagagcctcatgctctggaggtgccttccccacccccaaacgcctcctggaaactgtggagactgtgtgacctcaaccttgtgggtgcctcctttttttctcagttagaacaacaaaataaaacactcttaatccactccatacggaagaaacccatgaacaagaagcattgttggaactcacaggacaccgttttctcgatgttgggattcttcccaagaatgttttcaggacagaacacttcattttgtggagctgaagtcttctggctccgatagaggagatgatttgtcagctgtgacgtcagctgaaggcagtggaagtgtatgcctgggaatagcctccctacatggctcttcccacagctgcgggttytgggggtgagcaggcatgctgcggaaggagccaagaagcctagtctgtgggctcaggtgagctgcaggagctcagaactctccagttaggtgcgaggccgtgagccacaaagggccattggttctacagagagagaggcccaagatttcaaaaaggcgacactttgaaattttaggttagcctccactgataaaaacagttctccttttatttatctcatggataagtgcaatgtaactactaaaatgcacctcccctgactaggactcttgctacagcagggtgatggtgagtggtggagaccatgggacacaggagttcttgcttaaaaccatcagggccaaggattatgtaagaatagggattatat

SEQ ID NO: 719342 - DNA, 1226 bp, Homo sapiens
gttggaggatggtgacaaatgagatttagatgctgacaacctgtttaatgtcaggaggaaattttacttacgtaaatgtcataaaatgttggtatttacctattcatcatttacttagaattaggctatgcattggcacactgaaaccacaaaaacaaaatctagttgtttttgatagccacaggtgttacatagcatttctatttttattgaaacatctggattctgaataaacttttagaagaaaaattmttttctgctcaattaagatcacttaaatttctcctattaattaaacattaaaatttccctatagtataactaattaattcttgaaatatgagaatcaccatgaagaaaacggtttatggtaatcatttgcataaattcaagcctatgccatggtgattaagacaggagatacatacaaattaaacaccagtgggaggagacaaaatgtgaattttcttataacttcagcacaaaatgacagaccctctactgattttactttttcatcttaactatcaaaattcttaacttacatgtgtgaatttgatgaaaagtttaaaatttgtcaattctatagaagtaatgaactgaattttcctcaaagaacactatatttaatatgaagtcaagccctatattttttcacaattcaagacactttaaaaaatcacacattaagtttttacaatttttacaaagttcttttattattgttttcaaataccaaggtaaggaagttaaggaactggttaaaatctcttttagtgggtatctttattggaacatgagcctgacacttgaaatcagtgctaaagcagattacccaggcactctacacaggagccatttaggacaaataaatcatattttgtgcctctctctaccttaaaagcttgtgttttatagaaagagtcagcctaacaccaactttatgggtggttttcaaggggatgaatatattacaaagaggattgagtggaagatggaggtttattccacctgctgtgacctgagaattgtccccctaattgttcacctgccagcacaggtccacgaaagatgttgatgagactaccagtttgagctgaccaactgagtgaagacatctggctattattacaaagcctagaaagtggttgctgttggtgacttatgtgatttatcgtaggcaatctgagtacagattggaggcatagatgtagaaaaatgttaat

SEQ ID NO: 719343 - DNA, 3669 bp, Homo sapiens
tgacaatccagtcccaaaaaacagcaatgttcactgtagctccaggtgctcatttttgtctgttgctttaaaggtggctgaagataaagaaatatataraatccaccaaacaaaaaggaagaggagaaaggtagtgcaaaatcagtgaaaaggatagatacgagattctcttaaagatgaatttgttgtaagaatcacatttatgggtgaagccagtaaaagcccacaaggggaatatgaaggaagaacattgataataaactcattaggaatgtctccaaagaatgtctgtgtagtaattcaaattctaagaatgcattggtatgatattagcttcagatatggggcaatatgtagggcatttggggagttaccaagggaaattaggagacagctattggaaagaaattgctgcaggtaaaccaaagattgagaagatgcaaatgcagtcttgaaatgaaaagttagcaatgaaatctattgtacctcatatgcttcagtctctgtaaaacagttttttttttttttatctcaatacctaaatcaagtttcttatctaggggactcataactctgtgctagtcacaagtatttggagaatagctccaaattgcaagcatccacactaatgtttccgtttatttatgagagtgttaactgcatagaggagaataaagctagagggaaataagcatattaactaatacccaaatatggctgccatttttctagtccctttgaacatttttaatggacaaagtataaaatagagaaaaataattccttcgctacagggaaaagcctcaatcttttcagtttgtactttctcttaaatctctgcctagtttatgttatctaactttattttgtcaacattcatttttctaatttttgttcccatgttcacatctgttttctttaattctttcttggagattctattccacctaacctccaagttttcttgtctctctgcctttcttctttgtttttctcagtgaaacttcctttccaaacaagaaatgtttgttttatttgtgaatatcggtaaaaaacaaatagaaaaagttaacagtggaaatgcaattccagggcaatatatttttctcatgttaattggctttacttgatattcttctgttttcactgggatcttagttgcacctgctctaaaatatggtaaccattcccataacattttcttcaaatcaagctacttgaggcaacttgccagaaacttaccttaaaatgtttggattaaaatgcatatggaaataactacctgcccactctcactttcatgcccaccacaacacaaagtttatttgtgttagtagtcataactaatgtttatattgtgtcttctctccaattagccaagaaccgtgagtaattcatacacattctccttttttttaggactttgatagacagaattctaaagatgtgtttctaagattgccatcccctagtgatttgaacaaacatgaatctaggtactacagaaaagaggctttggaaataaaattaaggttaataattacctgaccttaaaaaaaggaagattatcctggattattctgctagatccagtgcaatcacataggacttaaaagcagaagagaaaggttgtagagtctgtcagagagatgtggaagaatagacaaacagagaagatatgaggtagagggggacgtcatggagattcaaaatttgaaaaggattccactcactgttgctggctttgaagataggggaaaggggtcaaggactaaggaatgcaggtgacttctggaagctgcaaatgacccctgagcaagagacagcaaggatatgggaaattccatcttacaaccacaagtaactgaattctaacaacaatatgaatgagcttataaggggattcatccccagagctcctggaaaataacatcttgattttggcctatgaaatgtggagcagggagccagctatggcacattgtgcctgaactcctgacttatagaaaattgtgaaataataaattcatgctgttttaattatgtttgtggtaatttgttatgacaaagatagaatgggataagttaggcatgcagaacattttaactgaacattcattatatccaagtatctgtgctagctactgtaaggatagggcaacaaaagacaaagataatatttgcccttcctgtgcctttattctagtgggaaggactgtatatatatgtatgtacatacacatacacatatacatttatattacctagggaggatgtgtttggtgagcattaagaagagaaaagggtatcaaacagaataacttcagttactgtgcttcatgaatggctagtccgggttcttggagactgccttttatactttgtacttttgtccaaaattgtgatacttgtaatgaagtgattgttatttccaaggcattttaattaattttttaaagctatgcacatcttttaaagtgtttatcatagatcagaagatggtaagctcttttttacttcatgccacactgaggctctcatgtcaagtagaatattaaaatgctgaatgtagctctctagctctcttcagcgcatttaggtcacacttaggctgttaagttctaaattattttcagctggtaatattctatcctttaatttctggaataaaccaaatcaaaatcattttttctagataaaatttatgtgtgtatctatctgtatgtgtttgtgtgtgtatatatatatatacacacacacacatacattaaatgagtaggtgtgtatatatacatgtttactcatttaatttaatatttctgaaaatttttattttttgattgaaatttttctcgaatagagacaaaagtcagataatttctataacttctttccactccctccaccactccaaatgaaaaaaataaaagaaataaggtagtttctatgctttcacaaagaagatgtataaattctgcccttagttttttcctagagaagagggactcacaggttagttgcaaatattttgggtgggggaggacaggaaaagagaaaataatggtaattattgtggaggtgaggaagaggtgattgtgaatattcttctaccctcacttctacctgtttcattctgggtacaacctagtttacatgaccaccaacctgaaaaacattcgattattcaaagtcttttgaattacttgtagggcctttgagaatatcccatagtctcttcactttttattctacttgaaaacaaggagaaaaagaaacagactttgagatattgcaagcccatattgcaaacatttttaactatacaccaggaactttgcattctgtgaacctgttcctcatgtacccattgtatgtaaattctaatctatataaacgctgaaaaaataacctctgatgaaatcataaaacaaaaaataaaaacataagaagtacaccatacaaaacacagggaaactattgaaaaagtgttctaaattacgttttgttttcatcctaaaacagaataatctcttgtggtctgtgccaatcatttactaatagtttcatggatgtgtgtgtcttatccctaagattactagtcaacttcttgtgggcattatcttctggtttgtacatcattgtacctgacacattttggatatcaaaggg

SEQ ID NO: 719344 - DNA, 3669 bp, Homo sapiens
tgacaatccagtcccaaaaaacagcaatgttcactgtagctccaggtgctcatttttgtctgttgctttaaaggtggctgaagataaagaaatatataaaatccaccaaacaaaaaggaagaggagaaaggtagtgcaaaatcagtgaaaaggatagatacgagattctcttaaagatgaatttgttgtaagaatcacatttatgggtgaagccagtaaaagcccacaaggggaatatgaaggaagaacattgataataaactcattaggaatgtctccaaagaatgtctgtgtagyaattcaaattctaagaatgcattggtatgatattagcttcagatatggggcaatatgtagggcatttggggagttaccaagggaaattaggagacagctattggaaagaaattgctgcaggtaaaccaaagattgagaagatgcaaatgcagtcttgaaatgaaaagttagcaatgaaatctattgtacctcatatgcttcagtctctgtaaaacagttttttttttttttatctcaatacctaaatcaagtttcttatctaggggactcataactctgtgctagtcacaagtatttggagaatagctccaaattgcaagcatccacactaatgtttccgtttatttatgagagtgttaactgcatagaggagaataaagctagagggaaataagcatattaactaatacccaaatatggctgccatttttctagtccctttgaacatttttaatggacaaagtataaaatagagaaaaataattccttcgctacagggaaaagcctcaatcttttcagtttgtactttctcttaaatctctgcctagtttatgttatctaactttattttgtcaacattcatttttctaatttttgttcccatgttcacatctgttttctttaattctttcttggagattctattccacctaacctccaagttttcttgtctctctgcctttcttctttgtttttctcagtgaaacttcctttccaaacaagaaatgtttgttttatttgtgaatatcggtaaaaaacaaatagaaaaagttaacagtggaaatgcaattccagggcaatatatttttctcatgttaattggctttacttgatattcttctgttttcactgggatcttagttgcacctgctctaaaatatggtaaccattcccataacattttcttcaaatcaagctacttgaggcaacttgccagaaacttaccttaaaatgtttggattaaaatgcatatggaaataactacctgcccactctcactttcatgcccaccacaacacaaagtttatttgtgttagtagtcataactaatgtttatattgtgtcttctctccaattagccaagaaccgtgagtaattcatacacattctccttttttttaggactttgatagacagaattctaaagatgtgtttctaagattgccatcccctagtgatttgaacaaacatgaatctaggtactacagaaaagaggctttggaaataaaattaaggttaataattacctgaccttaaaaaaaggaagattatcctggattattctgctagatccagtgcaatcacataggacttaaaagcagaagagaaaggttgtagagtctgtcagagagatgtggaagaatagacaaacagagaagatatgaggtagagggggacgtcatggagattcaaaatttgaaaaggattccactcactgttgctggctttgaagataggggaaaggggtcaaggactaaggaatgcaggtgacttctggaagctgcaaatgacccctgagcaagagacagcaaggatatgggaaattccatcttacaaccacaagtaactgaattctaacaacaatatgaatgagcttataaggggattcatccccagagctcctggaaaataacatcttgattttggcctatgaaatgtggagcagggagccagctatggcacattgtgcctgaactcctgacttatagaaaattgtgaaataataaattcatgctgttttaattatgtttgtggtaatttgttatgacaaagatagaatgggataagttaggcatgcagaacattttaactgaacattcattatatccaagtatctgtgctagctactgtaaggatagggcaacaaaagacaaagataatatttgcccttcctgtgcctttattctagtgggaaggactgtatatatatgtatgtacatacacatacacatatacatttatattacctagggaggatgtgtttggtgagcattaagaagagaaaagggtatcaaacagaataacttcagttactgtgcttcatgaatggctagtccgggttcttggagactgccttttatactttgtacttttgtccaaaattgtgatacttgtaatgaagtgattgttatttccaaggcattttaattaattttttaaagctatgcacatcttttaaagtgtttatcatagatcagaagatggtaagctcttttttacttcatgccacactgaggctctcatgtcaagtagaatattaaaatgctgaatgtagctctctagctctcttcagcgcatttaggtcacacttaggctgttaagttctaaattattttcagctggtaatattctatcctttaatttctggaataaaccaaatcaaaatcattttttctagataaaatttatgtgtgtatctatctgtatgtgtttgtgtgtgtatatatatatatacacacacacacatacattaaatgagtaggtgtgtatatatacatgtttactcatttaatttaatatttctgaaaatttttattttttgattgaaatttttctcgaatagagacaaaagtcagataatttctataacttctttccactccctccaccactccaaatgaaaaaaataaaagaaataaggtagtttctatgctttcacaaagaagatgtataaattctgcccttagttttttcctagagaagagggactcacaggttagttgcaaatattttgggtgggggaggacaggaaaagagaaaataatggtaattattgtggaggtgaggaagaggtgattgtgaatattcttctaccctcacttctacctgtttcattctgggtacaacctagtttacatgaccaccaacctgaaaaacattcgattattcaaagtcttttgaattacttgtagggcctttgagaatatcccatagtctcttcactttttattctacttgaaaacaaggagaaaaagaaacagactttgagatattgcaagcccatattgcaaacatttttaactatacaccaggaactttgcattctgtgaacctgttcctcatgtacccattgtatgtaaattctaatctatataaacgctgaaaaaataacctctgatgaaatcataaaacaaaaaataaaaacataagaagtacaccatacaaaacacagggaaactattgaaaaagtgttctaaattacgttttgttttcatcctaaaacagaataatctcttgtggtctgtgccaatcatttactaatagtttcatggatgtgtgtgtcttatccctaagattactagtcaacttcttgtgggcattatcttctggtttgtacatcattgtacctgacacattttggatatcaaaggg

SEQ ID NO: 719345 - DNA, 3669 bp, Homo sapiens
tgacaatccagtcccaaaaaacagcaatgttcactgtagctccaggtgctcatttttgtctgttgctttaaaggtggctgaagataaagaaatatataaaatccaccaaacaaaaaggaagaggagaaaggtagtgcaaaatcagtgaaaaggatagatacgagattctcttaaagatgaatttgttgtaagaatcacatttatgggtgaagccagtaaaagcccacaaggggaatatgaaggaagaacattgataataaactcattaggaatgtctccaaagaatgtctgtgtagtaattcaaattctaagaatgcattggtatgatattagcttcagatatggggcaatatgtagggyatttggggagttaccaagggaaattaggagacagctattggaaagaaattgctgcaggtaaaccaaagattgagaagatgcaaatgcagtcttgaaatgaaaagttagcaatgaaatctattgtacctcatatgcttcagtctctgtaaaacagttttttttttttttatctcaatacctaaatcaagtttcttatctaggggactcataactctgtgctagtcacaagtatttggagaatagctccaaattgcaagcatccacactaatgtttccgtttatttatgagagtgttaactgcatagaggagaataaagctagagggaaataagcatattaactaatacccaaatatggctgccatttttctagtccctttgaacatttttaatggacaaagtataaaatagagaaaaataattccttcgctacagggaaaagcctcaatcttttcagtttgtactttctcttaaatctctgcctagtttatgttatctaactttattttgtcaacattcatttttctaatttttgttcccatgttcacatctgttttctttaattctttcttggagattctattccacctaacctccaagttttcttgtctctctgcctttcttctttgtttttctcagtgaaacttcctttccaaacaagaaatgtttgttttatttgtgaatatcggtaaaaaacaaatagaaaaagttaacagtggaaatgcaattccagggcaatatatttttctcatgttaattggctttacttgatattcttctgttttcactgggatcttagttgcacctgctctaaaatatggtaaccattcccataacattttcttcaaatcaagctacttgaggcaacttgccagaaacttaccttaaaatgtttggattaaaatgcatatggaaataactacctgcccactctcactttcatgcccaccacaacacaaagtttatttgtgttagtagtcataactaatgtttatattgtgtcttctctccaattagccaagaaccgtgagtaattcatacacattctccttttttttaggactttgatagacagaattctaaagatgtgtttctaagattgccatcccctagtgatttgaacaaacatgaatctaggtactacagaaaagaggctttggaaataaaattaaggttaataattacctgaccttaaaaaaaggaagattatcctggattattctgctagatccagtgcaatcacataggacttaaaagcagaagagaaaggttgtagagtctgtcagagagatgtggaagaatagacaaacagagaagatatgaggtagagggggacgtcatggagattcaaaatttgaaaaggattccactcactgttgctggctttgaagataggggaaaggggtcaaggactaaggaatgcaggtgacttctggaagctgcaaatgacccctgagcaagagacagcaaggatatgggaaattccatcttacaaccacaagtaactgaattctaacaacaatatgaatgagcttataaggggattcatccccagagctcctggaaaataacatcttgattttggcctatgaaatgtggagcagggagccagctatggcacattgtgcctgaactcctgacttatagaaaattgtgaaataataaattcatgctgttttaattatgtttgtggtaatttgttatgacaaagatagaatgggataagttaggcatgcagaacattttaactgaacattcattatatccaagtatctgtgctagctactgtaaggatagggcaacaaaagacaaagataatatttgcccttcctgtgcctttattctagtgggaaggactgtatatatatgtatgtacatacacatacacatatacatttatattacctagggaggatgtgtttggtgagcattaagaagagaaaagggtatcaaacagaataacttcagttactgtgcttcatgaatggctagtccgggttcttggagactgccttttatactttgtacttttgtccaaaattgtgatacttgtaatgaagtgattgttatttccaaggcattttaattaattttttaaagctatgcacatcttttaaagtgtttatcatagatcagaagatggtaagctcttttttacttcatgccacactgaggctctcatgtcaagtagaatattaaaatgctgaatgtagctctctagctctcttcagcgcatttaggtcacacttaggctgttaagttctaaattattttcagctggtaatattctatcctttaatttctggaataaaccaaatcaaaatcattttttctagataaaatttatgtgtgtatctatctgtatgtgtttgtgtgtgtatatatatatatacacacacacacatacattaaatgagtaggtgtgtatatatacatgtttactcatttaatttaatatttctgaaaatttttattttttgattgaaatttttctcgaatagagacaaaagtcagataatttctataacttctttccactccctccaccactccaaatgaaaaaaataaaagaaataaggtagtttctatgctttcacaaagaagatgtataaattctgcccttagttttttcctagagaagagggactcacaggttagttgcaaatattttgggtgggggaggacaggaaaagagaaaataatggtaattattgtggaggtgaggaagaggtgattgtgaatattcttctaccctcacttctacctgtttcattctgggtacaacctagtttacatgaccaccaacctgaaaaacattcgattattcaaagtcttttgaattacttgtagggcctttgagaatatcccatagtctcttcactttttattctacttgaaaacaaggagaaaaagaaacagactttgagatattgcaagcccatattgcaaacatttttaactatacaccaggaactttgcattctgtgaacctgttcctcatgtacccattgtatgtaaattctaatctatataaacgctgaaaaaataacctctgatgaaatcataaaacaaaaaataaaaacataagaagtacaccatacaaaacacagggaaactattgaaaaagtgttctaaattacgttttgttttcatcctaaaacagaataatctcttgtggtctgtgccaatcatttactaatagtttcatggatgtgtgtgtcttatccctaagattactagtcaacttcttgtgggcattatcttctggtttgtacatcattgtacctgacacattttggatatcaaaggg

SEQ ID NO: 719346 - DNA, 757 bp, Homo sapiens
tcaggatatttcatttcttatttacctccatgtttgcttcagtctcttaatctctttctctctggtcttccttgcaaatatatatccaatttttatgccaagaatttcagccttttcttcatttatgcacactctgcttctagacaatgcaataagcattctcttcattctcaaagcttcatcaaagtgcttggttaaataaaaaagggtgactgctttagatattaccataataaggctgtgtaaaaaacaatctcaaaacttagttgcaaaaaatagacaaataaattagcattttatactcctgcatctgaagttcagttgatcctggttgtgcttggctgggcttgattggatttcacaacaaactacaagttgggtttatatcatctccatgtatctttattccttcttaaaacccaaggctaccagtcatagccttcacaggtgaaaggcaagagcataagaatgcaagctcaagtgcaaaaaaaaaaaaattatattttttctggtgtcacattcattaacattttatggccaragccagtcatgagatcaaacccaaagcaagagttgggtaatacagtgcttccaccatgacaggaatgtggatatacaccattactgcagaagagttaataattaagagtaatgattcaatttttcacacttttttttgttggtcaaaattacccatgggaaaaatgtactcattcttacccaaacacccctaaaagattcattcaataatggcagc

SEQ ID NO: 719347 - DNA, 757 bp, Homo sapiens
tcaggatatttcatttcttatttacctccatgtttgcttcagtctcttaatctctttctctctggtcttccttgcaaatatatatccaatttttatgccaagaatttcagccttttcttcatttatgcacactctgcttctagacaatgcaataagcattctcttcattctcaaagcttcatcaaagtgcttggttaaataaaaaagggtgactgctttagatattaccataataaggctgtgtaaaaaacaatctcaaaacttagttgcaaaaaatagacaaataaattagcattttatactcctgcatctgaagttcagttgatcctggttgtgcttggctgggcttgattggatttcacaacaaactacaagttgggtttatatcatctccatgtatctttattccttcttaaaacccaaggctaccagtcatagccttcacaggtgaaaggcaagagcataagaatgcaagctcaagtgcaaaaaaaaaaaaattatattttttctggtgtcacattcattaacattttatggccaaagccagtcatgagatcaaacccaaagcaagagttgggtaatacagtgcttccaccatgacaggaatgtggatatacacyattactgcagaagagttaataattaagagtaatgattcaatttttcacacttttttttgttggtcaaaattacccatgggaaaaatgtactcattcttacccaaacacccctaaaagattcattcaataatggcagc

SEQ ID NO: 719348 - DNA, 2349 bp, Homo sapiens
ttttattgtaaccaatttcatttactaagtaaagcatataattatgaaatgttatcaattcaaatgagtatttttgataatactccataagattaagtcagtcaacaatctattataaagtgtttatttttaaatttttatctttttattatatacactgaaaagaatcctgaacttgcaatcagaggctagaattcaagaatgtgtttgacatggacagcagtgccactttggctgtgactcagcatctctgaccctcccagtgtcttcaaattacaaaacattgtgatggatttccactttttcacaggattactgtaaaaacctgatacaatattgaaactgtgttaagattgtgtgattgggatctggttttgccatagtcatctgtaattgctaatggcaaatcacaatttttttaaaagtttttaaaatgtaacgagtgaatagaaaacatttcctggcatgtcacccaaaatgacaaatacatgacacagtgatggtataaagtgagacataaatatgattcagttgaattactcacataccaccaaacagagaaatgggttccattgataaatctgtggttcagatctaacctatatggtttaggttataaaaattattgcctttaaattactaatattttgaaagctagagaattaaccatcagaaaatctaatgtgtagatacaaatgtggcagaaagaagagtcacacaatatctacctatccaagattatgtagctcaaactaattgctagtatttcatttctttaagatctttagaytttgcagtatttggttgaaaatatgactacaatgtagtataataacacagaatacagacactgatgatagtagataaaattgacaacaaattgaaatacttggacaaataagagatgcactcaaataccttggcaacaagtataattacgatattaaaattatgtaccaagccttaatttttaacaggcaagtatgtattaataaacaggcagtctatgtaatatatgtatatagtctaagaacacggaaaacaataactacgtaaagcactagaataaagccataattaccaactaatgagggtaaatatttaataatacatatatgtaatgcatcaaaacttactcatgtagcaactcaacagtataaaaatatttgacaacgaaagcagacaagaatatttgtgagcaatagcagttgtcccaagtactgagattactgctcataaactattattatttgtcataattctgattatgattcatattaatactgcttcagcttctatcactttgtcctgtccctggcttgttttcttagacctacatttagaggcagtattctatccagttcccatttttctgttctagatagacaaggccgcataccctgaacctcttgatcactttactttttgccttttgccttaaacctggtaaacatggtaaagtaataccctagttctttgcttagcctcaaattaagacttcaggttaaccagttcaagcctgttgccagaaacccacccaggtaatgccctggactccaataaaggcttcagcccaaaagtccctccctcttgctctctacctaataatcgagtgcacatatactggacacctccctctttctgattggtcctgtgaggcatgttgccctcttctctgggatctgtgtataacaaacttaatccttttgacactccaggctgagtgcctttcactgtgccacacctaactataccaaccttaacttaaatatttcactcaacaaatcacattaaattttttgttatacctcattagctggggtcctatcatattttgaagatagggcaaagtacattgcaaaacctaattatttcaattttaaaaaggctattctaataattgagtactgaagtgtacttaaaacaaaataataatacctgctttcttattttgccttgctttctaacagcttcctctgaattatataacaaaataatattacctttatcactagcataccaggaatttaggtgagattttttcattgagtcttaagttttgtttgcttttgtgttaactataacatattacccccgaccctaattaaaactgatactggagtaaaaaataacagaacgcgagagaagagaaagtcaaaaccaggtctaaaatattcacttgatccttaaataacatgagcttgaattgcacaggtctacttatacgtggatttttttcaaccaaacagatagaaatatagtactcatggaatgcaaaacttgcatttatggagggttgactttttgtatgtacatatgtgggttccacagggccaactgagggacttg

SEQ ID NO: 719349 - DNA, 876 bp, Homo sapiens
tgccaccttggctgatccaacatgagtaggattggataaaaattctctggagacattttctttaaatattctaactcttaaacatatctctatgattttcaccagacgtacagagcagcaatcacagtgggcacaaaactcaccagtgtcccaagtaggggagcatcagacagggcaacaaacccagatgagtcacctkcctcgaggggctgaatgtaaagctgcttcccagcccattcttcaggacacagtcagcccacactgaaactggaagagcatcactcaggaattctatcagaagcttccaggcaggacccactcactaccagagtgcacaactgtctacatacccccttggctgcaattattaataagccccactcctgtcagaggcttctggccaaagtagagagatggcttccccattctaaccccatctcggtctcacactgaaaccctacatcctctggagcagctttgcaaatcactaatggtttctttttccttgggaaaatagagaagcaaagaagtgtggcagccagctgactgacagaaatccacaacctggcagccagccccagcctggaaaacaaaagcgtctttggttcacctgtcaagactgtgctcattcctcgggcctcttcccatggagctcatctgattccttcagccaggtgtgatgaagcagcaagtgctgacatcatcacggagggtgagcggctggctggctgggaagccgccaggggaaactggcataagatgctgctctcagcagtggctgcagcagcctgggagacgtcggatttctctccttctaaacgggcagttaggaaaaggaaagagttaggatcaggtccctgggagggtgaggaaaat

SEQ ID NO: 719350 - DNA, 876 bp, Homo sapiens
tgccaccttggctgatccaacatgagtaggattggataaaaattctctggagacattttctttaaatattctaactcttaaacatatctctatgattttcaccagacgtacagagcagcaatcacagtgggcacaaaactcaccagtgtcccaagtaggggagcatcagacagggcaacaaacccagatgagtcaccttcctcgaggggctgaatgtaaagctgcttcccagcccattcttcaggacacagtcagcccacactgaaactggaagagcatcactcaggaattctatcagaagcttccaggcaggacccactcactaccagagtgcacaactgtctacatacccccttggctgcaattattaataagccccactcctgtcagaggcttctggccaaagtagagagatggcttccccattctaaccccatctcggtctcacactgaaaccctacatcctctggagcagctttgcaaatcactaatggtttctttttcyttgggaaaatagagaagcaaagaagtgtggcagccagctgactgacagaaatccacaacctggcagccagccccagcctggaaaacaaaagcgtctttggttcacctgtcaagactgtgctcattcctcgggcctcttcccatggagctcatctgattccttcagccaggtgtgatgaagcagcaagtgctgacatcatcacggagggtgagcggctggctggctgggaagccgccaggggaaactggcataagatgctgctctcagcagtggctgcagcagcctgggagacgtcggatttctctccttctaaacgggcagttaggaaaaggaaagagttaggatcaggtccctgggagggtgaggaaaat

SEQ ID NO: 719351 - DNA, 876 bp, Homo sapiens
tgccaccttggctgatccaacatgagtaggattggataaaaattctctggagacattttctttaaatattctaactcttaaacatatctctatgattttcaccagacgtacagagcagcaatcacagtgggcacaaaactcaccagtgtcccaagtaggggagcatcagacagggcaacaaacccagatgagtcaccttcctcgaggggctgaatgtaaagctgcttcccagcccattcttcaggacacagtcagcccacactgaaactggaagagcatcactcaggaattctatcagaagcttccaggcaggacccactcactaccagagtgcacaactgtctacatacccccttggctgcaattattaataagccccactcctgtcagaggcttctggccaaagtagagagatggcttccccattctaaccccatctcggtctcacactgaaaccctacatcctctggagcagctttgcaaatcactaatggtttctttttccttgggaaaatagagaagcaaagaagtgtggcagccagctgactgacagaaatccacaacctggcagccagccccagcctggaaaacaaaagcgtctttggttcacctgtcaagactgtgctcattcctcgggcctcttcccatggagctcatctgattccttcagccaggtgtgatgaagcagcaagtgctgacatcatcacggagggtgagcggctggctggctgggaagccgccaggggaaactggcataagatgcwgctctcagcagtggctgcagcagcctgggagacgtcggatttctctccttctaaacgggcagttaggaaaaggaaagagttaggatcaggtccctgggagggtgaggaaaat

SEQ ID NO: 719352 - DNA, 1958 bp, Homo sapiens
atgacatgaaagccaattattgtgaattcaggtggttattctgaatgtacttaggtacatgacagttgaggtaaacattttggccccagacagctccattaattaattactactcaggattctaaagcttgcttagctacttcaagagctgcgtggaatacttataagatacatactcaaggcaagtccagacaggcaaaccaggtacttaataacatttttccacatacttgtttgacttttacatattaaagctctgtacaaaatattaaaaatattttacaccaccttccatttttctctatagagaaatgtatatagaaaaatctatagcaacttaaaatgaaaaaaaaaatagtgtgtctgaagagggcagcctttccacaatttcttggaattgactccacttaaatacacattacactgggcagctaatttttttttttcatttaatgcttgtgactgcttttacatgtgctggtcctaaatcttactctccaaaaattaggctcaattctccacttcatgtccctcctccacgttttttttttttccagtttcaatttatgtaggtggcaacaatattcttccaaacagaagtctgtatttgaaataattaactttcccccaacttactaatgagtattttaagggtatacagttgcttttttagatgaagttttatagaagttgttccttcttttaataattataaaatctttagttcctttgggggaaaaattgacatacttttcaaacttttctacaccatttatgcccacaaggattagctatatgatcattttcaagaaaggtcatatatgtgctctctctgacatactccattcagtcatagagcaagactttaaacgttttctacctgtaagcacacccaccttgagaagcatgcacactgagggcagtttttacctgacagttagcatggaggatgattcattgctggagctgtggctatgctctcctcggtacctacggccaaatggtcaagttggagccttgttacaactgccagtggttgggtagctcattgcaacygaaggggaatccgttgctacttttgcagaggagaagttggtcctcccatttagttttatgctgaaggtaaagaggtgagaggaaatcccaggatgacagtggagggctgcgcagtgtctctggacatgttcttataggggaaaacttgggagtttcatgtctctctgtgattagggatagaaagaaggatctctaattttttgaggtgttaattaaaacacacttaaaattcagcaaatgcctctaccactttcaatctttgaaaagctttgtggattatagtgcattggtagcatttaagtccagggaggtctgactctcctgagaattcatatggctttgaggaaaatgtgattgggttggaatcctggttaggggcagctacattcccagaaactgtgttctagctagcctgtggccagatccttcccatttaatattgtcctctgtatgacagcaatattatgaaaacaccttgataatatataatgtgacatatgaatatttaaagactcatgtattcctggaaagtatgactttagttcaaccttctcaatttatagatgagtagaaatgacttgattaatgccacataattagtctcagatctaaaagaaacaaaacgttcccagatttcttttcatataccttatatggtaggcagcctccaagatggcctccaatacctgcctcctggtattaataccttggtgtagtcaactcccacattgtaccgggattggttttcttggcaacaattgcctgcaatcatgggtgactaatgaggaaattcaagatttcttttgtttaaaagaactctgacaatgcctgacaccactacatgtgttttacaagtttccaaaacacttgctagaaaatcttcaatccacaaatccagccag

SEQ ID NO: 719353 - DNA, 3214 bp, Homo sapiens
tgtstgtgtgtgtgtgtgtgtgtgtgtgcattatattcttaggtaatgggtaggaaaaaaaggagagctatgcctgccctcaaagacttcatagaggagaatcatgtatttaaaaagataaattgccatagagtggtttggatgaaataatagaaccttagagattagattgagaaggagacttattggtcagaatattatattagtggagttgtgaaccaaagaaattaactgtggataacttaagcagaaaaagaagttactgagtctacattaggtaactcactgaattacctagaaggtagaaaaatcaggttggcaaaatatgcagaagtaaatgaaaggtagatacccaaaattaaatcttgccaatgaatcagtctgcagaggatgcctttgctattaccattggatatcagtgcaccatcttgaaccctccctactactggcactgaatgcttctcataacccactctggactcaatgcctttgacaggtacatttttttttttttttgagacggagtcttgctctgtcgcccaggctggagtgcagtggtgtgatctcggctcactgcaacttctgcctcccaggttcaagcgattctcctgcctcagactcctgagtagttgggaccacaggcgtgtgccaccatgcccagctaatttttatatccttagtagagacagggtttcaccatgttggctaggctggtcttgaacttctgacctaaggtgatccacctgccttggcctcccaaagtgctgggattacaggcgtgaaccactgtgcctggccaacaggtacatctttttcataaaaggtaggtccatgttttctccatcgttacgaagtaggctgggaaagtatgtctttgtcagtttctataaatggagcaggttctatttcctactaatatttattgtcaatcaattctacaaaggtagaaaggatcttctgaaattggccagccaaaaatacatgttgcatataataaaaggtcatatgttcatctttgctggttttcctgcaactattagtaaatagatgttttattattccatgtttatggaaaaatatatgtaaagctgccattacattctatactaattgatcaaaaggaaatcctctgtgtttgtgcttccatagatgtgcatttgttccctatttcttcctaagccaaggataagacactcacacaagctcctgactcaaaacatggctctgtaccaaagaactaataagcacaggcagggtccttttgtttgttttctttttttcttcttcttcatttttttttttgaataattgctttccctatttctttcttaccaattcagccaacacactttatctcaaggaaattacatttgctcacataggtgtgtgaataagcagaatgacaggagtttgtttcagccggaattagatggatattgcaattacttggggagagaacgtttccctaaattcagcgacgaatccttctcagatcaaaacaaggattacttgaaagatggcttttgtgccttaatacatattgtgttttgggagcatataactacttcttactctgtggtaaaatatttttttggttttgggaaaaacaaatacatcttcacaatgatagtgagaacagaaaggctgagttttctggtcaaagaaaggggattagaagcttttctagtgatgtgatccagactgaaaagggaatgttgtggatgtttttgtggcttgaaagaatattcaaccaagagccttcatttaggattataactagagcctcctttcctgaccatgttctgccaggctctcaggtactgtttctttggacttctcttgacatcccatacttcactttgctctacaagctatctcagtttttagtttgcttatctaatggttaataaacttcttgaggccaaagaatgtgtactttctgtctagaactcttagttcttattgtagctctagcatctagttaagtcagaagccagaacattgaagggatgaatgacttgaacaccgagagctcaatgatatcatggaattaaagtcaatatttcttttttatttatattttagaatctatacagcagtcctcccttatctgtggtttcgctttctgaagtttcagtttcccgtagtcaatcgaagtccaaaaaatgttaaatgggaaattccagaaataaacaattcataagttttaaatggctcactattctgaataatgcattgaaatcttgtgctgtcacactccatcctgcctgggcgtaactcatccctttggccaacatatctatgctcttgtatatgttacctccctgctagtcactcagtaaccatctcttatctgatcgactgtctcagtattgtagtgcttgtggtcaagtaattcttattttacttaataatggtcccaaagttcaagagtagaaattctggcatattgttataaagtactattttattattattgttaatctcttactgtggctaatttataaattataccttatcataggttacatataggacaaaacatagtatatacagggttcaatagcatctgaggtttcaagaatccactggaagtcttggaaggtatcttcctcagataagtggggactatgggatggatgttgaaaaatggattttgaggttttttttcattacttgcttgcttatataatttttttcaagaatttctacagagtgtatatatatataattttaataattagaaataaatgcaaaaataaaaaatgtactttttaaaaatgtaaacaataccttttaaaaaagaaacattgagatttttaaaagcaaaaatttaaaattccttaaggatttcagttttggaataagattctcccccaacctcctccaccgtcaaatcgtaacatagttgtattcacatgaaaggaaggcagaatgagcatgctggaaatatggtgtaatactaacaaacgacatgagaaagagagaaatctttatttttattttttgtttgacatttttttcccaactggaaagtagaataaaggttaataagaatatatggaaggccaggaaaggaaaggccacgttaagaagatacctacgtatgtcaaatgatttctaatatcaagcccagataaattgcactctggagaggagacaaacttcaagagcagagatgacaaagtaagcataagcttctagaaaagcttat

SEQ ID NO: 719354 - DNA, 638 bp, Homo sapiens
ggtagtttttcgatcctctccctccaccttcaagtaggcccctgtgactgttgttccttctttgtgtggcccctgtgattcctttctttgtgtccatgtgtattcagtgtttagctcccacttataagtgagaacatgtggtatttggttttctgttcctgagttagtttgcttaggattatggcctccagctccatccatgttctttgccctattttctgttgggttgttggtctttttcttaatgattttaagagctttttacagattaaggaacttagccctttgttttccattgtagtatataatatttcccttagattcaaytgtaattaagctttgtttatagtctttttgcagtgcagaaagttttaaaaatgtacattgttaaaatgaccaggattttctctgatttttacgttcgtgtgttatattttaaaaggctattctcatttcagcgttatttttaaaattctctcctgtttttgatatatctttgatccatctggaagttattttggagtaagggataaggtataaaacaactatttttttttcagatggcaacccaaatgtctcagtgacatttgttgaataatcaatctttccctcaacttgaaaggctacctttaccatag

SEQ ID NO: 719355 - DNA, 2224 bp, Homo sapiens
  misc_feature 1203, 1204, 1205, 1206, 1207, 1208, 1209, 1210, 1211, 1212,1213, 1214, 1215, 1216, 1217, 1218, 1219, 1220, 1221, 1222,1223, 1224, 1225, 1226, 1227, 1228, 1229, 1230, 1231, 1232,1233, 1234, 1235, 1236, 1237, 1238, 1239, 1240, 1241: n = A,T,C or G
  misc_feature 1242, 1243, 1244, 1245, 1246, 1247, 1248, 1249, 1250, 1251,1252, 1253, 1254, 1255, 1256, 1257, 1258, 1259, 1260, 1261,1262, 1263, 1264, 1265, 1266, 1267, 1268, 1269, 1270, 1271,1272, 1273, 1274, 1275, 1276, 1277, 1278, 1279, 1280: n = A,T,C or G
  misc_feature 1281, 1282, 1283, 1284, 1285, 1286, 1287, 1288, 1289, 1290,1291, 1292, 1293, 1294, 1295, 1296, 1297, 1298, 1299, 1300,1301, 1302: n = A,T,C or G
catgatgaagtcagtttcactttggcttatgaaacttcaagcctacacccctatgccagtaccctgccaatgtattcatttaccaccatgtgggcttggaactagaaatgagcaaagactgggcgcggtggctcatgcctgtaatcccagcaagttgggaggccaaggcgggcggatcacctgaggtcgggagttcaagaccaatctgaccaacatggagaaaccctgtctctactaaaaatacaaaaactagccaggtgtggtggtgcatgcctgtaatcccagctagtagggaagctgaggcaggagaatcgcttgaacccgggaggcagaggttgcggtgagccaagatcacgccattgcactccagcctgggcaacaagagtgaaactccacagaaagaaagagagaaagagagaaagagagaaggaaggaaggaaggaaggaaggaagtaaggaaggtaaggaaggaaggaaggaaggaaaagaaagaaagaaagaaatgagcatagatgccaagctcctaagtattcaagcccaaaggttatggctttctaggggaatttctgggggctttctatcatttgatccttccgtaatgaagccacaagttttgttcttcttgttaagttagtgccaagagccaagcacaaaagtgggaacctccaagagcactgtataaggtttcctttttacaattatattaccaaaataacacatattctctgtattttaaactttagataaaccaaaagaagaaaattaaattatttactattcctctacccgtaaattactaatgctagcattttaacattttggaatatatttttcattctttctatatgcatctatcttttactcttctttacccttccttttctccccacaggtggcatgatatattaccacagctttataacctatacttttttttcacataacaatatattataaaactttttcattatcttttactgcatcatctttaatggctatgtactatttcattatatgaacttctttttctttttgagacagagttttgttctgttacccaggctggactgcagtggcacaatcttggctcactgcaacctctacctccggggcctcaagcaatccttttgcctcagcctcccaaagtgctgggattacaggcataagccaccatgacggtataggacatattaaatcagatannnnnnnnnnnnnnnnnnnnnnnnnnnnnnnnnnnnnnnnnnnnnnnnnnnnnnnnnnnnnnnnnnnnnnnnnnnnnnnnnnnnnnnnnnnnnnnnnnnnatggaaataatccttggyaaattaacttaagttcacttatctatctgtgcatctattttctatgcattcatgtatgactcattatatgcaagagatttggaactgcctggcacatcataagtgctatataattgttcattattatgatgtgaaaagagcatcatggccaagacagacttacagtgttctttggataatgaggcatttgccaatgcttgggttttctcctcttgttggctgcccctgtatcatccagcattgtctccttttttatttccatgttacttgatctgtgttaatctcgtcttctgtatccacaccaaaatgctaactggaaaaccaaaaaacatgtagcactttagggaaatgcttaaaatgcaatgaataagacattaagatttttaaacttaattataagatttaattcactgctaccactgctatctaaatttctgcaggcagaatgaactcatttgacaccctgtagcaacaactctaccaaaaccatgctgaaaacttcctcaggacacccttgcaaccatataaccagtctcccagtgacagcggaagtactatttacagtcctaggcaggcttacaaaggaaagaagagcttcctggcaaagtacacacaattcaaatgccctcttctctatagtgcttttcctgtctctcttactcccaaactgtgcaactcaaagctatagcttgctatcagcaaggtggcagaggggagaaagtgctacttcaattgttacttacgtgctataagttgaacagctatcaactgttttattgattaatcattgcatctcaacatcataatagggtcccagtaaatgcttatttaataaatgaatgaaggttggtaaagcagattttattcaccaacacagctaacgtatcattctcatataaatgga

SEQ ID NO: 719356 - DNA, 2224 bp, Homo sapiens
  misc_feature 1203, 1204, 1205, 1206, 1207, 1208, 1209, 1210, 1211, 1212,1213, 1214, 1215, 1216, 1217, 1218, 1219, 1220, 1221, 1222,1223, 1224, 1225, 1226, 1227, 1228, 1229, 1230, 1231, 1232,1233, 1234, 1235, 1236, 1237, 1238, 1239, 1240, 1241: n = A,T,C or G
  misc_feature 1242, 1243, 1244, 1245, 1246, 1247, 1248, 1249, 1250, 1251,1252, 1253, 1254, 1255, 1256, 1257, 1258, 1259, 1260, 1261,1262, 1263, 1264, 1265, 1266, 1267, 1268, 1269, 1270, 1271,1272, 1273, 1274, 1275, 1276, 1277, 1278, 1279, 1280: n = A,T,C or G
  misc_feature 1281, 1282, 1283, 1284, 1285, 1286, 1287, 1288, 1289, 1290,1291, 1292, 1293, 1294, 1295, 1296, 1297, 1298, 1299, 1300,1301, 1302: n = A,T,C or G
catgatgaagtcagtttcactttggcttatgaaacttcaagcctacacccctatgccagtaccctgccaatgtattcatttaccaccatgtgggcttggaactagaaatgagcaaagactgggcgcggtggctcatgcctgtaatcccagcaagttgggaggccaaggcgggcggatcacctgaggtcgggagttcaagaccaatctgaccaacatggagaaaccctgtctctactaaaaatacaaaaactagccaggtgtggtggtgcatgcctgtaatcccagctagtagggaagctgaggcaggagaatcgcttgaacccgggaggcagaggttgcggtgagccaagatcacgccattgcactccagcctgggcaacaagagtgaaactccacagaaagaaagagagaaagagagaaagagagaaggaaggaaggaaggaaggaaggaagtaaggaaggtaaggaaggaaggaaggaaggaaaagaaagaaagaaagaaatgagcatagatgccaagctcctaagtattcaagcccaaaggttatggctttctaggggaatttctgggggctttctatcatttgatccttccgtaatgaagccacaagttttgttcttcttgttaagttagtgccaagagccaagcacaaaagtgggaacctccaagagcactgtataaggtttcctttttacaattatattaccaaaataacacatattctctgtattttaaactttagataaaccaaaagaagaaaattaaattatttactattcctctacccgtaaattactaatgctagcattttaacattttggaatatatttttcattctttctatatgcatctatcttttactcttctttacccttccttttctccccacaggtggcatgatatattaccacagctttataacctatacttttttttcacataacaatatattataaaactttttcattatcttttactgcatcatctttaatggctatgtactatttcattatatgaacttctttttctttttgagacagagttttgttctgttacccaggctggactgcagtggcacaatcttggctcactgcaacctctacctccggggcctcaagcaatccttttgcctcagcctcccaaagtgctgggattacaggcataagccaccatgacggtataggacatattaaatcagatannnnnnnnnnnnnnnnnnnnnnnnnnnnnnnnnnnnnnnnnnnnnnnnnnnnnnnnnnnnnnnnnnnnnnnnnnnnnnnnnnnnnnnnnnnnnnnnnnnnatggaaataatccttggcaaattaacttaagttcacttatctatctgtgcatctattttctatgcattcatgtatgactyattatatgcaagagatttggaactgcctggcacatcataagtgctatataattgttcattattatgatgtgaaaagagcatcatggccaagacagacttacagtgttctttggataatgaggcatttgccaatgcttgggttttctcctcttgttggctgcccctgtatcatccagcattgtctccttttttatttccatgttacttgatctgtgttaatctcgtcttctgtatccacaccaaaatgctaactggaaaaccaaaaaacatgtagcactttagggaaatgcttaaaatgcaatgaataagacattaagatttttaaacttaattataagatttaattcactgctaccactgctatctaaatttctgcaggcagaatgaactcatttgacaccctgtagcaacaactctaccaaaaccatgctgaaaacttcctcaggacacccttgcaaccatataaccagtctcccagtgacagcggaagtactatttacagtcctaggcaggcttacaaaggaaagaagagcttcctggcaaagtacacacaattcaaatgccctcttctctatagtgcttttcctgtctctcttactcccaaactgtgcaactcaaagctatagcttgctatcagcaaggtggcagaggggagaaagtgctacttcaattgttacttacgtgctataagttgaacagctatcaactgttttattgattaatcattgcatctcaacatcataatagggtcccagtaaatgcttatttaataaatgaatgaaggttggtaaagcagattttattcaccaacacagctaacgtatcattctcatataaatgga

SEQ ID NO: 719357 - DNA, 2019 bp, Homo sapiens
cagccaaagagggtcactggcttccttggcaagaacagtgcctatggaggaggcatgggaacgggtcctgatgtcctggggagtgagtgggaggcagactaagagcttcagctcttggggaggaggaaaggtggcaacccagggaaattcctgcagggcagacagggagtgctttttgtttttcttctaatagaagagaggggtgtttgccttggaaaattggagggataccttttccactgaaaggaagagaaagagggaaaggagaactatggatcatgatgaggacgaaggtctggcagcaggaaggagaaggtgcctgtgtgctggcttcttcagaagcgctctggccttggcccactgtaccacgggatgccgcatggggtgggctagggcatcagcttgcctgcactgaactcctagtgccgtcacggcatgtgcaggagacctggctaagttatttaacttctccctgcctcagtttcattatttcccatatggcaaaaagaaaaakaatatctaccctatagggctgctaagaagatggaaggaggcgttcagtcagtactcccgacttaaaatctcaccatcccgccctctctatgtccatacagccgtcataaccctgcattactgtgacagtgaccaaggcggctgatgtttcttagctcttcctgatttaattcaatcaataacaagacaaccttcaggccttcccagctcaggaatgtctccctttcacttgataaactcaaagccttccacaaactggtctcacactccgtaacaattttatacacacatatgtaaaaatacacctcaaactgcacactcatcagcatagaaatccgtgctaggctgacatctgcaggcgccacaccctcccacccctggaccacgtgcaggctgttcccactgactggagtcacgtacttttctgccctctgaagttgtttttcatttttcaaggtcacacctgaaacccttcctctggagaggaaccttgtccgatttcttcagcaccccctggcttcttccgcactgggagtcccagagttttccttggctgtctcaggggccctagcgggattatgcatttattaagggtaggcagtcacacatgcgctggcaatgagccacttttctcccctaatctctgaatgaggggtcacccaagagatggactccagcagcaaatgtcaagatttccccctaaaaggggatgttaatagcatcacttcgacaatgactcaaaatttaactatcaaatttacatttaaagaaacttgcagggccgggcacggtggctcacgcctgcaatcccagcactttgggaggccgaggcaggtggatcacttgaggtcaggagttcaagaccagcctggccaacagggtgaaaccccatttctactaaaaatataaaaattaaccagacgtggtggcacgtgtctgtaatcccagccacttgggaggctgaggcaggaggatcacttgaacccgggaggcagaggtggcagtgagccaagattgcgccactgcactccagcctgggcaagagagtgagactgtctcaaaaagaaagaaacaaaagaaaaaagaaaaagaagaaaagaaacttgctttgctctgcatctcataaaaacttaacaagtctaaagtaaaaagtgtatatatatcctggtatcaaaaataaataggcaggggctgggtgtggtgtctcacgcctgcagtcccagcactttgggaggccgaggaacgcagactgcttgaggtcaggagttcgagaacagcctggccaacatggtgaaaccccgtctctactaaaacaaatacaaaaattagtcaggcgtggtggtgtagctatagtcccagctactcggtaggctaaggcaggggaattgcttgaacctggaagggagaggctgcagcaagctgagatcgtgccgctgcactccagcctgggcgacagagcaagactccatttcaaaaaaacaaaccaaaaaaaccccaaataaataa

SEQ ID NO: 719358 - DNA, 1534 bp, Homo sapiens
ttgaattgtcatagccttgattgccatggacataagccaatatcattagaaagtgaaacacataaaattaaatatatactgcacagagtccctgtttgagtggaaataaaaggttctcttattgacactcaaaaatagtggaagaaagtaaaattgatcccttcaataagtactttgataactgactacaatattaatataaagtatacaatgtgaggttgatttcactacccatcatttcactgaggccagaggtgaagtgaaagggcccagaacactagactccagcatgtaaattcctactgctaggagttaaagtcacgtggaccacacctctttgtttaatggaactaggtttttctaggtataaaatgtttactccaggccaggcatggtggctcacgcttgtagtcccagcactctgggaggctgaggtgggcggatcacttgaggccagcagttcgagaccagcctcaccaacatggtgaaaccccatctctactaaaattaccaaaattagctgggtgacgtggtgggtgcctgtaatcccagctatgagagaggtggaggttgcagtaagccgagatggcaccactgaagtctagcctgggcgacagagtaaggctgtctcgaaaacaacaacaaaaaaaatgtttattccaggccatcttccttttctcacacactctagggattaaacatgtttaattgtgagacagctgacaaatggttaggagactaatctctgataacaaataaagaaattggcccctaagtcattctgttgccagggaattagccctttaacttgcaaattagaaataacttagaaagattttaaatataattcaatatccctaacaaatctcaattcagacaggaaaaaaatgtattatgttgatttataaagcaggtaactttaataacgtatgtctggaacaaaatttatcaatttaattctatcagttattactaaaatttgaaatagtttttttttttttttaatttggtgcttgtagcttggaaatgagggagatcagcattttggcccataaattcaacataactaatctataattataggtgtatagataaatatcacttatgtttcttttacttagctgagcctaagaaacagtaaaaaaacttttaayatagcttacaaataataaagcaaccaattaaatgggtgataaagctaaattgtcacaaattaaattccctatgctgatatgcaatcttataatatcctacaacttaaaaatatgaattcaaaaactatacattactgaaaagtcatcttttttcggagagtcacaaaatcctccctccctctctcccttctatttttttttggcggggggtggggagagcgagggaagaaatgaaaactagggaaaaaattattttaaaaaaaggggcacttaattaagactctaatttttaaaaaagtaccaacagttttcatctattcccctatgctactgatagcaacaaatatgaataccggccggcaatgaaaatgtttattcag

SEQ ID NO: 719359 - DNA, 1534 bp, Homo sapiens
ttgaattgtcatagccttgattgccatggacataagccaatatcattagaaagtgaaacacataaaattaaatatatactgcacagagtccctgtttgagtggaaataaaaggttctcttattgacactcaaaaatagtggaagaaagtaaaattgatcccttcaataagtactttgataactgactacaatattaatataaagtatacaatgtgaggttgatttcactacccatcatttcactgaggccagaggtgaagtgaaagggcccagaacactagactccagcatgtaaattcctactgctaggagttaaagtcacgtggaccacacctctttgtttaatggaactaggtttttctaggtataaaatgtttactccaggccaggcatggtggctcacgcttgtagtcccagcactctgggaggctgaggtgggcggatcacttgaggccagcagttcgagaccagcctcaccaacatggtgaaaccccatctctactaaaattaccaaaattagctgggtgacgtggtgggtgcctgtaatcccagctatgagagaggtggaggttgcagtaagccgagatggcaccactgaagtctagcctgggcgacagagtaaggctgtctcgaaaacaacaacaaaaaaaatgtttattccaggccatcttccttttctcacacactctagggattaaacatgtttaattgtgagacagctgacaaatggttaggagactaatctctgataacaaataaagaaattggcccctaagtcattctgttgccagggaattagccctttaacttgcaaattagaaataacttagaaagattttaaatataattcaatatccctaacaaatctcaattcagacaggaaaaaaatgtattatgttgatttataaagcaggtaactttaataacgtatgtctggaacaaaatttatcaatttaattctatcagttattactaaaatttgaaatagtttttttttttttttaatttggtgcttgtagcttggaaatgagggagatcagcattttggcccataaattcaacataactaatctataattataggtgtatagataaatatcacttatgtttcttttacttagctgagcctaagaaacagtaaaaaaacttttaacatagcttacaaataataaagcaaccaattaaatgggtgataaagctaaattgtcacaaattaaattccctatgctgatatgcaatcttataatatcctacaacttaaaaatatgaattcaaaaactatacattactgaaaagtcatcttttttcggagagtcacaaaatcctccctccctctctcccttctatttttttttggcggggggtggggagagcgagggaagaaatgaaaactasggaaaaaattattttaaaaaaaggggcacttaattaagactctaatttttaaaaaagtaccaacagttttcatctattcccctatgctactgatagcaacaaatatgaataccggccggcaatgaaaatgtttattcag

SEQ ID NO: 719360 - DNA, 1534 bp, Homo sapiens
ttgaattgtcatagccttgattgccatggacataagccaatatcattagaaagtgaaacacataaaattaaatatatactgcacagagtccctgtttgagtggaaataaaaggttctcttattgacactcaaaaatagtggaagaaagtaaaattgatcccttcaataagtactttgataactgactacaatattaatataaagtatacaatgtgaggttgatttcactacccatcatttcactgaggccagaggtgaagtgaaagggcccagaacactagactccagcatgtaaattcctactgctaggagttaaagtcacgtggaccacacctctttgtttaatggaactaggtttttctaggtataaaatgtttactccaggccaggcatggtggctcacgcttgtagtcccagcactctgggaggctgaggtgggcggatcacttgaggccagcagttcgagaccagcctcaccaacatggtgaaaccccatctctactaaaattaccaaaattagctgggtgacgtggtgggtgcctgtaatcccagctatgagagaggtggaggttgcagtaagccgagatggcaccactgaagtctagcctgggcgacagagtaaggctgtctcgaaaacaacaacaaaaaaaatgtttattccaggccatcttccttttctcacacactctagggattaaacatgtttaattgtgagacagctgacaaatggttaggagactaatctctgataacaaataaagaaattggcccctaagtcattctgttgccagggaattagccctttaacttgcaaattagaaataacttagaaagattttaaatataattcaatatccctaacaaatctcaattcagacaggaaaaaaatgtattatgttgatttataaagcaggtaactttaataacgtatgtctggaacaaaatttatcaatttaattctatcagttattactaaaatttgaaatagtttttttttttttttaatttggtgcttgtagcttggaaatgagggagatcagcattttggcccataaattcaacataactaatctataattataggtgtatagataaatatcacttatgtttcttttacttagctgagcctaagaaacagtaaaaaaacttttaacatagcttacaaataataaagcaaccaattaaatgggtgataaagctaaattgtcacaaattaaattccctatgctgatatgcaatcttataatatcctacaacttaaaaatatgaattcaaaaactatacattactgaaaagtcatcttttttcggagagtcacaaaatcctccctccctctctcccttctatttttttttggcggggggtggggagagcgagggaagaaatgaaaactagggaaaaaattattttwaaaaaaggggcacttaattaagactctaatttttaaaaaagtaccaacagttttcatctattcccctatgctactgatagcaacaaatatgaataccggccggcaatgaaaatgtttattcag

SEQ ID NO: 719361 - DNA, 315 bp, Homo sapiens
  misc_feature 182: n = A,T,C or G
ttctggttttagtactgaaagtcttgtatcccaggagcccygtcagactggggcaagctgggatggttggtcaccctacccagtttccactgtaaaatgggggtgacaactgctgttttttcacagatttgatttgagggttaagtaatttattattgataaagtacttagaaatagtgttngggacatagtcttttctctctccctttctgagtatatagatatacacacacacacgtacatatgtgtgtgtgtaatataacacatatgcacatgtatatatacacacacatatacatacacacattgttagag

SEQ ID NO: 719362 - DNA, 632 bp, Homo sapiens
aaccccgtctctactaaaaagtataaaaattagtcaggcatggtggcacgcacctgtagtcccagctactcgggaggctgaggcaggagaatcgcttgaacccaggaggcagagggtacagtgagccaagaccgtggcactgcacttcagcctgggtgacagagctagactacgtctcaaaatcaatcaatcaatcaatccacaagaattaatgttaggtctttggaggccaaatcagagtaggaataaagggaccaatctctttaaagccaaagttggccattatgaagggagagcaataaacagtgagccagtcgagccttcctctctgcaccctcaagcacattaaaagacctgattctggccgggcgtggtggttcacacctgtaatcccagcactttgggaggctgaggagggcagatcacgaggtcaggagatcgagaccatcctggctaacacagtgaaaccccatcactactaaaaatacaaaaacattagctaggcgtggtggtgggtgcctgtagtcccagctactcaggaggttgaggcaggagaatggcgtgaacccgggaggcggagcttgcagtgagccgagatygtgccactgcactccagcctgggggacagagcg

SEQ ID NO: 719363 - DNA, 632 bp, Homo sapiens
aaccccgtctctactaaaaagtataaaaattagtcaggcatggtggcacgcacctgtagtcccagctactcgggaggctgaggcaggagaatcgcttgaacccaggaggcagagggtacagtgagccaagaccgtggcactgcacttcagcctgggtgacagagctagactacgtctcaaaatcaatcaatcaatcaatccacaagaattaatgttaggtctttggaggccaaatcagagtaggaataaagggaccaatctctttaaagccaaagttggccattatgaagggagagcaataaacagtgagccagtcgagccttcctctctgcaccctcaagcacattaaaagacctgattctggccgggcgtggtggttcacacctgtaatcccagcactttgggaggctgaggagggcagatcacgaggtcaggagatcgagaccatcctggctaacacagtgaaaccccatcactactaaaaatacaaaaacattagctaggcgtggtggtgggtgcctgtagtcccagctactcaggaggttgaggcaggagaatggcgtgaacccgggaggcggagcttgcagtgagccgagattgygccactgcactccagcctgggggacagagcg

SEQ ID NO: 719364 - DNA, 632 bp, Homo sapiens
aaccccgtctctactaaaaagtataaaaattagtcaggcatggtggcacgcacctgtagtcccagctactcgggaggctgaggcaggagaatcgcttgaacccaggaggcagagggtacagtgagccaagaccgtggcactgcacttcagcctgggtgacagagctagactacgtctcaaaatcaatcaatcaatcaatccacaagaattaatgttaggtctttggaggccaaatcagagtaggaataaagggaccaatctctttaaagccaaagttggccattatgaagggagagcaataaacagtgagccagtcgagccttcctctctgcaccctcaagcacattaaaagacctgattctggccgggcgtggtggttcacacctgtaatcccagcactttgggaggctgaggagggcagatcacgaggtcaggagatcgagaccatcctggctaacacagtgaaaccccatcactactaaaaatacaaaaacattagctaggcgtggtggtgggtgcctgtagtcccagctactcaggaggttgaggcaggagaatggcgtgaacccgggaggcggagcttgcagtgagccgagattgtgccactgcactccagcctgggggacaragcg

SEQ ID NO: 719365 - DNA, 916 bp, Homo sapiens
ttgccatttaaaggagccttacctgcattccgtatcctctctttgtactgctgatctagttttttcattctcttctgatattcctgtaatgtacctgattttgaacatttgaaaaataaaattattgtgaatataaatctgctctacattttgcttcctaaaattattatctagcatcaacactgactgtttcagtaacaccaaaggaagacacacctcagcaaagttaactctggttcttaaccaaggcacacagcagaaaccactaggggcccattcaaagtctacccaacccagtggatcaagggtctgtagtgagtgagggggagtggaaaattgccaatatctccacactattctgatcagttgctgcaacagtctgaatcaacgggccttcctttactggaaaaggttcattctccttcagtaaggtctaggtcaacgctctccagtagaaccttctgcaatggtgtgttttatatttgcaatgtccaacatggcaggcactaaccatttgtggctattttagcacttgaaatgtagctagtggaaccgaagaactaaattattaattaaatttaaacagccacatgtggctagtgacagcattaaacaattcaggtatagattctaaccaaatcgctattcatttcattgctcttcccacaaaacagttaattatgaggggcccatcttgtggggggaagtgtttcctgattataatgcctgaccatgggctagtccaagggcgtggatcactcaccagcaataaaagcacrtagtagaaacagcagtatcaggctgggcatggtggctcatgcctgtgatcccagcactttgagaggctgaggtgggcggatcacctgagttcaggagttcaagaccagcctggccaatgtggtgaaaccccgtttct

SEQ ID NO: 719366 - DNA, 1667 bp, Homo sapiens
tgcatgggccacattttatttctccaattatgagttgacagatgtttgggttgtttctgctttacgggtgagcaatgctgctgtgaaattcacacacaggtttttatttctcttgggcatatccctaggagtggagttgctgggttgtcaatactccatgtttaacctttgaggacctgccagactgttttccagagctccaagccagcaccccactgctctaaatactgacctaaggatttgaggatgggcttcagcagtctctgaatccccagaatggacacaaatcccacgtctctgcatttgtttggggatgaatgtacagtccacctctttgattctcaaaaatatctcaaggccgggccagtggctcacacctgtaactccagcactttgggaggctgaggcaggaggatcacttgagcccaggagttcaagaccagccagggcaacatgtcaacaccttgtctctacaaaaaatttaaaaaattagctaagcatggcggcgtgcatctgtcatcccagctacttgggaggctgaggcaaggcattgcttgagcccagtaggtcaaggctgcagcgagctatgatcgcaccactgcactccagcctgggtgacagtgagactctatctcaaaaaagaaaagtatcttgagcctccaaatcctccctgcccttgcccagtctaaaggttagaggaaggggcagataagtgaagcgtattccagttctgtctcctaactctgaactattcttgtgggggcctgttagggatccaaaatacagcttgatacaggatgaaaatgccagctgacgtctgctatctttccttattctcttcccggtatctctccttcttggaaaccagcaaggagaacttcaacaatgtcccggacctggagctcaaccccatccgatccaaaattgttcgtgccttcttcgacaacaggtgggcgttttcccctgaaccagcccagtggcaggcacccttgtcttgtgtaacatctcgggatacttgtttcctagaatgaccctttgagctgatgcccagaagagggggccaagctgggtaggggttatgagcataggtttggggttggaccattctggattcatagctgggcgactgggctgctcactcaagctctctaggcctctgtgttcattgtctctggctatgtaacaaattaccccaaaacttagtagtttaacacaatagccaagcatggtggtgcacacctatagtctcagctgctggggaggctgyggtgggaggatacttgaggccagaagttcgaggctgcagtgagccatgatcacaccgcttgcactccagcctgggcaacagagtgagaccctgtttctaaaaaataagactttttaaaaaagaaaatttaaggctgggcacagtggctcacgcctgtaatcccagcactttgggaggccaaggtgggtggatcacctgaggtcaggagttcaagaccagcctggccaacatggtgaaaccctgtttctactaaaaataaaagaattagcagggcacagtgggtcatacctgtaatcccagcacttttgggaggctgaaatgggcagatcacttgaggtcaggagttcaagaccagcctggccaacctggtgaaaccctgtctctgctaaaaatacaaaaa

SEQ ID NO: 719367 - DNA, 1667 bp, Homo sapiens
tgcatgggccacattttatttctccaattatgagttgacagatgtttgggttgtttctgctttacgggtgagcaatgctgctgtgaaattcacacacaggtttttatttctcttgggcatatccctaggagtggagttgctgggttgtcaatactccatgtttaacctttgaggacctgccagactgttttccagagctccaagccagcaccccactgctctaaatactgacctaaggatttgaggatgggcttcagcagtctctgaatccccagaatggacacaaatcccacgtctctgcatttgtttggggatgaatgtacagtccacctctttgattctcaaaaatatctcaaggccgggccagtggctcacacctgtaactccagcactttgggaggctgaggcaggaggatcacttgagcccaggagttcaagaccagccagggcaacatgtcaacaccttgtctctacaaaaaatttaaaaaattagctaagcatggcggcgtgcatctgtcatcccagctacttgggaggctgaggcaaggcattgcttgagcccagtaggtcaaggctgcagcgagctatgatcgcaccactgcactccagcctgggtgacagtgagactctatctcaaaaaagaaaagtatcttgagcctccaaatcctccctgcccttgcccagtctaaaggttagaggaaggggcagataagtgaagcgtattccagttctgtctcctaactctgaactattcttgtgggggcctgttagggatccaaaatacagcttgatacaggatgaaaatgccagctgacgtctgctatctttccttattctcttcccggtatctctccttcttggaaaccagcaaggagaacttcaacaatgtcccggacctggagctcaaccccatccgatccaaaattgttcgtgccttcttcgacaacaggtgggcgttttcccctgaaccagcccagtggcaggcacccttgtcttgtgtaacatctcgggatacttgtttcctagaatgaccctttgagctgatgcccagaagagggggccaagctgggtaggggttatgagcataggtttggggttggaccattctggattcatagctgggcgactgggctgctcactcaagctctctaggcctctgtgttcattgtctctggctatgtaacaaattaccccaaaacttagtagtttaacacaatagccaagcatggtggtgcacacctatagtctcagctgctggggaggctgcggtgggaggatacttgaggccagaagttcgaggctgcagtgagccatgatcacaccgcttgcactccagcctgggcaacagagtgagaccctgtttctaaaaaataagactttttaaaaaagaaaatttaaggctgggcacagtggctcacgcctgtaatcccascactttgggaggccaaggtgggtggatcacctgaggtcaggagttcaagaccagcctggccaacatggtgaaaccctgtttctactaaaaataaaagaattagcagggcacagtgggtcatacctgtaatcccagcacttttgggaggctgaaatgggcagatcacttgaggtcaggagttcaagaccagcctggccaacctggtgaaaccctgtctctgctaaaaatacaaaaa

SEQ ID NO: 719368 - DNA, 630 bp, Homo sapiens
ttgacgggcacctgggatgtcagcgggttttcgctgtcacaaagcgagctgcagggtgaggtttttggaggcttgtcggtgggatcctggagtatcggtgaaaggggcaggagcacctggtgtcatccccagagcagggaggacgcagaggcgatggagactggcatcgccaaacccactcagcagggagaggctccttgtggccaccctctggccctgccctccccagtggccctgagttatcacggtgactcacgaggcatgaggcgtgggcctcacaggctggccctgtgtttccctgacctctcccctgaggtctgtgagcttagattagcctggaatcttcttatcagcacagcgcaggcatgaggaggccasacctaggcgggtacaggaggcatcttggtggtccagctgctggggggctggtggtgaggtgggctgagtggggaaggagagccccatgccctcatgtcacccacacctcggattctccctggggggctgggggaggggagggaggctgctctgagccacacgttgccagggccctggtgagcgacgctcggctcccatcccaccctcaagcccatgaatgaggatattggaggttcagggtgaccggctcca

SEQ ID NO: 719369 - DNA, 630 bp, Homo sapiens
ttgacgggcacctgggatgtcagcgggttttcgctgtcacaaagcgagctgcagggtgaggtttttggaggcttgtcggtgggatcctggagtatcggtgaaaggggcaggagcacctggtgtcatccccagagcagggaggacgcagaggcgatggagactggcatcgccaaacccactcagcagggagaggctccttgtggccaccctctggccctgccctccccagtggccctgagttatcacggtgactcacgaggcatgaggcgtgggcctcacaggctggccctgtgtttccctgacctctcccctgaggtctgtgagcttagattagcctggaatcttcttatcagcacagcgcaggcatgaggaggccagacctaggcgggtacaggaggcatcttggtggtccagctgctggggggctggtggtgaggtgggctgagtggggaaggagagccccatgccctcatgtcacccacacctcggattctccctggggggctgggggaggggagggaggctgctctgagccacacgttgccagggccctggtgagcgacgctcggctcccatcccaccctcaagcccrtgaatgaggatattggaggttcagggtgaccggctcca

SEQ ID NO: 719370 - DNA, 672 bp, Homo sapiens
agaagagcagtatagggaaatgcatcatgggtaatagaccccaatccaggatctccaccccagaagtggtgatcttgcggcattctagccctagagtatttggtggggacggcatggtgcctgggtcaacactgtctgcaaatacgccaggccccgaggcacaatgtcttcatttctgccctctcccttcgcgctcagccacacatccagcgaaggtgggggtaattatccttgaccttatctagacttcctctgttctctgacgatgccaagttctgaccattttacttatctgatggggaggtggctgctaggagagaaggggagctgtgtgtgtggaacacagtggaggggcagaaaaagcggcttgttggtactctttcaggccacaaggacagccattatgcaggcactgtcagtaggcgcttcctattaaastaaagggtaaatctgcgagtgtcccacaattaaaagcacccggctggaggtagaggcacagggggattggctgtctgttgattcttgtcaaaactgggtttggggtacttgggattatactgctttgtccatttttatgtgtttggaactttttgtagtagttaatttaaaatgctcctgctcttgctaggatatgacactggttgagaccaagagttgatcttcacacccaga

SEQ ID NO: 719371 - DNA, 472 bp, Homo sapiens
  misc_feature 356: n = A,T,C or G
cctgggttatgggggttaatgagctacggcttcagcgcagctgccaagtgcctaatctcagcccaaggtcacacaccaggactctccgagaacacactatcgcacatacacactcagacacacaccatgccaggtggtgcagaatcacaccactgggttgattcgatttgtgattctctaccctgtatataccctttacagacaccaccacctgggcccctactacccccccaaagattctaatttcatctgcctgggattagagctctccaggttggtctcttttgcagctggggtagagacaatggtctgttgtcaaacttgacagcattttggaatcacctgggggatttaanaacagcactggctaggtgtggggctccctcctgtaatcccagcactttgggaggccgaggcrggtggatcacaaggtcaggagtttgagaccatcctggccaacatggtgaaaccc

SEQ ID NO: 719372 - DNA, 506 bp, Homo sapiens
caggggctcactggactgatgtgttatggtgtttgtatccattggtatctagcctggcacaagagggtgtaccagagtgctgggagtggacagatgtagccaccatccgctgagtgagggctgctctgagccaggctttgtgctggaggtttacgggactctgcttctattcctcatcacaacccttagagggaggctccattaaagatgaagacacaggctcagagggttaagtaacttgttaatgaccaagttaagtcacaggacagagctcaacctaaatctgtcacccargagttgaggagcctaaggggaagcttcagggtagctcttgctggtgtggaaccaggcacctaggggagccgggcatggctgtgctgcgctagggtttggagcttggcatgaagagcagcctgtggcaatgtcactggctatggccaatcccagcctttggcgggaccaggagcttagcagcctgagaccagagacccactggcttttccagc

SEQ ID NO: 719373 - DNA, 628 bp, Homo sapiens
gttaccccctcatggtaacgagacatttgagaggccctgctctgagaaatactgttttagtgactaaaacatcccagactcagccctataggatgaaagctaacatgtaagtagtacttacagatactgacaattgtctgtgattaagactgttgagagaaagcgggtggagtggggggtctttggagttcttagtactttctagattgaaaaacagtatctggtgcactcaagcagtatagtaagaaaaggcggtaaaacttccaaaaatggcatctttataaattgcatgattttgtgacatcagccatttgctagcctagggattctgtttggtttggtcttagaaaagtctactgcatgattctatttttatgactgcctcgaaaagacaaaattataaagatggagaacagattagtggttgtcaggagttatgggcagggggaggtggtgaccaaaaagaaatagcacaagggatattttggggggtgatggaactgttttacatcctgattatggtggtagataacaggaatctacacgtgttaaartttagagaatgtacactcatacacacacacaaatttactcaaaataaaattaaagagtaatataaaagagattt

SEQ ID NO: 719374 - DNA, 1386 bp, Homo sapiens
tcttcagatcttttgaatgtcgttatctgggtgggccttccctggataccttgtttaaaaatgcagccccttttatacatacacacatatttacatacacattctctctgcctatccccatttcctgctttattttactctgtagtacttactgtcacccaactatcaaatatatttcacttttttacaggcttcacctgtgagcctagaaacctttgtttgttcaactgctgcgtctccagtgcctggaatagtacatggcacacagtgtatgcttaatagaaattgaatgaattgaatgcttagactttatatagaaaatgaaatgaagatatatatttggttttatataatttatatttttagaaatctattattttagacttcggaaaaagaattctgatctgggaattcctttttataattgcctgaaatctttccttgagacacacagcctgagtgcaagcatagtggtggtgccccaactcctgatctttgactttgccctcatttatcacctcaatgtagtaacatggggtgatttgacatagaaggaattctttacgaaaatgtaaaaggtagttgatgtgttggttttaagtctggcacatcaccagggatagagctgtgggatagagggaagacctgaagtagtgtatgtgtgttgagcaaatcatgtgtgatgcaggaccatctactccttgcttttttacggcaaacccagtagggaataaagcagattttattcctccttttttaattgacaccagatagtgctgtgacaatttttatcagcaggtcttacatttataaaattggtatgtaattctcagcatttagctaaaatagtcatgttaacaatrttgaattaacaggtattttaagaaataagttttgaacagaaagaactataagaaacaattattagaaattgccaaaatctattgtaaactaaaatagtgtaatttgcttttgtttatgaaggttaaatatgagtgcctggcagaggaaattaaaataggagactattacctgagattactattggaggaagatgagaatgaagaaagtggatcaattaagagatcgtgagctactctgtatatcctgtcgcatttgttttcactgttggtttcatggctatttctattgtgaacttttttttttaaaatctaggtatgaatttttcaatgagctttatcatcgcttcttgctcaccccaaaagtaaacatgaagtgtttatgtttacaagcccttgctattgtttatggcagatgtcacgaagaaataggaccttttacagataccagatatatcattggaatgttagagagggtaaggatatcatttaaggaaattactatttgatagtgtcactagggtat

SEQ ID NO: 719375 - DNA, 539 bp, Homo sapiens
ggtgatcttcagacccctggatagtgtccttgggtactaggggaggtagagccaagctaggttgtgcctttaggccccctcatggtgtgtaaagatgctggcggtggcatgcaggggcagaatgaccctgtggccattggcagaatgctcaggtggaggcagcagcagctgtgctgtggccctgcaactgggaagagtggggttgcttcccccgggaacagccataggcaggaaactgaaagggactggcttcatctgagccttggcctagagcaggcagtggaatttgtctttggagtgtgtgagaatgcacagttgcccctctgtgggggtgagggaataggattgctgtctgtggctgcctcttcagccccaggagggagggaaggtgagagagcaagggagaattcatggaactgacagtatgcatggaagcaggagaaggacargtaatcatgaggaagtgaagaaaagaaaatgtagaaaggatggggaagtttttttattgcttttggctaaagaagtgaaattcaggccaa

SEQ ID NO: 719376 - DNA, 621 bp, Homo sapiens
gttgccaacatgcccagctaatttctgtatttttagtagagatggggttttaccatgttggtcaggctggtcttgaactcctgacctcaagtgatccgcctgcctcagtcttccaaagtgctgggattataggcrtgagccaccatgcctggcctaatgttgtattttcattatcattcagttagaaacattttataattttccttatgatttatgcattgactcacagattttagtactaagttgtttaattaccagatatttggggcttttctagatgttttgtttttattcatttctaatttaattaccttgtgatcagagaacacactctatgggtttttagtcttgctatctggtttctccgttttatgagagtatctggggagattaaaaaaatgatgctgctaccaccatcttcccaatatccttctaaaaatatctacttttaagattttcttatctttaagagtctaaatacatccaaaataacccaaattacaagaattcaattgattcaataataaattcaatcgtttttattatgctttgaaatatgtttcttcaactatgacctagaaaataacgaacacttactgttatttgcaagagtgagtccaa

SEQ ID NO: 719377 - DNA, 1273 bp, Homo sapiens
tgaaagagatgcatcattatgccttagactcccactgcatagggcacagggctcctgctcccaaaggcccatggaaggtgagagtggcagaggggacagcagagccagctccctgcctaggctgaccctcaagagaagagcggctgacagaactgcccacagtgttttaattattttcctctcttgtccggtgcatgcagttgaacttgcccagactgaaggcacaaaggccacaaccccacaaacgagctaacatcaatgtgccaccaaccctagsggggcactgcacaggagcagggcatggtctaggtctgactgcacaggctggttctatccgcaggcagttacttccccatctcctattttccaagtcaacagcctcagttcttttcctgggcaacagtgctgaacgctgccaagaacaaccaagatggtaaaagccaagccaggagtccacgggttgttcctggtgacctggaaagcagcaccagcagtggggaggagttgggttccaacagatgaagagcagggagggatctgtacagggcagatgggccatcctctccagaggccaggagacaccgcaggacaagagggcttgggttccaatgccggctctgcccttgctagcccagcagcccggggccactgcctctctagtgacggcaccagctgtgccttagtcacgcagcctgtggaataaagcagctgcctttattccacggctctcacctggagccgtggtaagagttaaatgtgatggtgtctgtcagccctgagcacagggtcagtgccaatgcctgcactaggctgggactcagtgtgctcagcttcctgtctgttatatcactgggcagagtccggggctccagccacagacacctccctccattcacccctttataaagcccttgggccctctggacccccaccatgggtgacgtgtacatctggtgacaggtgtgcctgagagcagctgaaccttcacaaagtctgggagagcagaagcccaggaggccccacccacccctgtggactcgcccacagccccgagccaccagccctccagagctgccaaatcgcccttgcctgatgctcgccaggcaacctcaggctgtgcatcccattctgcaggaacccaggtggggaaagaaggtcgaataatcagcacagtgttttccacctgaaaaggggtagtcccttcccacctccgtcatttactatatcagtatctcatcgtggttttgttttaaaccccgaagaaaatccccat

SEQ ID NO: 719378 - DNA, 587 bp, Homo sapiens
actttatgtcaaataatttgcctgccaagataggcacttgctcaaggtttcaattcttaaaattataagtaaggatataaaaggtgaggtttttaagatgttatattcctctttctttttaaaatctttattttttttcctgcttaagtattcctctttaattccatgagctatgttttttgcattatttcgctgaagaacctaaaaagartaagtaaatgggaaagcaacatgcacctaaattccttgatgcacaaagcacacaaggtttatagctatttcttcattacatttctaagccttgcaaatcaatattaaacattaatcaattcacaaaatgttcagttagggagtacccttccccacagaaggtatacatgtagtaaaggccacagagttggcattttttaaatatccaccaatgataaatcatttttcagactaaatagttattgtcatgctctactattttatcttttacattttcatggtgcacaggaagattcaattctgatgtgacagacatcccataatgaccaactacataaaaagtcaaattcctgtagtattgttagtctgtttttgtc

SEQ ID NO: 719379 - DNA, 587 bp, Homo sapiens
actttatgtcaaataatttgcctgccaagataggcacttgctcaaggtttcaattcttaaaattataagtaaggatataaaaggtgaggtttttaagatgttatattcctctttctttttaaaatctttattttttttcctgcttaagtattcctctttaattccatgagctatgttttttgcattatttcgctgaagaacctaaaaagaataagtaaatgggaaagcaacatgcacctaaattccttgatgcacaaagcacacaaggtttatagctatttcttcattacatttctaagccttgcaaatcaatattaaacattaatcaattcacaaaatgttcagttagggagtacccttccccacagaaggtatacatgtagtaaaggycacagagttggcattttttaaatatccaccaatgataaatcatttttcagactaaatagttattgtcatgctctactattttatcttttacattttcatggtgcacaggaagattcaattctgatgtgacagacatcccataatgaccaactacataaaaagtcaaattcctgtagtattgttagtctgtttttgtc

SEQ ID NO: 719380 - DNA, 1253 bp, Homo sapiens
ctttttctaacttatgtaatgaggctactagaaaatttaaaattacaggtgtggcttacatttgtgacttcacctgagagttctattggatagcactggattaaaagcttcaacagatgagccctaaggtacctccaaatgctgaaattttataagtgctttattccatcttcacaataattctatttggtgaggatggcattttacagatgagaaaaccataacaaatggctcatcagctcacttccygaatccactgaagagcattgaataagttattttgtttgttctgtttggttggtgaagtatttgctttaatacttcttaaagtacagtggggaaatgggcaatccacaacattcaatcacttggcagttagtttgtccttcttatttcccatgtgataaggaacaggcatatcagcaagtaagctcatcagttcaaattctcaatctctctcctcctgctctcatgcgtgtgcgtgcacacccacacacatacttctaaagatgtctgccatttaaaatagtcacttagaaatatagagtatgctctaatggtccctgattggatcattatacaacatagagatatatcaagaaatcacaccgtaccccataaatatgtacaattacaatgtaccaattttaaaaattagtaaataaaagaatgtaaaaatatatagactattagttatatagctaaggggaaatgtgaagtcttctagtaaaggagcctcttctcctaatttcccccatcccttacacccaacccctgtcttcccccagctgtggggcccttccttcacataagctattggatagaatactggtactgaatacagattaacaatgtgctgctccggtggatgcaatggatatctggaatcctcctccctctgctttgccttacaattcctgaagcacatctgagtttcttcaaaatccagtttgaaaagaaaagttaggcccagagaagtgaatttcaggaacattactgagttgtatatcattgaaggttgtatttcctctatcaccaggtccatttccagaactaacccaagtcttgagtcagaatagcaaggatgcaccttctccattctaagggaagaactaagtaagaatctctcttgggtatgtagacaaaggagataggatagacagaatgccttagaaaccaacgaaaacaaatcaaactatggtgcatttattcacttacctttctatttcacagtaatacagccttgatttcca

SEQ ID NO: 719381 - DNA, 657 bp, Homo sapiens
tcaagtccagactcacagcatcatgatttatttttcttataaagatcaatccttttaaaaactatacgcaatcttgtgggtggtatacttctgattaaattaaaggagaagcaattaattaatttattttttctttaaagacttcatggaaagaggggtagagaaatgaagaaaggagagtgagagaaagagagggaaagagtaaaggatgcttatgtccattgagaataggtgtatttctgtataatatcagagatacgtgggtttttcctggcctgaggcatggaaaagataaagcattgatttggttttaaaggattttgtaagcaaatgtatacaaagtgtttataaaggtccttggagtatgttgggaaaaaatactgttgaatttataaatgcagccattaacagtagccaagattgcaagtgttcatgtttattgtgcaatgattaattctrtttttatactgtatgaaacatgttagggttagccccaatggcactgcagggtctaagggctgctaatatttggaaatattattgcgtgttccttcaccacagtaaagctacatctgactcgcgtgaactttggaatatggaagaatctaacttcatcttttaacttggcactatgcaaatatttattttcttaattaa

SEQ ID NO: 719382 - DNA, 1313 bp, Homo sapiens
tgaatacctgcatttattttacccttaggaaaaataagaaacttattacattgtgtgagttttatgggtgccaagacgatctcaagctttttggtttaatgtaaaattccattattttgtttcacctaggctagttcattatgaaaatgyaacctctcctcatatgagtacagtaacacattgttaatctattatttgtgagatttgtgtaactgaggaattagaaaacaagcttttcgaacaggctttggaatagggagtaggcataggaagtacctaaggaggaagtgggaaaacaggggctggcagatgccaccatgaaatacggagcccagcagtgctagagattgctctagcttcttcgtcttgcctagtgctggctgtgttgctgatgatacaggcatgtggttttaaaaccttatcagtcagcttcaggtactactcctttttagaatcagcatctctgggtgccattccctctttgtcagtaactcatttatagattttgcctcttgtgaatttcattacataaactctttaggcaaatgggatgtaaagtagcctggattggagatgcattttggtattgatcatgctggggctatgtatagaaaggacgttaaaaatcttcacatcagatcaaatgctattcaatcagccagggaaggggattgaacacaaagatgccgactacagcttctttgcatttagcacctccatgtaatggtgagtgaaagaaacggactcttaactattcaagcatttctattttagctggttcaaagcaagagttgatggtaaagtttgacagctatcgtgtttctcacctgaagtaattagcagtaacagtacctaaaagctaaagctcttgaaaaaggagccacatgctgctcttgtatagctaccttcagcagttataaatgagttctatttcagccacagctaaatttttagtgcactgctagagaagaaaaagtctaattattacagtcactataatttgagataattgactctggtgttacatcatagttcttacaataccaacgaggaataagacatttgtaccattacagtaaataaggtattccactaccaaattgaaagcgttatcccccctcccctgagagtattaatgtctggctatggtctcaaaaggaaacgttacctctgctccagcaggtttccaagcctttttcattgtagtgaataaagagaaggaattaaatagtgtttagtcatcccagaggtcacaaggaatattataattccagcaaacttcactttgcagctaaaacccttcattgtttcag

SEQ ID NO: 719383 - DNA, 601 bp, Homo sapiens
attctggaagagaaaagctaagcatcccgtgttattgcaattgtcgggaagaaaatgtggtcattaaaataaaaatcaatgtcattttagtttttcaattttaaaatagaattataaaattttaaatttaaaccaaaatggttttctgtatctcatatatatttaataatcattattagtttttatacttttgcaatcacagcatttttccatccaccaaacaaatgttttccacagttgctacgaaagcacatatgaatttcttttgaacatctgaaaatcagatcttaatgatgtacccttttctagagtgttggcctccttaccattttctgcctaagtctttagctgctctcttgcctttgccatctgctacgtcgggcatctttgttcacctttctgcctctgtttttagtaatcctgtaagcttttctatatccagatcctgcccattttgtttcccataatcgtggccacaagctccatgatgggatgttgctctctctccaccccccagccattcttcccaccactttcctatgtcattgaacgttgmccttccaatggcagtctctatgcatcacctatatttgacgcttac

SEQ ID NO: 719384 - DNA, 601 bp, Homo sapiens
ttccaggcacattccaaggcttggccttacacatagggactggtctgatgtcagaggagaacaagaacttcaaggaatttctagtcctccaaatgagttacactatattgggacagcaatgagataagagctgggatgaaaagaatttgacagagcaagagtagatgcatgatasaataggttacaaggaagaaaagatccgtgttcaatggttaagtcaatgggggcaggaatttggtttttgttgttcaacactacatacccagtttcaggcccataacaagagaaatgaatgaatgggagagtgagtgaggctatttgatcctttctctttgtttctttaatctagtatttcccaatgtatggaatgcttcaactagtaatctgggacatcattttaggtggtaatggtacattaaacactctaaatcaggtagagacaaagtgtttccccttttaatttcctagtatcaaggagaaaaatttcagtttggtactagtaggcctttaacatctttctattcttgtttaaacaggagacatgttctcagggactgagctccaggtaactttatttagttaaaactatatacagtcattt

SEQ ID NO: 719385 - DNA, 860 bp, Homo sapiens
atattcatttatgttcctattttaactgcttctactaaaatatatattttcctttcttgcagttaattataatcatttgaaattttctctttactattcagtataatttttaaatataccagccacattaaaagttttataaaagctgttcaaaaataaaaactgatcttacatgttgtttgatgcaaccccctccactgttggtttgaaaattccaccgttagaagttaatgtgtggtacaatctttctctcccaaagggaataaaggcaatacaattatgcagtctcttttacactgcggttcttttctagaaattggttctaaagaaatatttgtgaatgttgcaaagatttccctataaatctgttcaatgtgtgttgtcagtaatatgagaaaactgaaaataacytaaggcttgcatgtgagtgatcagataactatggcatttctgggactaagagggatcattttctttttctttgtacccttctatattatctacaataagcagctattgatttttatcagttaaatacatacattttattttactaaaataaattagtggtcatcctgattacagtaataaatttatcaaatgcattttatttcattccctcctgagaccccattaaaatgacagaaaagggggtgttttggcataaacctacaaaaacaaaggaaaaacaagggaagtgacaagagccacaaacttttggaagctggaaagcacctgagtcattggtaacagacctaacaggatcaagccgaatcctgaaccgacagtggggaaagccaaacagcagacacctatacagcacagagactcccaaagtctcaggaattaagtgcaccagg

SEQ ID NO: 719386 - DNA, 860 bp, Homo sapiens
atattcatttatgttcctattttaactgcttctactaaaatatatattttcctttcttgcagttaattataatcatttgaaattttctctttactattcagtataatttttaaatataccagccacattaaaagttttataaaagctgttcaaaaataaaaactgatcttacatgttgtttgatgcaaccccctccactgttggtttgaaaattccaccgttagaagttaatgtgtggtacaatctttctctcccaaagggaataaaggcaatacaattatgcagtctcttttacactgcggttcttttctagaaattggttctaaagaaatatttgtgaatgttgcaaagatttccctataaatctgttcaatgtgtgttgtcagtaatatgagaaaactgaaaataacctaaggcttgcatgtgagtgatcagataactatggcatttctgggactaagagggatcattttctttttctttgtacccttctatattatctacaataagcagctattgatttttatcagttaaatacatacattttattttactaaaataaattagtggtcatcctgattacagtaataaatttatcaaatgcattttatttcattccctcctgagaccccattaaaatgacagaaaagggggtgttttggcataaacctacaaaaacaaaggaaaaacaagggaagtgacaagagccacaaacttttggaagctggaaagcacctgagtcattggtaacagacytaacaggatcaagccgaatcctgaaccgacagtggggaaagccaaacagcagacacctatacagcacagagactcccaaagtctcaggaattaagtgcaccagg

SEQ ID NO: 719387 - DNA, 643 bp, Homo sapiens
gattgaatgcctttggaaggcctttctcctgatcacagagttacatcccatcacaatatcaactcagaagtccaaaacccttatccatatatcattatctaaattaggtatgagggaggctctttttaccatccatcctagaacacaattcctctttctatatacacatattcagcatggttaagaaactcgccaaaaggtatctagccaaaatattacagagctaggattgaagccaggatttgatctcaagcaatcatcctctaaaactcattctctttatatttaggcctttcaaggtaaaagaaggctgggccacttctcattttttttgtatcccattataacaaaaagcaaaattatggtatagttacatgttttctacatatacataagtgcttaataaatagcacctttaacacacataaatgacataataycctatgtatgatagtgatggtcaaatgtaaatgtgaagaactttgtgaatgtgaggctcaatctagatggcctcaccactctccctgcctctgtgattggcctgctccctctagcccataacaacatttatgcaggagccaacgtactgcttctcccagagcttactgtttgcttgggtcagtgggatgtttgcacataagca

SEQ ID NO: 719388 - DNA, 638 bp, Homo sapiens
tattttaaaaacccaaatctgaagctaaagcaaaagcagtccagcatatggctgtcccaggcaaagccttctgcagaggtgtcagctgctcacggctcaygtgtttatcacattcaagttcacggaactgccggacagagttggtgtctctgagaccacatggccagcacaggcagattcaagacaactctgcagaagagcaaaggagggagaagttggggagggggagctgagcatgttcattcgttcattcattcattcattcactccccaccacctccctgaggtctggggggcctggccttaccctgtgatccaccagaaggtgatcctcgacaggaaggaagcgctggactctgggcagggattctagtggaaagaaagcacaggtttgggaggaagagggaaaggaatgatttgacttttcatccaggtcagagcttagcaagtagtcagctgctcactcttccttccagaggactagcgtcagctccacaccattctgcaccccaaaaggaccctctcctaatagccaggagaaagaaattcatggcagctcttccagtttcaatcaacggagtgtctaccatgtgcaaccacaatacaacatgctatagacctgccttgtcttctatccc

SEQ ID NO: 719389 - DNA, 581 bp, Homo sapiens
agacctctttacttgcaaatcactggagatatatgagaggcagcacaatgtagttcttatgtgtagctttgtagatggtagcctacatagtcttggaacttaaacattcttggagtgggctgggcgtagtggctcgtgcctttaatcccagcactttgggaagccaagccgggtgagtcacttgaggtcaggtgttcgaggccagcttggccaacatggcgaaaacccatctctactaaaaatacaaaaattagccgggcatggtggcrtgcacctgtaatcccagctactggggaggctgaggcaggagaatcgtttgtacccaggaggtggaggttgcagtgagccgagattgggccactgcactccagcctgggcaaaaagagcaacactccatctcaaaacaaaaaaaaaaaagaaaagaaaagaaaattcacggtgtgaatagttaggttttattgttttattggtttatccctaatgcgtcagggatatataaataatgcgtcagtatatgtaaactgttgacttttgcttttttaaggaaaaaccactagttgaatttttccactgatcagttt

SEQ ID NO: 719390 - DNA, 581 bp, Homo sapiens
agacctctttacttgcaaatcactggagatatatgagaggcagcacaatgtagttcttatgtgtagctttgtagatggtagcctacatagtcttggaacttaaacattcttggagtgggctgggcgtagtggctcgtgcctttaatcccagcactttgggaagccaagccgggtgagtcacttgaggtcaggtgttcgaggccagcttggccaacatggcgaaaacccatctctactaaaaatacaaaaattagccgggcatggtggcgtgcacctgtaatcccagctactggggaggctgaggcaggagaatcgtttgtacccaggaggtggaggttgcagtgagccgagattgggccactgcactccagcctgggcaaaaagagcaacactccatctcaaaacaaaaaaaraaaagaaaagaaaagaaaattcacggtgtgaatagttaggttttattgttttattggtttatccctaatgcgtcagggatatataaataatgcgtcagtatatgtaaactgttgacttttgcttttttaaggaaaaaccactagttgaatttttccactgatcagttt

SEQ ID NO: 719391 - DNA, 581 bp, Homo sapiens
agacctctttacttgcaaatcactggagatatatgagaggcagcacaatgtagttcttatgtgtagctttgtagatggtagcctacatagtcttggaacttaaacattcttggagtgggctgggcgtagtggctcgtgcctttaatcccagcactttgggaagccaagccgggtgagtcacttgaggtcaggtgttcgaggccagcttggccaacatggcgaaaacccatctctactaaaaatacaaaaattagccgggcatggtggcgtgcacctgtaatcccagctactggggaggctgaggcaggagaatcgtttgtacccaggaggtggaggttgcagtgagccgagattgggccactgcactccagcctgggcaaaaagagcaacactccatctcaaaacaaaaaaaaaaaagaaaagaaaagaaaattcacggtgtgaatagttaggttttattgttttattggtttatccctaatgcgtcagggatatataaataatgcrtcagtatatgtaaactgttgacttttgcttttttaaggaaaaaccactagttgaatttttccactgatcagttt

SEQ ID NO: 719392 - DNA, 496 bp, Homo sapiens
caagcccagtacaccatcaccatcccttccatcaccactagaatgaccagcaactcctacgttctctgctactatcccctccccagcaccacagtaaacccatcctcttggtcctcttccatatcgggtgaccactcatagctcaggtgcctccagcaggctttcaagggttaaagaaaaaccaatttgccttcaccacgcccttggccggcatcatttgggatccacagtttttgaatgagaggaaattcaggaaaaaaaaatgtttgcaggatgcattaaacccatagatttcttcttttaatctgggaatgcaatatcaatattggaaacctcacctgaagtttcttacttcccttcattgcagcattctgtggttttatttatttatttattttgmgatggagtcttgctctgttgcccaggctggagtgcaatggcacgatcttggctcactgcgacctctgtctcccaggttcaagagattctcctgcct

SEQ ID NO: 719393 - DNA, 591 bp, Homo sapiens
agaggacttctttacttcctccgctgctttcctcttggccaagctcctgagagcatgtccctcttccctgtgcctctatgtcagagttgagggtcctaaggctcaaggctgtcctgctccacatcaccccgttggtcacgaggctgctggctgagccccaattctctaaccaggctctgagcagccggattggatgggargcattggataggtggggacattgcctcttcagggttcagcacagaaagtcgaagtcgcagtcttcccgggctgtgcctggagcctgggacttacctttggaatacaaacggagggtgcttggttttcccagcatgaatggagaggagatgggtcttctcttcttctgctgagtgggaaaggagctctgacggctggccctgaacagagaagggggaagtggacactcattgacccactgctgtaacttctgcatctcactcacaacacactggctttttctattccttgcaggtggctcctgcgcctgcgccggctcctgcaagtgcaaaaagtgcaaatgcacctcctgcaagaagagtgagtgcggggccatctccaggaatctggggc

SEQ ID NO: 719394 - DNA, 591 bp, Homo sapiens
agaggacttctttacttcctccgctgctttcctcttggccaagctcctgagagcatgtccctcttccctgtgcctctatgtcagagttgagggtcctaaggctcaaggctgtcctgctccacatcaccccgttggtcacgaggctgctggctgagccccaattctctaaccaggctctgagcagccggattggatgggaggcattggataggtggggacattgcctcttcagggttcagcacagaaagtcgaagtcgcagtcttcccgggctgtgcctggagcctgggactwacctttggaatacaaacggagggtgcttggttttcccagcatgaatggagaggagatgggtcttctcttcttctgctgagtgggaaaggagctctgacggctggccctgaacagagaagggggaagtggacactcattgacccactgctgtaacttctgcatctcactcacaacacactggctttttctattccttgcaggtggctcctgcgcctgcgccggctcctgcaagtgcaaaaagtgcaaatgcacctcctgcaagaagagtgagtgcggggccatctccaggaatctggggc

SEQ ID NO: 719395 - DNA, 594 bp, Homo sapiens
ccaaggcaggtggatcacttgaggccaggagttcgagaccagcctggccaacacagtgaaacactgtctctactaaaaacacacaaaaaaatcagccaggtgtggtggcacatgcctgtaatcccagctactgaggcacaagaatcactggaaactggaaagtggaggctgcagtgagatcgcaccactgcactctagcctgggcgacagagtgaaactgtgtcaggaagaaagagaaagagaaatgaaaagaaaaaacagagcaagaaagaaaaagaaaaaaatagaaaaagttattttctcaactctacaaggatcatcctccatggccaggttaacagctctttttctggaccccggtgtcttcattgctgccacttatttgctttctgatctctagctgggtctscctaggctcttctacttcgctggagaaaactaaccctacgcagccacatagcattcctatcccatagccctgaccatgctcaagctgcaagacctctacacatctccatgtgctgaaactcctccaagcacactgtcagggactctgtgggagagaagctgccggacaatctgcctaatccttga

SEQ ID NO: 719396 - DNA, 922 bp, Homo sapiens
ctagcattatgttggtctctgttatccctaaagtaaaatcaactttttattttccggtgaggacaactattccactaatgagaatcagaacacaaactctatatttgtttgacttcagcagcaaaccaaattattgctaaactttagtggttttttttttttttttaaatttcagtaagtgatagacgttccagtgtttacaagctgaaagactatgcaatccattaaacaagtatgcctactaggaaattgttattacttcaatattatcattcatccagttacaacatttgttttcaatttctaaaaacatgattgagttagtcccacgagttgaaacgggcttaatgtcccgtgatgtgatacagtagtaatgtgcaaaaagaaaaaattaagaggcatacagggactgttttatgctaaagtcattctggagatgtgtttaaaagttggcttttctgattaatgtggtggagttttaatgctgaccctttcctggtacttcactgatctggcaaagaaagacaatagaattaggatatttcacacatcatttagttgggtgccaagacagtaaaatatggactaaaaaaatcattgtgagcattttgtacatatgtcagcttataatttgattggatatagttcacctatcataatggtatatgaactacaagtatttgacatctatgagaawagattgagttttacgactcaggtttataagattaattaggtgactcttttaataaaactgtgatgtgactctgatgaggctgccattgtgaaaaccttctttcattctttgataaaaatcaacatttaactttataagcagatactgggcatctctacgatatttggggttcactacaaaaaacagacccacagataggttagtttcttctagcatctcttttac

SEQ ID NO: 719397 - DNA, 1528 bp, Homo sapiens
cagtacagataaactttcactttagttgaagtatttttttgtagcttttttttttaacaaggataacataataatctaataatggaattaagaagaaatataaagcaatgggtaaaaagttactataataaatatcataattacagttcaataaagagttgaggctccaaagacacagagagaaaagatggaacctaattaactctagctcaggaatactgccttgctcagtgatggactgtcagaagtctgggtgatgttggcagctcctgtgtagcccagacttagtcctgccatctggtgctggcttttaaagagtggatatcagaaagtaaggggatataggagtcatkgtagagaggagactgcttggcaaagagtaaaaaaaaaaaaaaaaaaaaaaaaaaaaaatctagagttagggagatgacccagagccatgatcactccagaaaggtaaaatgtagtacacttgagtggtgtcttctgaggataaaggaagttcacatttcatcaacagagaaggggcagaaactaagcacaaagttcccaaactgcctgataaggatccttgtatagaatactgaaagatcagggatgagctaccaggttatatccctttgggtgttttatttttccatgctgggtgaaaaggtaatttcctaaaaaaccaaaactccgtctcgagaaagaaaaaaaaaatccacatgggcctaatctgattttttttttttcaaatatgtagactcaaactaaaatcttccaaagacttctgcatgatcttggctttgtcccaatattatctgctgaacacactccctattattcttaaaatgtgattctcatgataaattagaaggctaatgtgttcgcgtaaagaacacctgaatatgccgcagcaggtctcattttacagatggatagaacaggccattaggcatggatagagcagactcagctggctctgataattggtagttgacttgaatctgaatagaggtcaatcaaatgatgctacggaagtttagagaactatatcattcacacagagattttccttgtaaaccataccagctcactccgtattctaaattctgtttagagtgatacaaaattgcccactttttgaaagaggagacaaccatttaccaggcctgccaagtaaagctgcgtgggttgtatactgctcaacccaaaggaagttacaatcacatggactacgtacaacgtgtgcaacctgctcagtccacacagcaggcttgtcattagaaatataaatgctattactcctgattcaggttaagcaagattcaaagagaggagccactggaaggtacttggagggcatttgaactttagcaactttgattagtttgtaaggcatatcattttcccacacagacaagattttactatgtacacaaatgccaggagttttttggtttttctttttaaaaaatgctattattgcccaggcatggtggctcatgcctgtaatcccagcgctttgggaggctgaggcggacgg

SEQ ID NO: 719398 - DNA, 656 bp, Homo sapiens
aagctccaaagagcatgagctgagaaggtgaatgtaagcacagccaaccaatcagtaaacacttcccagcacgaacactcaccaagtgcatccccaaggttgagctgccagatgttatgtttgaatgaaagccaaactaaggtttgtgagaaagcttgccagacagaggaaaagttactcttacatattaaacataaaaaaaaacgttctccagaatgaatgatttctctttgggacaacagtcaagtggcaagtgcttctcccagagagagagagagagaggtatcttagactmcttttcagctaatggttaagagttgaagactgtgccaacttaccctggcatctgtgaccttgaattcccttaggatatactgtggcatgttgtactcagccatgggatctacaacaaagtactggtatcttgcagaccgttctgctggccagtattggtgacatttctcctaaaaggagagaagattaatgttaaactatgcaaagtataaagaacattctgtatattatctatctatctatctaatctatctaatttccttatcccattaataaaatttcaaaattcaaggcaattccaattgcatatgactcatttcctcttagaaaccatgagctcccttcatagggaaaccctttgg

SEQ ID NO: 719399 - DNA, 656 bp, Homo sapiens
aagctccaaagagcatgagctgagaaggtgaatgtaagcacagccaaccaatcagtaaacacttcccagcacgaacactcaccaagtgcatccccaaggttgagctgccagatgttatgtttgaatgaaagccaaactaaggtttgtgagaaagcttgccagacagaggaaaagttactcttacatattaaacataaaaaaaaacgttctccagaatgaatgatttctctttgggacaacagtcaagtggcaagtgcttctcccagagagagagagagagaggtatcttagactacttttcagctaatggttaagagttgaagactgtgccaacttaccctggcatctgtgaccttgaattcccttaggatatactgtggcatgttgtactcagccatgggatctacaacaaagtactggtatcttgcagaccgttctgctggccagtattggtgacatttctcctaaaaggagagaagattaatgttaaactatgcaaagtataaagaacattctgtatattatctatctatctatctaatctatctaatttccttatcccattaataaaatttcaaaattcaaggcaattccaattgcatatgactcatttcctcttwgaaaccatgagctcccttcatagggaaaccctttgg

SEQ ID NO: 719400 - DNA, 656 bp, Homo sapiens
aagctccaaagagcatgagctgagaaggtgaatgtaagcacagccaaccaatcagtaaacacttcccagcacgaacactcaccaagtgcatccccaaggttgagctgccagatgttatgtttgaatgaaagccaaactaaggtttgtgagaaagcttgccagacagaggaaaagttactcttacatattaaacataaaaaaaaacgttctccagaatgaatgatttctctttgggacaacagtcaagtggcaagtgcttctcccagagagagagagagagaggtatcttagactacttttcagctaatggttaagagttgaagactgtgccaacttaccctggcatctgtgaccttgaattcccttaggatatactgtggcatgttgtactcagccatgggatctacaacaaagtactggtatcttgcagaccgttctgctggccagtattggtgacatttctcctaaaaggagagaagattaatgttaaactatgcaaagtataaagaacattctgtatattatctatctatctatctaatctatctaatttccttatcccattaataaaatttcaaaattcaaggcaattccaattgcatatgactcatttcctcttagaaaccatgagctcccttcatagrgaaaccctttgg

SEQ ID NO: 719401 - DNA, 312 bp, Homo sapiens
ggaccttttcatcctcatctgaaaaatgggtatgcccattgaaccaaccgaggcagggagggccrccaccatgacactgcctgggcccagaaagatggcaggcagctccccaggaactgccagtgtgccttcctgtgaagaaccccactcctcctgacccaccttcccaggctgagagcagcccactgctctccgggccctgccaacagtaggctggggaccctcgataaaccctgggcctctcgcttggctgcctggacccaaaacccctctggcttggcttggtccagaccctcccagagccgggtgggg

SEQ ID NO: 719402 - DNA, 2454 bp, Homo sapiens
tataacttgaattgttttactctcagaagtagcctggtgcccacaaagcatcctccatcctccctagaggccaagccctgggcctgtctggatgcctcccgcccccactcagctcaggtgccccctcccctcagtcccaggacactcctcagcctggttcaaaagcaaattcagggttcctggtgggcaaggaggggcagcgcccttcccaccagctcagctctgtggcttcgggcggtgctgcagggccccccagaggcctctccgccctcacactgacagtgcaaacacagcctctgtgccgccagggggcccaaagccccccgactggtcagctcccctgcaattctgggatcctttagaaaaacagtgattgttgttttgcgggacccttgtgtttatgcttttattgtggacctttttaaacatatacaagagcagcgagagacatgtcacagccccacasccccggcacctggctgcaatgggtgctggcccctgggcagcctggcttcatctgtctctgcccccatgcttattcttgctgtgcttttacaagcggattctagataccaggtcatttcgcctgtaaggacttcagcaagagccacagccaggccttgagaggcccggcagactggccctgggcggcgccggcggtgcgtgtgctgttagtgattcaccagcacgagtgagttgctcacctgtgtgattcaaactggagttggttcgaggttgtccacccacatatccctttggccatgttctgttaggccttcgtggtggggagaggaaggggcagctgtcatggctgagccacagtggggatgtcgtctgtgcctgggtggcaggggaagaactgggaggccttggaaaggtggaaggctctagtgcagggtgattgcccacggacgtgctgctatgcaaatgagtgcatgtgctggtgggggcaggcacagagggatgctgcaggaaggaggcaccgaccacccagaggggtgagtgtgagtggcattatgaggagaaaggtagctagggaccacagggctgagtcaggccctcaggacagccagtgcagacgcacagcagacccaggacaaaatcggcacccaactgggtcacccgtgaatccccacctggggtcatgttggtcaggacacttttcagcttcaggaggacagaacgcaactccaaacagacttagcagaaaggagactctattggctcacataaccaggctgtgcagggggacttcaggcatagctggatccaggtattcaaacatcagcatgaggatccagtctaacagggcggggagggggtcagccctcccggaaccacatgaacacagggcaggggagggtagctccacacagcatgcttgaggtgctgttgccaacaatgggagattggtggtggacaggcaaggaacagatgtccacacagaggggacatttgcagccacaggatgggccagggctagaaaggaggatgaggagagcagagcaagagcatctgagccctgagccttggggtgtggcctcatacaggacgaggctggcacacgggtagcccctgggctaccgctgtggtttggccaccactgtttttaaaatattagaagtgcacgagaatatccaagcttctgttggaaaccagaggggagtggccacatgggcccgtggtgcctcccggcaacagtcaggtggggccgactgctgccaccccttgggatgggccatgagtttccccagcgtgccctgtggcccacctgcctccctggcgtcctcccccagcaactgaggcatttgcatcagggccttgggggctggagaggactccagtgggaagggctggggagtgagtggacacaggtccccagggaagtgaacaccaatgagatttcaccaaacacccatgagagcagagcagagggtgcagctgggccccacggaccctgtgggtgctcagagtacccccaggaagtgcacgtgggtgtgcaggctcccggcactccaagccgcctcggtggggccacagcgtctgtcccggtcatagcccgccctgccaagccctgcccagcccgccccacggcccaggccagaaacgcctccagccctgcagctcttggcctcagaagcggaaaagcctctgcagttagcaacacaagacggttcctgcgtcctcccgacccccgcccccaaaacacacacacacacacatcagagcgtcttggcagctggtgagcgctaacgtggctgaattgcttttggggactttgaaggaaattaattaaaaccagctgagatgggaaagctggaaggtggcgggagccagggacaactttccacagggcctgggagggagcagcccggagccgaccacgccaccacgagccaccgtgtccagccaggcccgacgacctgcccggcctcgccaaaggtgggactgccc

SEQ ID NO: 719403 - DNA, 2454 bp, Homo sapiens
tataacttgaattgttttactctcagaagtagcctggtgcccacaaagcatcctccatcctccctagaggccaagccctgggcctgtctggatgcctcccgcccccactcagctcaggtgccccctcccctcagtcccaggacactcctcagcctggttcaaaagcaaattcagggttcctggtgggcaaggaggggcagcgcccttcccaccagctcagctctgtggcttcgggcggtgctgcagggccccccagaggcctctccgccctcacactgacagtgcaaacacagcctctgtgccgccagggggcccaaagccccccgactggtcagctcccctgcaattctgggatcctttagaaaaacagtgattgttgttttgcgggacccttgtgtttatgcttttattgtggacctttttaaacatatacaagagcagcgagagacatgtcacagccccacacccccggcacctggctgcaatgggtgctggcccctgggcagcctggcttcatctgtctctgcccccatgcttattcttgctgtgcttttacaagcggattctagataccaggtcatttcgcctgtaaggacttcagcaagagccacagccaggccttgagaggcccggcagactggccctgggcggcgccggcggtgcgtgtgctgttagtgattcaccagcacgagtgagttgctcacctgtgtgattcaaactggagttggttcgaggttgtccacccacatatccctttggccatgttctgttaggccttcgtggtggggagaggaaggggcagctgtcatggctgagccacagtggggatgtcgtctgtgcctgggtggcaggggaagaactgggaggccttggaaaggtggaaggctctagtgcagggtgattgcccacggacgtgctgctatgcaaatgagtgcatgtgctggtgggggcaggcacagagggatgctgcaggaaggaggcaccgaccacccagaggggtgagtgtgagtggcattatgaggagaaaggtagctagggaccacagggctgagtcaggccctcaggacagccagtgcagacgcacagcagacccaggacaaaatcggcacccaactgggtcacccgtgaatccccacctggggtcatgttggtcaggacacttttcagcttcaggaggacagaacgcaactccaaacagacttagcagaaaggagactctattggctcacataaccaggctgtgcagggggacttcaggcatagctggatccaggtattcaaacatcagcatgaggatccagtctaacagggcggggagggggtcagccctcccggaaccacatgaacacagggcaggggagggtagctccacacagcatgcttgaggtgctgttgccaacaatgggagattggtggtggacaggcaaggaacagatgtccacacagaggggacatttgcagccacaggatgggccagggctagaaaggaggatgaggagagcagagcaagagcatctgagccctgagccttggggtgtggcctcatacaggacgaggctggcacacgggtagcccctgggctaccgctgtggtttggccaccactgtttttaaaatattagaagtgcacgagaatatccaagcttctgttggaaaccagaggggagtggccacatgggcccgtggtgcctcccggcaacagtcaggtggggccgactgctgccaccccttgggatgggccatgagtttccccagcgtgccctgtggcccacctgcctccctggcgtcctcccccagcaactgrggcatttgcatcagggccttgggggctggagaggactccagtgggaagggctggggagtgagtggacacaggtccccagggaagtgaacaccaatgagatttcaccaaacacccatgagagcagagcagagggtgcagctgggccccacggaccctgtgggtgctcagagtacccccaggaagtgcacgtgggtgtgcaggctcccggcactccaagccgcctcggtggggccacagcgtctgtcccggtcatagcccgccctgccaagccctgcccagcccgccccacggcccaggccagaaacgcctccagccctgcagctcttggcctcagaagcggaaaagcctctgcagttagcaacacaagacggttcctgcgtcctcccgacccccgcccccaaaacacacacacacacacatcagagcgtcttggcagctggtgagcgctaacgtggctgaattgcttttggggactttgaaggaaattaattaaaaccagctgagatgggaaagctggaaggtggcgggagccagggacaactttccacagggcctgggagggagcagcccggagccgaccacgccaccacgagccaccgtgtccagccaggcccgacgacctgcccggcctcgccaaaggtgggactgccc

SEQ ID NO: 719404 - DNA, 657 bp, Homo sapiens
caatatgtttattcatattgctgaggcaggggattgcttgagcccaagagtttgaggttgcagtgaaccatgatcataagctgtatttcagcgtgagtgagagattgagaccttgtctcacaaaataaaagttaaaaagcccttatctggaggtgagaaagccaaatacaaaggtcttctcagttggttcccagtcttcccagtccagcagcctcagcatcaccagggagctggttaggcaaattctcggccgccccaacctactgaattggagaccctgaagatggggctatctgaattttaacaaggcctccaggtttgcatgctcaagattgagaaccactggcaaaagcaaacaatttgaatctgaagtcagcccacctgcatttgaatacaggccctgccacttaataactgtgatttagagcaagttagttacttaacagctaggttgaccaattgtccgagtttgcctggcactgtcctgatttcarcactgaaagtactacattatcgctgtggctcacgcctataatcccagcttctcaagctgtccctgtggaatcctcaatatcggtacattcatccctatctagcatccccttcctccctcacccatcctgcaccctcagaattcattctcagatcaccttccca

SEQ ID NO: 719405 - DNA, 657 bp, Homo sapiens
caatatgtttattcatattgctgaggcaggggattgcttgagcccaagagtttgaggttgcagtgaaccatgatcataagctgtatttcagcgtgagtgagagattgagaccttgtctcacaaaataaaagttaaaaagcccttatctggaggtgagaaagccaaatacaaaggtcttctcagttggttcccagtcttcccagtccagcagcctcagcatcaccagggagctggttaggcaaattctcggccgccccaacctactgaattggagaccctgaagatggggctatctgaattttaacaaggcctccaggtttgcatgctcaagattgagaaccactggcaaaagcaaacaatttgaatctgaagtcagcccacctgcatttgaatacaggccctgccacttaataactgtgatttagagcaagttagttacttaacagctaggttgaccaattgtccgagtttgcctggcactgtcctgatttcagcaytgaaagtactacattatcgctgtggctcacgcctataatcccagcttctcaagctgtccctgtggaatcctcaatatcggtacattcatccctatctagcatccccttcctccctcacccatcctgcaccctcagaattcattctcagatcaccttccca

SEQ ID NO: 719406 - DNA, 1085 bp, Homo sapiens
atgcctgtgactgcaaatgtcggaaattgaagtatcttaattgmatgagagaatgtttcataaaaggcaatctggagggcctgttttaaaccaccgccctcttggccaaaggtgagggctcactcaacctctttcagtggtttcttagccctcccctggccagctctgaaggccagacctcagaggggaaatggatcttggacttggggtatcctgagcaagagcaggaaaaatagggatactccttttgttggtcttcttccagtatatgcccaagttcaaagagaaagagagaaagtggagagacatgaagcaggagaactgggactcaagagagcaggctgggtgtggtgtttcacgcctgtaatcctagcaatttgggaggctgacgaaggaggatcccttgagcccgggagtttgagaccagcctgatgacttcatctctactaaatatatatgtgtgtgtgtgtgtgtgtgtatgtgtgtatatatacgtgtgtgtgtgtgtgtatgtgtgtatatatatatgtatatataaatggaatatggccaggtgtggtggctcactcctgtaatcccagcactttgggaggctgaagcaagtgaatcacttgaggtcaggagttcgagaccagcctggccgacatggtgaaaccctgtctctactaaaaatacaaaaattagctgggcatgatagtgcgtgcccgtaatcccagctactcaggaggctgaggcaggagaattgcttgaaaccgggaggcggaggttgcagtgagctgagatcccactgcactccagcctgggtgacagagcaagaccctgtctcaaaacaaaaacaaaaacaaaaacaaaacaaaacaaaacaaaaaaaaacgacacaagagagcagctttcttttggttgggagacaaggaagtaaaggagggatatttttcaggcctggaaggacaaaacaaaggcagtgatgtgagaaggtggcgatgggatgagccaaggaccaggaggggacgtggggcccaaagcagggactgcttggaggccttctgcaggagacgaggatagtggggtacagatatgcccagatc

SEQ ID NO: 719407 - DNA, 616 bp, Homo sapiens
gatggggttttgccatgtggccagcctggtctcaaactcctgaccttaggtgatccacctgcctcggcctcccaaagtgctgggattacaggtctgagccacctggccagatgaatcataggataactttaaaatattagttggagaaagaggtggcctctcagcctgtttccacatgtgtcttctgggcctaatggctcaccccttttgagttgtgccaaggatacgggaaaatctatgtgaagtttgtgatggcaggtaggtgcttagccagtggcacctctgacatgcagctctcctggaaacttgctctgcaaagtggcaaagtggagggagctcactgcctcagtttacccacccgagragagaggcaaatctccccaagatcggaggaggctcggtcatcacagagtcctgttcctgcctgggctgaaattctcacccctgagcttctccaaatttggtgctgcccagagtcctgaccctgtttcctgtccccccacatcccgcccctccgtcctggctgccagaggggctgcactgatgggtccctccctagagcccccagaaactgcccagagaggaaatcctcttcctcctcttacaggctggaagc

SEQ ID NO: 719408 - DNA, 529 bp, Homo sapiens
gttttgcaagcctctggggacccctcgtgtgaggcacaaaccacccggatccgccccacttcccattccacagagcggtaagggctgctatatccagcgtcagacggttgggttaaacacttcactgtgcccccagtagcaaagagaccctgggcaagtcactcagcctcagtttcctcatctatgacatgggaacgataacaaacccaycatgactgccaagcttataatgaagatcagccaagagtctgcatgggaaaacccttgggaagtattaaagtgagggttattacgggcaatagggtttttactcctgcctttgcatgtctttcctgctgctggttgacttctcaggactttttttaaaaaactgccccaggctgctgttcgtgtttcttttaacctgattacttttgctttatgagagaaaggagggaggaggtgggaggagagagaagcagacagcatgactcatcccaccccttcctggggactgtcctaaaagatgctcctcagagccgctggggct

SEQ ID NO: 719409 - DNA, 766 bp, Homo sapiens
gaccagcctgaccaacatggagataccccgtctctactaaaaatacaaaatgagccgggcgtggtggcacttgcctgtaatcccagctaccagggaggctgaggcaggagaattgcttaaacctgggagatggaggttgcggtgagctgagatcgtgccattgcactctagcctgggcaacaagagtaaaactctgtcttaaaaaaaaaaaaagaatacaaataagtgtacataactgaatgaatttttacctaatgaacatccgtataaccagcasccagaccaagagattgaatattactagcaccctgccccccacgctcccttcccttcagtgagaatcactgccttgccctgtcttcctacaccgaagatcagttttgcctctttttattatattgcatgtactcttttgtgtcttcctgcttttactcaacattatgagacaagaataatccaggtggccacaggagaattaaattctgggcagtagtttcacatgactagaggctatggacttataagaccctgaaacccaggatgtgggtcaaactggctgagaccaactggacccaacatggcactggatgtgaccaggtttctcctaggacctcaatatacactcattaatatcctaaacacacacccacccgtgtctcgacagttccaagaacacccaggtttgatgtaaaaatgggtggcaccacagttccaagaaatctccaccttttcccaggaatgttcatgaatatcccagtccttggtt

SEQ ID NO: 719410 - DNA, 766 bp, Homo sapiens
gaccagcctgaccaacatggagataccccgtctctactaaaaatacaaaatgagccgggcgtggtggcacttgcctgtaatcccagctaccagggaggctgaggcaggagaattgcttaaacctgggagatggaggttgcggtgagctgagatcgtgccattgcactctagcctgggcaacaagagtaaaactctgtcttaaaaaaaaaaaaagaatacaaataagtgtacataactgaatgaatttttacctaatgaacatccgtataaccagcagccagaccaagagattgaatattactagcaccctgccccccacgctcccttcccttcagtgagaatcactgccttgccctgtcttcctacaccgaagatcagttttgcctctttttattatattgcatgtactcttttgtgtcttcctgcttttactcaacattatgagacaagaayaatccaggtggccacaggagaattaaattctgggcagtagtttcacatgactagaggctatggacttataagaccctgaaacccaggatgtgggtcaaactggctgagaccaactggacccaacatggcactggatgtgaccaggtttctcctaggacctcaatatacactcattaatatcctaaacacacacccacccgtgtctcgacagttccaagaacacccaggtttgatgtaaaaatgggtggcaccacagttccaagaaatctccaccttttcccaggaatgttcatgaatatcccagtccttggtt

SEQ ID NO: 719411 - DNA, 766 bp, Homo sapiens
gaccagcctgaccaacatggagataccccgtctctactaaaaatacaaaatgagccgggcgtggtggcacttgcctgtaatcccagctaccagggaggctgaggcaggagaattgcttaaacctgggagatggaggttgcggtgagctgagatcgtgccattgcactctagcctgggcaacaagagtaaaactctgtcttaaaaaaaaaaaaagaatacaaataagtgtacataactgaatgaatttttacctaatgaacatccgtataaccagcagccagaccaagagattgaatattactagcaccctgccccccacgctcccttcccttcagtgagaatcactgccttgccctgtcttcctacaccgaagatcagttttgcctctttttattatattgcatgtactcttttgtgtcttcctgcttttactcaacattatgagacaagaataatccaggtggccacaggagaattaaattctgggcagtagtttcacatgactagaggctatggacttataagaccctgaaacccaggatgtgggtcaaactggctgagaccaactggacccaacatggcactggatgtgascaggtttctcctaggacctcaatatacactcattaatatcctaaacacacacccacccgtgtctcgacagttccaagaacacccaggtttgatgtaaaaatgggtggcaccacagttccaagaaatctccaccttttcccaggaatgttcatgaatatcccagtccttggtt

SEQ ID NO: 719412 - DNA, 1174 bp, Homo sapiens
cttcctcacagacagcttcggcgggcagcacagctacctgcggatctccctcccggagaagtgcaacctcagatgtcagtactgcatgccggaggaaggggtcccgctgacccccaaggccaacctgctgaccacagaagagatgttgaccacaaaagagatcctgaccctcgcctggctttttgtgaaggaaggcgtcgaaaagatctggctcatgggcggagagccgctcatccagccggacgaggtggacattgtggcccagctccagcgactggaagggctgaggaccattggtgtcaccaccaatggcatcaacctggcccggctgctgccccagcttcagagggctggtctcagcgccatcaacatcagcctggacacactggtgcctgccaagtttgagttcattgtcckcaggaaaggcttccacaaggtcatggagggcatccacaaggccaatgagccaggctacaaccctgtgaaggtgaactgtgtggtgacgcgaggccttaacgaggatgaactcctggactttgcggccttgatcaagggcctccccctggacgtggccttcatagagtacatgccctttgatggcaacaagtggaacttcaagaagatggtcgctataaggagatgctagaaactgtatggcagctgtggccagagttggagaagctgtcagagcaggaatccaggacagccaaggcctttaaaatccctggcttccaaggccagatcagcttcatcatgtccatgtctgagcatttctgtgggacctgcaaccacctgcaaatcacagctgacgggaacctcaaggtctgcctctttggaaactctgaggtatctctacgggatcactgtgatctggggcctccaagcaggagctgctgagaatcattggcgctgccgtgggcaggaagaagcagcagcatgcaggcatgttcagtatttcccagatgaagaactggcccatgatcctcatcggtgggtgacccccatcaagacatttttgatgttccacgattccccaccagccaatccaagcatttcctcctgggaccccctccatgttcaaggtctgagatccagaatgaatttctccagtcagatggccactttatggaaaggatacagggtaccccagacccctcttctagcccagcagcag

SEQ ID NO: 719413 - DNA, 1174 bp, Homo sapiens
cttcctcacagacagcttcggcgggcagcacagctacctgcggatctccctcccggagaagtgcaacctcagatgtcagtactgcatgccggaggaaggggtcccgctgacccccaaggccaacctgctgaccacagaagagatgttgaccacaaaagagatcctgaccctcgcctggctttttgtgaaggaaggcgtcgaaaagatctggctcatgggcggagagccgctcatccagccggacgaggtggacattgtggcccagctccagcgactggaagggctgaggaccattggtgtcaccaccaatggcatcaacctggcccggctgctgccccagcttcagagggctggtctcagcgccatcaacatcagcctggacacactggtgcctgccaagtttgagttcattgtccgcaggaaaggcttccacaaggtcatggagggcatccacaaggccaatgagccaggctacaaccctgtgaaggtgaactgtgtggtgacgcgaggccttaacgaggatgaactcctggactttgcggccttgatcaagggcctccccctggacgtggccttcatagagtacatgccctttgatggcaacaagtggaacttcaagaagatggtcgctataaggagatgctagaaactgtmtggcagctgtggccagagttggagaagctgtcagagcaggaatccaggacagccaaggcctttaaaatccctggcttccaaggccagatcagcttcatcatgtccatgtctgagcatttctgtgggacctgcaaccacctgcaaatcacagctgacgggaacctcaaggtctgcctctttggaaactctgaggtatctctacgggatcactgtgatctggggcctccaagcaggagctgctgagaatcattggcgctgccgtgggcaggaagaagcagcagcatgcaggcatgttcagtatttcccagatgaagaactggcccatgatcctcatcggtgggtgacccccatcaagacatttttgatgttccacgattccccaccagccaatccaagcatttcctcctgggaccccctccatgttcaaggtctgagatccagaatgaatttctccagtcagatggccactttatggaaaggatacagggtaccccagacccctcttctagcccagcagcag

SEQ ID NO: 719414 - DNA, 1174 bp, Homo sapiens
cttcctcacagacagcttcggcgggcagcacagctacctgcggatctccctcccggagaagtgcaacctcagatgtcagtactgcatgccggaggaaggggtcccgctgacccccaaggccaacctgctgaccacagaagagatgttgaccacaaaagagatcctgaccctcgcctggctttttgtgaaggaaggcgtcgaaaagatctggctcatgggcggagagccgctcatccagccggacgaggtggacattgtggcccagctccagcgactggaagggctgaggaccattggtgtcaccaccaatggcatcaacctggcccggctgctgccccagcttcagagggctggtctcagcgccatcaacatcagcctggacacactggtgcctgccaagtttgagttcattgtccgcaggaaaggcttccacaaggtcatggagggcatccacaaggccaatgagccaggctacaaccctgtgaaggtgaactgtgtggtgacgcgaggccttaacgaggatgaactcctggactttgcggccttgatcaagggcctccccctggacgtggccttcatagagtacatgccctttgatggcaacaagtggaacttcaagaagatggtcgctataaggagatgctagaaactgtatggcagctgtggccagagttggagaagctgtcagagcaggaatccaggacagccaaggcctttaaaatccctggcttccaaggccagatcagcttcatcatgtccatgtctgagcatttctgtgggacctgcaaccacctgcaaatcacagctgaygggaacctcaaggtctgcctctttggaaactctgaggtatctctacgggatcactgtgatctggggcctccaagcaggagctgctgagaatcattggcgctgccgtgggcaggaagaagcagcagcatgcaggcatgttcagtatttcccagatgaagaactggcccatgatcctcatcggtgggtgacccccatcaagacatttttgatgttccacgattccccaccagccaatccaagcatttcctcctgggaccccctccatgttcaaggtctgagatccagaatgaatttctccagtcagatggccactttatggaaaggatacagggtaccccagacccctcttctagcccagcagcag

SEQ ID NO: 719415 - DNA, 2162 bp, Homo sapiens
ttgtctacttttttttttttttagagacagggtcttgctctgttgcccaggctggagtacagtggtgggtcacatagctcactgtaaccctcaaactcctgggctcaagtgatccttgaacttcagcctcccaagaggctgagactacatgcaggtacaaccatgcccagctaatttttttaatttttcatagaaatgggaatctcactatgttgcccaggctggcctggaactcctgatctcaagcaatcctcctgccttggcctcccaaagtcccgggattacaggcatgagccactgtgcctggctttttttgatcatttccttagtgaaatgcatattgttaataatgtgattcactaatttgtcaaacatttgcagagtcctatgcactgcattccctgcactatgacagacaccagggttgtactaattcatgtttgcatccatttgtttttcaacaaatattattgagttctttctgtgagccaagcactgagtgaggcttcgaagggcaggaaggaatgtgaaatagcttaagttcccttacaattttgccttacaggaggcaatgaaggattcatctattcaattgctccttcctgtattaactgactctacgtttactcctgaacatccactactgggcactaagatgcggggtgagtgtagccctgtcctttcggagttcaaggctggacacaccccagaatcccttcccaactctgtcgccattaagtcactcaaccagacatccactagacagaatgaggggcacacataaatatgaaacaatggccagctgaccagtgaggtgtcagtggctggcccaggctctggaccaggggacctcagggaaggccagcacccttcttggtgtcagccagtacttcccctttgctcaccttcattgtgtttgcaatgttatttagcagcagtggcagtgtgtcttgttcagatcagtgtctggcacatagtaggtgcccagaaatacttgtggcctgacttcagccagcttcccagagcaactgagtttctggaggaggaggcctttggggcgggattttgggggaagaccagggggccttggtgtgctggcatgcagaggcaccaatatttagaaaagtgtcacccacataggcttgacaccatggtgtatgcctgtaatcccagcactttaggaggctgaggtgggaggatcacttgaggccaggagttcaagaccagtcagggtaacacagtgagatcctgtctctacaaaaaatttaccaaaaatagggctgggcacagtggctcacacctataatcccagcactttgggaggcccaggagggtggatcacttgagatcaggagttcaagaccagcctggctaacatagcaaaaccccgtctctactaaaaatacaaaaattagccaggcgtggtggcggggacctgtaatcccaggtactcaggaggctgaggcagggagaatagcttgaacctgggaggcggaggttgcagtgagccaagatcacgccattgcactccagcctgggtgacagagtgagactctgtctcaaacaaacaaacaaacaaacaaaaaacaattacaaaaaagaattagccaaatgtagtggtgtgcacctgtagttccagctactcaggaggctgaggtgrgaggattgtttgggcccaggaggtgaaggatgggtcttgtatagtacttgcatagtactctgtaaatgtttgacaaattagtgaatcacattattaacaacatgcatttcactaaggaaatgattaaaaaaaagccaggtacagtggctcacgaaaacaaggcaaaatgataacatttcaactataaatagcagagcaagcagttcctctgtcatcctgcaaaacaatgaggttgcagtgatcccagatcgtgccactggactccagcctgggccacagagcaagaccctggctcaataaatttaatttaatttaaacaaaaaataaaatcttgaaccctgtgatgccaggactcccaagagccacagtcacctaagaattccagccaacatctattgaaggctgactgtgtgccaggcacgggtctaagcactttacatggattcatccaatcctcacagtggctcaagcctgtaatcccgggactttgggaggccaaagc

SEQ ID NO: 719416 - DNA, 2162 bp, Homo sapiens
ttgtctacttttttttttttttagagacagggtcttgctctgttgcccaggctggagtacagtggtgggtcacatagctcactgtaaccctcaaactcctgggctcaagtgatccttgaacttcagcctcccaagaggctgagactacatgcaggtacaaccatgcccagctaatttttttaatttttcatagaaatgggaatctcactatgttgcccaggctggcctggaactcctgatctcaagcaatcctcctgccttggcctcccaaagtcccgggattacaggcatgagccactgtgcctggctttttttgatcatttccttagtgaaatgcatattgttaataatgtgattcactaatttgtcaaacatttgcagagtcctatgcactgcattccctgcactatgacagacaccagggttgtactaattcatgtttgcatccatttgtttttcaacaaatattattgagttctttctgtgagccaagcactgagtgaggcttcgaagggcaggaaggaatgtgaaatagcttaagttcccttacaattttgccttacaggaggcaatgaaggattcatctattcaattgctccttcctgtattaactgactctacgtttactcctgaacatccactactgggcactaagatgcggggtgagtgtagccctgtcctttcggagttcaaggctggacacaccccagaatcccttcccaactctgtcgccattaagtcactcaaccagacatccactagacagaatgaggggcacacataaatatgaaacaatggccagctgaccagtgaggtgtcagtggctggcccaggctctggaccaggggacctcagggaaggccagcacccttcttggtgtcagccagtacttcccctttgctcaccttcattgtgtttgcaatgttatttagcagcagtggcagtgtgtcttgttcagatcagtgtctggcacatagtaggtgcccagaaatacttgtggcctgacttcagccagcttcccagagcaactgagtttctggaggaggaggcctttggggcgggattttgggggaagaccagggggccttggtgtgctggcatgcagaggcaccaatatttagaaaagtgtcacccacataggcttgacaccatggtgtatgcctgtaatcccagcactttaggaggctgaggtgggaggatcacttgaggccaggagttcaagaccagtcagggtaacacagtgagatcctgtctctacaaaaaatttaccaaaaatagggctgggcacagtggctcacacctataatcccagcactttgggaggcccaggagggtggatcacttgagatcaggagttcaagaccagcctggctaacatagcaaaaccccgtctctactaaaaatacaaaaattagccaggcgtggtggcggggacctgtaatcccaggtactcaggaggctgaggcagggagaatagcttgaacctgggaggcggaggttgcagtgagccaagatcacgccattgcactccagcctgggtgacagagtgagactctgtctcaaacaaacaaacaaacaaacaaaaaacaattacaaaaaagaattagccaaatgtagtggtgtgcacctgtagttccagctactcaggaggctgaggtgagaggattgtttgggcccaggaggtgaaggatgggtcttgtatagtacttgcatagtactctgtaaatgtttgacaaattagtgaatcacattattaacaacatgcatttcactaasgaaatgattaaaaaaaagccaggtacagtggctcacgaaaacaaggcaaaatgataacatttcaactataaatagcagagcaagcagttcctctgtcatcctgcaaaacaatgaggttgcagtgatcccagatcgtgccactggactccagcctgggccacagagcaagaccctggctcaataaatttaatttaatttaaacaaaaaataaaatcttgaaccctgtgatgccaggactcccaagagccacagtcacctaagaattccagccaacatctattgaaggctgactgtgtgccaggcacgggtctaagcactttacatggattcatccaatcctcacagtggctcaagcctgtaatcccgggactttgggaggccaaagc

SEQ ID NO: 719417 - DNA, 1057 bp, Homo sapiens
taatgtatatttacatattgctaacaggatgggataagagcacactctagacacaatttgatgaaccttatttggccaagtggaggatgggtgtgtcttctcctttcccagatgccaaaatcccagttcttttatttataatgacaatgactggtgttgaactcctccttacaactcactaagtcctctccagttattctctcttttattttttttgagacggagtcttgctctgttgcccaggttggagtgcagtggcacaatctcggctcactacaacctctgctttccgggttcaagtgattctcctgactcagcctcctgagtagctgggattacaggcacctgccactatgcccagctaattattgtatttttaatggagacaggatttcgccatgttgcccaggcaggtctcaaactcctgacctcaggtgagccacctgcctcagcctcccagctgggattacaggtgtgaaccaccgtgccagccccattctctcttttaatcctaacactcactctgggaggtcagtctgtgttgcctaattatcctcattttattgagaaggaaattcaagttcaaagaggctccttgacttgccagcttgatcccgtgtcctcccaaccagccatcgcctcctctttatagtttgtcgggtgcagcctgcatgctccaggcaagtgacttctcagcacagccgctggcctccggctgagacctctggcctctgtgcagggccagggatgtgggcagagtcgcaggcggctgccaggagccagactctgcccagcgccctggggatcccctcttgccagtgcctgaaatgcctgcttcgtcccttagcaactgctggtggcatcaacagtaaagggctgtgatcctgtttcagagcttctgaggtcttccaaaggtgtttgctctttctaatcccaattagatactcctgaggccaataccaaccttgtagggcacaggcaggggctggaccactcagcaccctccctactccccaggccttggyaggccctgcccttgcagctggccctgagctca

SEQ ID NO: 719418 - DNA, 894 bp, Homo sapiens
ttctaaacaagcaaaaggtcatgtttaaattacaatgtatttgtacttgttataaagaaacaaagcctagagtctgctctaggatcatgtttatgtcatgctatagatttttacatcaggattttggatttttgtgttgttcttactattttagttttgtttgtttgtttatttgtttatttatwatttggagacagagttttgctcttgttgcccaggctggagtgccatggcacaatctcggctcatcacaacctccacctcccggattcaagtgattctcctgcctcaggcccctgagtagctgggattatagacatgcaccaccatgctcagctaattttgtatttttagtagagatggggtttctccatgttggtcaggctagtctcaaactcgaactcccaacctcaggtgatccacctgcctccgcctcccaaagtgctgggattataggagtgagccaccatgaccggctgatttttttattttcttacttgactgggcattttcccataattacaaacacttcaaaactaaaattattgtagaaaattgtagttactatttttttcacataaaaatatgcgattttccttgaaattcccaacaagttttcctaaaaccattctagatgtgcaaataattatttttcttttctttttttttttttttttttttttttactttaagttctgggatacacatgcggaacatgcaggtttgttacataggtatacatgtgccgtggtgctttgctgcacccatcaactcatcatctaggttttaagcctcatatgcattaggtatttgtcctaatgctctccctcgccttgctccccaccccctacaggccccggtgtgtgatgctctcctccctgtgtccatgtgttc

SEQ ID NO: 719419 - DNA, 894 bp, Homo sapiens
ttctaaacaagcaaaaggtcatgtttaaattacaatgtatttgtacttgttataaagaaacaaagcctagagtctgctctaggatcatgtttatgtcatgctatagatttttacatcaggattttggatttttgtgttgttcttactattttagttttgtttgtttgtttatttgtttatttattatttggagacagagttttgctcttgttgcccaggctggagtgccatggcacaatctcggctcatcacaacctccacctyccggattcaagtgattctcctgcctcaggcccctgagtagctgggattatagacatgcaccaccatgctcagctaattttgtatttttagtagagatggggtttctccatgttggtcaggctagtctcaaactcgaactcccaacctcaggtgatccacctgcctccgcctcccaaagtgctgggattataggagtgagccaccatgaccggctgatttttttattttcttacttgactgggcattttcccataattacaaacacttcaaaactaaaattattgtagaaaattgtagttactatttttttcacataaaaatatgcgattttccttgaaattcccaacaagttttcctaaaaccattctagatgtgcaaataattatttttcttttctttttttttttttttttttttttttactttaagttctgggatacacatgcggaacatgcaggtttgttacataggtatacatgtgccgtggtgctttgctgcacccatcaactcatcatctaggttttaagcctcatatgcattaggtatttgtcctaatgctctccctcgccttgctccccaccccctacaggccccggtgtgtgatgctctcctccctgtgtccatgtgttc

SEQ ID NO: 719420 - DNA, 894 bp, Homo sapiens
ttctaaacaagcaaaaggtcatgtttaaattacaatgtatttgtacttgttataaagaaacaaagcctagagtctgctctaggatcatgtttatgtcatgctatagatttttacatcaggattttggatttttgtgttgttcttactattttagttttgtttgtttgtttatttgtttatttattatttggagacagagttttgctcttgttgcccaggctggagtgccatggcacaatctcggctcatcacaacctccacctcccggattcaagtgattctcctgcctcaggcccctgagtagctgggattatagacatgcaccaccatgctcagctaattttgtatttttagtagagatggggtttctccatgttggtcaggctagtctcaaactcgaactcccaacctcaggtgatccacctgcctccgcctcccaaagtgctgggattataggagtgagccaccatgaccggctgatttttttattttcttacttgactgggcattttcccataattacaaacacttcaaaactaaaattattgtagaaaattgtagttactatttttttcacataaaaatatgcgattttccttgaaattcccaacaagttttcctaaaaccattctagatgtgcaaataattatttttcttttctttttttttttttttttttttttttactttaagttctgggatacacatgcggaacatgcaggtttgttacataggtatacatgtgccgtggtgctttgctgcacccatcaactcatcatctaggttttaagcctcatatgcattaggtatttgtcctaatgctctccctcgccttgctccccaccccctacaggccccggtgtgtgatgctcycctccctgtgtccatgtgttc

SEQ ID NO: 719421 - DNA, 617 bp, Homo sapiens
caaaaactgtaagaagtgaaaagatgtattaaacaactgtctttgatgcaggattttggctcctttgctcagctaggtccaggttcttgtttcatgaccaggaagaattaggcacacagacatcaaagagtgaggggagttgaatttatgaagcaaaaggaaagctctcagcaaaaagaggggatgtaggggttggttctcctacctgaagacaggaaatttccccaatatggctgagcttggggctttttatgggctcagaatagggagtgtgygctgattggtttgtgagtatccaaaaaaggtcaaagtgaagacgccactcaaatatgggcgtgacagtgtagaaaactaattaggaaagggtagatatgtgtaaaataggtgtagaatggggaacaatcagaggaaagtgcgccaaatgggaaggtgggttctcaatccagttggaggatatccctaggacagtttccagcttgaaggtcaggtttcactggggacccaccccaactgcctaggcattatctgccttctgccactatcatcggcaagcacctgatagcaagggttaaagttcctgagagaaggaaaacacacatggcaaatctcatattcat

SEQ ID NO: 719422 - DNA, 671 bp, Homo sapiens
tccctttccctaagaagtaggatatgtaagcatctgtaccccattgggatattaggcaattattctgtgattctcctccatgcacactaagaaatgtgtatgccatttcgcctattattctgccttttgtgagttgattttttcagtcaatcttcagagggcaaaggggaagttttcccttagcccctacaatatgtgggcatatgcatatgtacctgtcaaatgagcacacttaaagagggactcaaacaatcactaagagcagtgccaakttcataaatctaccacttgctacttttatcatttttattttactgtggtccaatacatccttactaacataagttctagcttataattaattctcagtgggcacactatttcactgtttttaaaaatctccttatacctttaaacattgctattttaaaaacttgccaaggtcatcacagagtaacaaagatttcaaaataccacagatttattattaaagttattttacaagctaaattatacattaggagttggaaataaaaaaggatgtacaagtttcaataagtagccatgactgacagaaaaaagtatgaaagaatgcttatcttgtatgttttcacatgccctgtgtccaccacatgttttctggaaaggaaacttctccttatatggctact

SEQ ID NO: 719423 - DNA, 1038 bp, Homo sapiens
aacaaggcaattttacaatgcttacatttcatacctcaataagaaaagcaaaagtatctattcctttataaatgtattattttattatttccattaaaaaatcatgtagtaggccgggcaaggtggctcatgcctgtaatcctagcactttaggaggggcagattgccagagctcaggagttcgagacaagcctgggcaacacggcgaaaccctgtctctactaaaatacaaaaataggctggcgcgacagtgtgcgcctgtagttccagctactcgggaggctgaggcaggagaattgcttgaacccaggaggcagaagttgcagtgagccaagatcgcaccactgcaccccagccttgagcaagactccatttcaaaaaaaaaaaaaatgtagtaaacaattagtcatatggaaacacttctaggaggcaccaagtttcatctaaaaaatacagcattaaactctgaaataaagataacaggatatagaacagagatattcactgtcagaaatttatcctgcaaaaacaactgatgttttcatgaattcatgtaactcacctattatctacaacattttcttctggaaatgcattcattttctacagccaaaatggaagagatttttccctattcttttccttggtagcattccaaaatctaagccttggaattctgtttgaaatcacccagccataaaaaaaaaaagcctgagaaaatttctaaactcactctaagaaagaaaaaggtacatgagaatttttaacaaaaaaaaaagatagatttttctgaagcccacctcttttatgcsctttgtaaatattttcttacctttcaagctctactaaaaaattgcaatttagagttaaaaaactgaagtcaatataagtgaacaaatcttttcaaagtgacaaacccagggagtggcagtgctgataagaaaacagatgtgtccgactcatgtgtcaagttcaatcacttgagagattctcctacccatcccgctcacttaagtcacttaagtactcaataaccac

SEQ ID NO: 719424 - DNA, 914 bp, Homo sapiens
agcctttggtatcagaccactttatattgagggtttttgttatttatttactgcatgttaaaggaaaagctaattcaaatgtaatataaaatatatcagcacatattaaaagatagaaaaattttcaattcctgcaataggatggcattattttgataccaaatcccagcaataataaaagaaataactctacatccatgtcccttataaatatagatgcaaaaatttaataaatagaattcaactttaaaaataattatcatgatcaagcatgatttattctaagaaaggaaggctgtcgtgatactcagaaatatcgtactcagagaataaaatacataagagcaataaacaatatagggaatacaacaaaattatattttgagagggtaaaaagacattttgtaaaagttcacagcaacgacagatggcaaatatattgatccattctggaactgcaagcacaatgattgatgatgagaatgcaggttagttttggaagacaagggtagggagataacaagggctatctcataagaactcattaacaaaatttttgtttcagtccttcattcactatttaatttttaatttatttttaaattagcaaataaaattgtattatttatcatgtgcaacatgatgttttaaaaatatgtgttcattgcggaatagctaaattgagctaattcacatatgcgttaccattcatgcttatcattttttcgtgaggaaaacacttaaaatctacactcttagacattttcaagaatacaatacatttttactaactatrgtcactatgttgcacaatagatctccagaagtttttcctcccattctgactaaaattttaagttctttgaccaacaccttcccccaccaagacccctactggcccctggtagacacca

SEQ ID NO: 719425 - DNA, 914 bp, Homo sapiens
agcctttggtatcagaccactttatattgagggtttttgttatttatttactgcatgttaaaggaaaagctaattcaaatgtaatataaaatatatcagcacatattaaaagatagaaaaattttcaattcctgcaataggatggcattattttgataccaaatcccagcaataataaaagaaataactctacatccatgtcccttataaatatagatgcaaaaatttaataaatagaattcaactttaaaaataattatcatgatcaagcatgatttattctaagaaaggaaggctgtcgtgatactcagaaatatcgtactcagagaataaaatacataagagcaataaacaatatagggaatacaacaaaattatattttgagagggtaaaaagacattttgtaaaagttcacagcaacgacagatggcaaatatattgatccattctggaactgcaagcacaatgattgatgatgagaatgcaggttagttttggaagacaagggtagggagataacaagggctatctcataagaactcattaacaaaatttttgtttcagtccttcattcactatttaatttttaatttatttttaaattagcaaataaaattgtattatttatcatgtgcaacatgatgttttaaaaatatgtgttcattgcggaatagctaaattgagctaattcacatatgcgttaccattcatgcttatcattttttcgtgaggaaaacacttaaaatctacactcttagacattttcaagaatacaatacatttttactaactatagtcrctatgttgcacaatagatctccagaagtttttcctcccattctgactaaaattttaagttctttgaccaacaccttcccccaccaagacccctactggcccctggtagacacca

SEQ ID NO: 719426 - DNA, 1050 bp, Homo sapiens
ttaattttgtggcaacaatattttggtgataatattgtgatttataagaggcacataatgtctttttgcttttttgtgtgtgatgttagcaaccattgataatctttggcaagaatcataatttctacagaggtttttaagtttgttctgaattaatagtttaaaaatatatggtgtcattgttaagaaactgtttatgctcaatakaatgtagcttcctcttttattatataaaagctacaaatttctatttacttctcaagatttttggtcaatagaaaatatcaacagaaacgaaatagacagaaacacaagatgttgcatatgtggttttaaaagaaaaataatttccaagttcattaaagataagaaaggcagataagaaaataaagcagcaggacacactcaaattacttaattttgttatggccaggggaagcatgcttatttgatagcttttcattcctggaaaccaaataaaaatacataagtagaaagaggtcagcattcctgtcttagcttatttgctgctgctataacaggatatctgagactggatactatacaaggaaaaaattatttggctcactgttctggagtctggaaagtccaaaagcatggcactggcatctggtgagggtctttgtgctgcattatctcatagcaagaggaaaagacaagagaatgcatgtgaaagaaagaaggggcaaaaaagcaaggaagaaagggagggaaactcaatccttcttctcaggaaaccactccacaataatgaaattaatccattcgtgaagacagagccttcatgtgattatctaatcaccttttaaatttccacttctcaacaccactgcattagggattacgttttcaacacatggtttttgagggacttattcaaactgtagaaatttctaaatgctttcctgagaaattcagtgaattagcttttccaaaaaaaaaaaaaaaaggcttgaaaactgttctttactgtgctgcaaatctgagtgaaatttccatcctcaaccctaacagaaagaaagaaatact

SEQ ID NO: 719427 - DNA, 1050 bp, Homo sapiens
ttaattttgtggcaacaatattttggtgataatattgtgatttataagaggcacataatgtctttttgcttttttgtgtgtgatgttagcaaccattgataatctttggcaagaatcataatttctacagaggtttttaagtttgttctgaattaatagtttaaaaatatatggtgtcattgttaagaaactgtttatgctcaatataatgtagcttcctcttttattatataaaagctacaaatttctatttacttctcaagatttttggtcaatagaaaatatcaacagaaacgaaatagacagaaacacaagatgttgcatatgtggttttaaaagaaaaataatttccaagttcattaaagataagaaaggcagataagaaaataaagcagcaggacacactcaaattacttaattttgttatggccaggggaagcatgcttatttgatagcttttcattcctggaaaccaaataaaaatacataagtagaaagaggtcagcattcctktcttagcttatttgctgctgctataacaggatatctgagactggatactatacaaggaaaaaattatttggctcactgttctggagtctggaaagtccaaaagcatggcactggcatctggtgagggtctttgtgctgcattatctcatagcaagaggaaaagacaagagaatgcatgtgaaagaaagaaggggcaaaaaagcaaggaagaaagggagggaaactcaatccttcttctcaggaaaccactccacaataatgaaattaatccattcgtgaagacagagccttcatgtgattatctaatcaccttttaaatttccacttctcaacaccactgcattagggattacgttttcaacacatggtttttgagggacttattcaaactgtagaaatttctaaatgctttcctgagaaattcagtgaattagcttttccaaaaaaaaaaaaaaaaggcttgaaaactgttctttactgtgctgcaaatctgagtgaaatttccatcctcaaccctaacagaaagaaagaaatact

SEQ ID NO: 719428 - DNA, 1116 bp, Homo sapiens
tttaataagaaaacagactcaaggctggacatggtggstcatgcctgtaatcctaacactttgggagggtgaggcaggaggatcccttgagcccgggagtttgagaccagcctgggcaacatagggagactgtctctaaaaaacaaacaacaagaacaaaacagactcaaacacttgggcttagaaaggtacttggctgacaatatgcttgaggcaaaattaaacatggatgagactggggagagaaagagaagacttcctagaaaattcattttgttgaattttaattctctttccctttctttaacctggtaaggcaaattatccaatatgatataatacacagtttggcataaatgcaaaatgctagaaagcattatggcagtgtttctgaactttccaccactcctttcagcatcaccactgaatagccaattaacttgataaagttttttcactgtattgctcttggctcaaatcagttgtgtaaacagtggctttagagtgcaacccttcttcccttagtttcacttggagaccacctcaatacatatcaagaacacagcaaaagctggagatagaaaccgccgttctttacctacacacatacgcatgaggagatgacaccatgagtcttctcagtaacttctaaacctctcagtcagatcaagaattagaaacaaagagttttcagagatctgagaaggaggttggaaaacaggtttctttggagacagcgtattgctgagtctattgttcccaccaacacttgggaagagcacagtcctgccactttggaattatatgtttagtgagggggtcctaaaagagtcagttgctcaaagagtatgggcatgtatcacctccagttgccaaatttatgcctcaaaggacaaaaacagatcatggactgggacctgactgtatccaagatctctagaggagattgtaggatttggcagaggttccaggagagtactgctgtattggaattgtcctgacttccctgagtatgtttgtgctaaagatgtttaagcatttttaaagattatgtagaccatggaatgtgggggataacataaaatgattgtattcaatttcattatactagggtag

SEQ ID NO: 719429 - DNA, 1116 bp, Homo sapiens
tttaataagaaaacagactcaaggctggacatggtgggtcatgcctgtaatcctaacactttgggagggtgaggcaggaggatcccttgagcccgggagtttgagaccagcctgggcaacatagggagactgtctctaaaaaacaaacaacaagaacaaaasagactcaaacacttgggcttagaaaggtacttggctgacaatatgcttgaggcaaaattaaacatggatgagactggggagagaaagagaagacttcctagaaaattcattttgttgaattttaattctctttccctttctttaacctggtaaggcaaattatccaatatgatataatacacagtttggcataaatgcaaaatgctagaaagcattatggcagtgtttctgaactttccaccactcctttcagcatcaccactgaatagccaattaacttgataaagttttttcactgtattgctcttggctcaaatcagttgtgtaaacagtggctttagagtgcaacccttcttcccttagtttcacttggagaccacctcaatacatatcaagaacacagcaaaagctggagatagaaaccgccgttctttacctacacacatacgcatgaggagatgacaccatgagtcttctcagtaacttctaaacctctcagtcagatcaagaattagaaacaaagagttttcagagatctgagaaggaggttggaaaacaggtttctttggagacagcgtattgctgagtctattgttcccaccaacacttgggaagagcacagtcctgccactttggaattatatgtttagtgagggggtcctaaaagagtcagttgctcaaagagtatgggcatgtatcacctccagttgccaaatttatgcctcaaaggacaaaaacagatcatggactgggacctgactgtatccaagatctctagaggagattgtaggatttggcagaggttccaggagagtactgctgtattggaattgtcctgacttccctgagtatgtttgtgctaaagatgtttaagcatttttaaagattatgtagaccatggaatgtgggggataacataaaatgattgtattcaatttcattatactagggtag

SEQ ID NO: 719430 - DNA, 1116 bp, Homo sapiens
tttaataagaaaacagactcaaggctggacatggtgggtcatgcctgtaatcctaacactttgggagggtgaggcaggaggatcccttgagcccgggagtttgagaccagcctgggcaacatagggagactgtctctaaaaaacaaacaacaagaacaaaacagactcaaacacttgggcttagaaaggtacttggctgacaatatgcttgaggcaaaattaaacatgratgagactggggagagaaagagaagacttcctagaaaattcattttgttgaattttaattctctttccctttctttaacctggtaaggcaaattatccaatatgatataatacacagtttggcataaatgcaaaatgctagaaagcattatggcagtgtttctgaactttccaccactcctttcagcatcaccactgaatagccaattaacttgataaagttttttcactgtattgctcttggctcaaatcagttgtgtaaacagtggctttagagtgcaacccttcttcccttagtttcacttggagaccacctcaatacatatcaagaacacagcaaaagctggagatagaaaccgccgttctttacctacacacatacgcatgaggagatgacaccatgagtcttctcagtaacttctaaacctctcagtcagatcaagaattagaaacaaagagttttcagagatctgagaaggaggttggaaaacaggtttctttggagacagcgtattgctgagtctattgttcccaccaacacttgggaagagcacagtcctgccactttggaattatatgtttagtgagggggtcctaaaagagtcagttgctcaaagagtatgggcatgtatcacctccagttgccaaatttatgcctcaaaggacaaaaacagatcatggactgggacctgactgtatccaagatctctagaggagattgtaggatttggcagaggttccaggagagtactgctgtattggaattgtcctgacttccctgagtatgtttgtgctaaagatgtttaagcatttttaaagattatgtagaccatggaatgtgggggataacataaaatgattgtattcaatttcattatactagggtag

SEQ ID NO: 719431 - DNA, 1116 bp, Homo sapiens
tttaataagaaaacagactcaaggctggacatggtgggtcatgcctgtaatcctaacactttgggagggtgaggcaggaggatcccttgagcccgggagtttgagaccagcctgggcaacatagggagactgtctctaaaaaacaaacaacaagaacaaaacagactcaaacacttgggcttagaaaggtacttggctgacaatatgcttgaggcaaaattaaacatggatgagactggggagagaaagagaagacttcctagaaaattcattttgttgaattttaattctctttccctttctttaacctggtaaggcaaattatccaatatgatataatacacagtttggcataaatgcaaaatgctagaaagcattatggcagtgtttctgaactttccaccactcctttcagcatcaccactgaatagccaattaacttgataaagttttttcactgtattgctcttggctcaaatcagttgtgtaaacagtggctttagagtgcaacccttcttcccttagtttcacttggagaccacctcaatacatatcaagaacacagcaaaagctggagatagaaaccgccgttctttacctacacacatacgcatgaggagatgacaccatgagtcttctcagtaacttctaaacctctcagtcagatcaagaattagaaacaaagagttttcagagatctgagaaggaggttggaaaacaggtttctttggagacagcgtattgctgagtctattgttcccaccaacacttgggaagagcacagtcctgccactttggaattatatgtttagtgagggggtcctaaaagagtcagttgctcaaagagtatgggcatgtatcacctccarttgccaaatttatgcctcaaaggacaaaaacagatcatggactgggacctgactgtatccaagatctctagaggagattgtaggatttggcagaggttccaggagagtactgctgtattggaattgtcctgacttccctgagtatgtttgtgctaaagatgtttaagcatttttaaagattatgtagaccatggaatgtgggggataacataaaatgattgtattcaatttcattatactagggtag

SEQ ID NO: 719432 - DNA, 649 bp, Homo sapiens
tgggggtaaagagatcctataagtcccagacctactatctaactgaccttaaacaagtacttaatctctccaaatctcagtttcttcaactgtaaacragattattattatcctcttttactaaagttgtaaggataaacaaaaatcaagctcacagtaagcattaatattaactattatatatagaaagataatgatattttctttagctcttgattccttggaatattttaaatcaactggtggttgaagaatatgaaaataaaagaagtggctgggcacagtggctcaagcctgtaatcccagcactttgggaggccaaggtgggcagattgccggaaatcaagagtttgagaccagcctgggaaacatggtgatacccatctctataaaaaaaattagctgagtgtggtggtgcgcacctgtagtcccagctactctgggggctgaggtgggaagaaaatcgcttgagcccaggaggttgaagctgcagtgagttgaggtggtgccactgcactccagcgtgggtgacagagcgagaccctatctctaaaaaaaaaaaaaaaaaagaaaagaacttagttacctcaacctaccaaatattcaatattaatattcacaaatgaagtgtcacatggttcatccacat

SEQ ID NO: 719433 - DNA, 570 bp, Homo sapiens
ggagatgccaatgaagacaattagttaccattttatgccttttccatcagcagaagttaagcctgacaatgccaagtcttgatgaacatgtggacccacaggatccttttacatagttggtgggaatgtaagcggacgtcccctgggaggcattgccttctatagttacatgttcatgtaccctggaacccagcagccccactcctgtactcagagtaaccttgcctgtgtgcacgtgaatatgagcatggatatgaatattcattgcagcactatgcacaatatcaaaaacctggaagcaacccaaatgcccagcacagagagagtgaactaacaaaccctgtgktattatacaagagtcagaaccaatgaattatagcaatgcagaaaagcacaaattagttttaagtgaaaagttgaaaagtaagtccgataaattaacattcaccatttgtttttttttaataaaggtaaaaatcactaaaataaacagcccactttaacaaaaaataggtgcaataaaactataaaagagaaagcaagggagtgatgaacagaggttgtagggtg

SEQ ID NO: 719434 - DNA, 880 bp, Homo sapiens
agctgagttctcctctgcacagacttcagagatacagcgaaggcggagcagtgttctcctcagcacagacccgggcggacgggtgggccgggggcaccgcaagggcggagctgcgttctgctcagcacagacccgggggacacagcgaaggcagagcagcgttctcctcagcacagaccttgggarcactgcatcgctttgggcagaataggtgaatgaatgaatgaatgaatgagtgtaatcacatgccctccctttccctgtttatcaagcctggcatcactttagaatctcttgttagaatttatgacacctaggctttacctcagaacctgagagtggcactcaggtataagcacgtgtttccaagctccccaggtattccatagcacagccaagtttgagacagtggggtctaagaaccatgtagaactaatgagaatcctgaagtgtctgtgataaaggtaataagctttttgtaagattacagaggacatagattaagttggaaagcctgagtgttgagattcctaggctcaggaattttaatttaaccaaagttaaatgtcttaacttgcaaagacatgaatctgtagattccagattaatggcaggtgtgaattgtacaatagaaactgatctagcctacatgtcttcttggactggcagactatgttaatctttttattttatgacaagttcaacattattcccttttgtactgaattttagattactgattttgggcactccaagattttgggagagacctctctcatgagaactttatgtggaacccccacctgcttggctcctgaagttcttgtttctgttgggactgctgggtataaccgtgctgtggactgctggagtttaggag

SEQ ID NO: 719435 - DNA, 618 bp, Homo sapiens
ataaaaagaaaacatattattgatatatttaggaagaatatttgataaaattaagcaaccatcaatatgtttcatgataatatgtaagtagatggaaatttatacaatatgacgaagaatattaaccaaaaacatactgtaaattttatagttacagtgaattgttgaatgtatttcctttggcatcagaaatgccatgtgtccctgatcttacaaattctattaatgatattacaagttctacttagtgtagtaataaaagaaaaagaaataaagaccacaagattacaaaggaagaaataactctcattattcagagatcatacaattacatatatagaaaatccaaaagcatccattggcaaactataggaatcaataaataaatttagcatgttggttgtataaaagtcaatatatagattaatttttcttatatgcaataaaaattagaaaataaaagtttaaaatattcataataaaattaagaatatcaaataactgagaataattataataaawtatatttaaattgacaccaaatgctgcaaaactgtgctgtaagaaatagcagaatatatttttgtgtatatacatacacgacatacatatgtacaa

SEQ ID NO: 719436 - DNA, 1204 bp, Homo sapiens
cggttcgtagaatcagagagaacactgcttgccttcatgtctgtaccacaataaatctgccaactgckgtcaaagtctctggattcctgccccctcattttatttagtctattatggagcagaaggagtgagaaagattttgcttcctattttgttttgcaaagcgtttctaagaaaaacaacccgtgttctgaaaacgagattctgagtgtcccctgggcgtgatgaaaacaaactttgggaatccaagggcctgagaggcagagtgaatgtcattcgcatttccctgcgaatgacaaagtcactttttatttatttttattattattattattattattattattattatagattcaggggatccacgggcagctttgtgacctgaggatattgtacgttgctgaggtttggggtatgaatcatcccgtcacccaggcactgagcattgtacattcctgaggtatataatgtgtactaaaaataaaatgtatatttatatatgcactaatgattcaacttgattccttgtaattaagaaaaacaaaccccaaattctagaggagttctagaaatatgtaagaagagaggccaggcgcagtggctcatgcctgtaatcccagcactttgggaggccgaggcaggtggatctcctaaggtcaggagttcgagaccagcctggccaacatggtgaaaccccgtctctgctaaaaatacaaaaattagccaggtgtggtggtgggtgcctgtagtcccagctacttgggaggctgaggtagaagaattgcttgaatccaggaggcagaagttgcagggagccgagattgcaccactgcactccagcctgggtcacagagcgagactccatctcaaaaaaaaaaaaaaaaaaaaagagagcgagagagaaaacaaacaagcaagaaaatgcaacagaaaaatccgtgacccaaagctctctccagttgctgctttctgccggaaattcaaagaatctcagggtagtttttcaacccttgtacccccgcccctgcttcctgctctattagtactgagggtctgtggtgccccttcattgtgtccaggtgcaggcaatgtttagctcccgcctataagcgagaacatgtggtatttgattttctgttcctggcgttaattcactaagcatagtgcccttcaacttcatccacgtgactacaaagggcat

SEQ ID NO: 719437 - DNA, 1204 bp, Homo sapiens
cggttcgtagaatcagagagaacactgcttgccttcatgtctgtaccacaataaatctgccaactgcggtcaaagtctctggattcctgccccctcattttatttagtctattayggagcagaaggagtgagaaagattttgcttcctattttgttttgcaaagcgtttctaagaaaaacaacccgtgttctgaaaacgagattctgagtgtcccctgggcgtgatgaaaacaaactttgggaatccaagggcctgagaggcagagtgaatgtcattcgcatttccctgcgaatgacaaagtcactttttatttatttttattattattattattattattattattattatagattcaggggatccacgggcagctttgtgacctgaggatattgtacgttgctgaggtttggggtatgaatcatcccgtcacccaggcactgagcattgtacattcctgaggtatataatgtgtactaaaaataaaatgtatatttatatatgcactaatgattcaacttgattccttgtaattaagaaaaacaaaccccaaattctagaggagttctagaaatatgtaagaagagaggccaggcgcagtggctcatgcctgtaatcccagcactttgggaggccgaggcaggtggatctcctaaggtcaggagttcgagaccagcctggccaacatggtgaaaccccgtctctgctaaaaatacaaaaattagccaggtgtggtggtgggtgcctgtagtcccagctacttgggaggctgaggtagaagaattgcttgaatccaggaggcagaagttgcagggagccgagattgcaccactgcactccagcctgggtcacagagcgagactccatctcaaaaaaaaaaaaaaaaaaaaagagagcgagagagaaaacaaacaagcaagaaaatgcaacagaaaaatccgtgacccaaagctctctccagttgctgctttctgccggaaattcaaagaatctcagggtagtttttcaacccttgtacccccgcccctgcttcctgctctattagtactgagggtctgtggtgccccttcattgtgtccaggtgcaggcaatgtttagctcccgcctataagcgagaacatgtggtatttgattttctgttcctggcgttaattcactaagcatagtgcccttcaacttcatccacgtgactacaaagggcat

SEQ ID NO: 719438 - DNA, 1204 bp, Homo sapiens
cggttcgtagaatcagagagaacactgcttgccttcatgtctgtaccacaataaatctgccaactgcggtcaaagtctctggattcctgccccctcattttatttagtctattatggagcrgaaggagtgagaaagattttgcttcctattttgttttgcaaagcgtttctaagaaaaacaacccgtgttctgaaaacgagattctgagtgtcccctgggcgtgatgaaaacaaactttgggaatccaagggcctgagaggcagagtgaatgtcattcgcatttccctgcgaatgacaaagtcactttttatttatttttattattattattattattattattattattatagattcaggggatccacgggcagctttgtgacctgaggatattgtacgttgctgaggtttggggtatgaatcatcccgtcacccaggcactgagcattgtacattcctgaggtatataatgtgtactaaaaataaaatgtatatttatatatgcactaatgattcaacttgattccttgtaattaagaaaaacaaaccccaaattctagaggagttctagaaatatgtaagaagagaggccaggcgcagtggctcatgcctgtaatcccagcactttgggaggccgaggcaggtggatctcctaaggtcaggagttcgagaccagcctggccaacatggtgaaaccccgtctctgctaaaaatacaaaaattagccaggtgtggtggtgggtgcctgtagtcccagctacttgggaggctgaggtagaagaattgcttgaatccaggaggcagaagttgcagggagccgagattgcaccactgcactccagcctgggtcacagagcgagactccatctcaaaaaaaaaaaaaaaaaaaaagagagcgagagagaaaacaaacaagcaagaaaatgcaacagaaaaatccgtgacccaaagctctctccagttgctgctttctgccggaaattcaaagaatctcagggtagtttttcaacccttgtacccccgcccctgcttcctgctctattagtactgagggtctgtggtgccccttcattgtgtccaggtgcaggcaatgtttagctcccgcctataagcgagaacatgtggtatttgattttctgttcctggcgttaattcactaagcatagtgcccttcaacttcatccacgtgactacaaagggcat

SEQ ID NO: 719439 - DNA, 1027 bp, Homo sapiens
tgtcaccactcctatgcaacatagtgttggaakttatggccagggcaattaggcaggagaaagaaataaagggtattcaattaggaaaagaggaagtcaaattgtccctgtttgcagacgacgtgattgtatatttagaaaaccccatggtcccagcccaaaatctccttaagctgataagcaactttagcaaactctcaggatacaaaatcaatgtgcaaaaatcacaagcattcctatacaccaataacagacaaacagagagccaaatcatgagtgaacctcccattcacaattgcttccaagagaatggaatacctaggaatgtggaaacacattgtgagggtggaatactttgtagtatgaaggggaggtctctaagtcatcttgatgcaaaggaggcaccccttaacaggaatgtgttggtcatatctgcggacgatgttgaaatataagggatatgagtttacaatatttttagatgtaataatccagatgctcttactccatgagagtttcattctttcctggcctgagtttttaatgtggttatagcagacctgcttagtttgagagtttaagtttttttacagctctcttctactcttatgattgagactttggtttggtcctcaacattctttgcctctagctgcagtaaatgagatcctctttacatgctacttgctttcatgcgctggcattcacgcttagcttttaatttcagattaatgaatcatatttttatctttttcttcaaggcatacttcaagtttagcaaagctactcaattccactctccttataactactacgtctccaatatttctcaaatatttaacacatcacaccacatcatctagtgcattctcttctactgagtgtataccattctcttctactgagtgcataccattctcttctactgagtgcataccatccctccgccaatgaagattttaaaaatggcactgttcccttgtgccaggggctgcctttacttatttatcaccattgatggtgtcct

SEQ ID NO: 719440 - DNA, 1027 bp, Homo sapiens
tgtcaccactcctatgcaacatagtgttggaatttatggccagggcaattaggcaggagaaagaaataaagggtattcaattaggaaaagaggaagtcaaattgtccctgtttgcagacgacgtgattgtatatttagaaaaccccatggtcccagcccaaaatctccttaagctgataagcaacttyagcaaactctcaggatacaaaatcaatgtgcaaaaatcacaagcattcctatacaccaataacagacaaacagagagccaaatcatgagtgaacctcccattcacaattgcttccaagagaatggaatacctaggaatgtggaaacacattgtgagggtggaatactttgtagtatgaaggggaggtctctaagtcatcttgatgcaaaggaggcaccccttaacaggaatgtgttggtcatatctgcggacgatgttgaaatataagggatatgagtttacaatatttttagatgtaataatccagatgctcttactccatgagagtttcattctttcctggcctgagtttttaatgtggttatagcagacctgcttagtttgagagtttaagtttttttacagctctcttctactcttatgattgagactttggtttggtcctcaacattctttgcctctagctgcagtaaatgagatcctctttacatgctacttgctttcatgcgctggcattcacgcttagcttttaatttcagattaatgaatcatatttttatctttttcttcaaggcatacttcaagtttagcaaagctactcaattccactctccttataactactacgtctccaatatttctcaaatatttaacacatcacaccacatcatctagtgcattctcttctactgagtgtataccattctcttctactgagtgcataccattctcttctactgagtgcataccatccctccgccaatgaagattttaaaaatggcactgttcccttgtgccaggggctgcctttacttatttatcaccattgatggtgtcct

SEQ ID NO: 719441 - DNA, 1027 bp, Homo sapiens
tgtcaccactcctatgcaacatagtgttggaatttatggccagggcaattaggcaggagaaagaaataaagggtattcaattaggaaaagaggaagtcaaattgtccctgtttgcagacgacgtgattgtatatttagaaaaccccatggtcccagcccaaaatctccttaagctgataagcaactttagcaaactctcaggatacaaaatcaatrtgcaaaaatcacaagcattcctatacaccaataacagacaaacagagagccaaatcatgagtgaacctcccattcacaattgcttccaagagaatggaatacctaggaatgtggaaacacattgtgagggtggaatactttgtagtatgaaggggaggtctctaagtcatcttgatgcaaaggaggcaccccttaacaggaatgtgttggtcatatctgcggacgatgttgaaatataagggatatgagtttacaatatttttagatgtaataatccagatgctcttactccatgagagtttcattctttcctggcctgagtttttaatgtggttatagcagacctgcttagtttgagagtttaagtttttttacagctctcttctactcttatgattgagactttggtttggtcctcaacattctttgcctctagctgcagtaaatgagatcctctttacatgctacttgctttcatgcgctggcattcacgcttagcttttaatttcagattaatgaatcatatttttatctttttcttcaaggcatacttcaagtttagcaaagctactcaattccactctccttataactactacgtctccaatatttctcaaatatttaacacatcacaccacatcatctagtgcattctcttctactgagtgtataccattctcttctactgagtgcataccattctcttctactgagtgcataccatccctccgccaatgaagattttaaaaatggcactgttcccttgtgccaggggctgcctttacttatttatcaccattgatggtgtcct

SEQ ID NO: 719442 - DNA, 1027 bp, Homo sapiens
tgtcaccactcctatgcaacatagtgttggaatttatggccagggcaattaggcaggagaaagaaataaagggtattcaattaggaaaagaggaagtcaaattgtccctgtttgcagacgacgtgattgtatatttagaaaaccccatggtcccagcccaaaatctccttaagctgataagcaactttagcaaactctcaggatacaaaatcaatgtgcaaaaatcacaagcattcctatacaccaataacagacaaacwgagagccaaatcatgagtgaacctcccattcacaattgcttccaagagaatggaatacctaggaatgtggaaacacattgtgagggtggaatactttgtagtatgaaggggaggtctctaagtcatcttgatgcaaaggaggcaccccttaacaggaatgtgttggtcatatctgcggacgatgttgaaatataagggatatgagtttacaatatttttagatgtaataatccagatgctcttactccatgagagtttcattctttcctggcctgagtttttaatgtggttatagcagacctgcttagtttgagagtttaagtttttttacagctctcttctactcttatgattgagactttggtttggtcctcaacattctttgcctctagctgcagtaaatgagatcctctttacatgctacttgctttcatgcgctggcattcacgcttagcttttaatttcagattaatgaatcatatttttatctttttcttcaaggcatacttcaagtttagcaaagctactcaattccactctccttataactactacgtctccaatatttctcaaatatttaacacatcacaccacatcatctagtgcattctcttctactgagtgtataccattctcttctactgagtgcataccattctcttctactgagtgcataccatccctccgccaatgaagattttaaaaatggcactgttcccttgtgccaggggctgcctttacttatttatcaccattgatggtgtcct

SEQ ID NO: 719443 - DNA, 1027 bp, Homo sapiens
tgtcaccactcctatgcaacatagtgttggaatttatggccagggcaattaggcaggagaaagaaataaagggtattcaattaggaaaagaggaagtcaaattgtccctgtttgcagacgacgtgattgtatatttagaaaaccccatggtcccagcccaaaatctccttaagctgataagcaactttagcaaactctcaggatacaaaatcaatgtgcaaaaatcacaagcattcctatacaccaataacagacaaacagagagccaaatcatgagtgaacctcccattcacaattgcttccaagagaatggaatacctaggaatgtggaaacacattgtgagggtggaatactttgtagtatgaaggggaggtctctaagtcatcttgatgcaaaggaggcaccccttaacaggaatgtgttggtcatatctgcggaygatgttgaaatataagggatatgagtttacaatatttttagatgtaataatccagatgctcttactccatgagagtttcattctttcctggcctgagtttttaatgtggttatagcagacctgcttagtttgagagtttaagtttttttacagctctcttctactcttatgattgagactttggtttggtcctcaacattctttgcctctagctgcagtaaatgagatcctctttacatgctacttgctttcatgcgctggcattcacgcttagcttttaatttcagattaatgaatcatatttttatctttttcttcaaggcatacttcaagtttagcaaagctactcaattccactctccttataactactacgtctccaatatttctcaaatatttaacacatcacaccacatcatctagtgcattctcttctactgagtgtataccattctcttctactgagtgcataccattctcttctactgagtgcataccatccctccgccaatgaagattttaaaaatggcactgttcccttgtgccaggggctgcctttacttatttatcaccattgatggtgtcct

SEQ ID NO: 719444 - DNA, 593 bp, Homo sapiens
gatatcatagacaaaatactagattactggagttttctttttttttttgctttgaatatatttgcaacttttgaatgaaaccgtaactcctttaaaaatacaagcaaggcacgtccaattaatcatacaagtttccatttagattgctttcagataggtcaaattccttggacattaagtttttcttgaatctattggtagaatgagtgcataaagaaagattttggaaaacaatagccaggcaaacatgaccttattccactgtggtgaaacgacaattttgtatyactggagatattgctgtagttcttattcttttatgtagtagtaaataattatttttaaaaacatattatacatatccaattgaacctggggaagacttcgtttttatgattttatttagatctactcaacatttgtccttacatcttatttttgttgttgttgtcactcaaggtgctgtccgtattatttacaaagagatagattgatgaaccggatcaattcgagagaactctatcaccagtggaggccaatcttccattcctcaaaaaaaacttttctttttttttttgttttttttgagacgg

SEQ ID NO: 719445 - DNA, 593 bp, Homo sapiens
gatatcatagacaaaatactagattactggagttttctttttttttttgctttgaatatatttgcaacttttgaatgaaaccgtaactcctttaaaaatacaagcaaggcacgtccaattaatcatacaagtttccatttagattgctttcagataggtcaaattccttggacattaagtttttcttgaatctattggtagaatgagtgcataaagaaagattttggaaaacaatagccaggcaaacatgaccttattccactgtggtgaaacgacaattttgtatcactggagatattgctgtagttcttattcttttatgtagtagtaaataattatttttaaaaacatattatacatatccarttgaacctggggaagacttcgtttttatgattttatttagatctactcaacatttgtccttacatcttatttttgttgttgttgtcactcaaggtgctgtccgtattatttacaaagagatagattgatgaaccggatcaattcgagagaactctatcaccagtggaggccaatcttccattcctcaaaaaaaacttttctttttttttttgttttttttgagacgg

SEQ ID NO: 719446 - DNA, 661 bp, Homo sapiens
tttaccagacttaataggcacaattaataattcattcctatgtctttggcatagtctactcgctccagttttataatagaactttctttagcattttcacttaatctattctgggaatgttttgggaacacatttgagcagtgaggattaaaaacaacaccactaccctatagacataaaacatgtattagttaaactactactttatatcaggagtccagaaaactaaagcttataaccaaatccatcccacagcctgtytttcttctttattgtggtaaaatacacataaaatttagtatcttaaccattactaattgtccattgtagtagcattaagtcattcacattgttatataatcatcatcacaatctatctccaggactctttttgttgtaaaactgaaagtttgtgcctattaaacaataatgtcccattctcccctcccccagcccttagaaatcaccattctagtttctgtctctctgaacttgattaccctagatactttatacaagttgaattatacaatatgtattttctgtgagtagcttatttcacttaacctggcatacttaaggttcatttatgttgcagcatgcatcagaattccttccctttttaagatttaataatattctattgtatgtatgttccaca

SEQ ID NO: 719447 - DNA, 599 bp, Homo sapiens
tggtatgtgaaggtcacaattaaatattttaaggaatgatcaatcttatcacttagatttgctgataaccaactccctgatctaacccctggcacagaaaactccaatgccagaaaaataagaaaacgctgagaaacctttgcttgaactacttagcagatctcattaggcaactctcaaattcctcccagctcacagggttagaaaatttaactctattcatggaaatttctaatttcagcacagattaagtaatttttggcacatgttggtttttccttggcaacacactgaaaaaattcaagcccaaagctcagttcactttttctcagttgcctctatgtctcttcagcaatctcagcagcaacagattggcatatatttctaccctatttaactcttgtttctattaccaatacytcttagtttcatatttaacttttttgtttatttcctgccttattccaataacaagacttagaaaatattaacaaaaaaagcaacttatgtttcaaatatggaacacaaatgatcacatttctcaaaagacattcagaaatcattttgcatataatggaattttgcataagggagttcat

SEQ ID NO: 719448 - DNA, 649 bp, Homo sapiens
atgttgttggattctgttttctagtatattgaagatgatttttgcatctatagtcataagggatattgtcttgtaatttccatttcttttcttctgatgcctttgtctggctttggtagcagagtgagtcawgccttacaaaataaattagtattcctcatttattttttggaaaagtttgaggattgcttttaattatttttaaaatgtttagctgcattcaccagtgaagccatctggtcatgagcttttattactttagagctctttgattactgattcgatatatttactttttgtaattctgttcagattttctctgttgagtaagctaaagtaatttgtgttcctagaattttgtttccattttatttaggccaactaatttattggagtaacattttacattgtattcacctaaaatcccttttatttctttaaatatttttaaattgtaagatggtaccaatggaatgccagtcagaaattcatgcacccaaacctgaagaggcacagacatattcaaataaagtaagcctaacaccaatttgtgtcattgagactcagaatatttacatgccctcaaaatatgtctatatcaccccaaatcactgaataattataaactccactttaaagattcatatat

SEQ ID NO: 719449 - DNA, 1147 bp, Homo sapiens
  misc_feature 506, 509, 519, 520, 521, 522, 523, 524, 525, 526, 527, 528,529, 530, 531, 532, 533, 534, 535, 536, 537, 538, 539, 540,541, 542, 543, 544, 545, 546, 547, 548, 549, 550, 551, 552,553, 554, 555, 556, 557, 558, 559, 560, 561, 562, 563: n = A,T,C or G
  misc_feature 564, 565, 566, 567, 568, 569, 570, 571, 572, 573, 574, 575,576, 577, 578, 579, 580, 581, 582, 583, 584, 585, 586, 587,588, 589, 590, 591, 592, 593, 594, 595, 596, 597, 598, 599,600, 601, 602, 603, 604, 605, 606, 607, 608, 609, 610: n = A,T,C or G
  misc_feature 611, 612, 613, 614, 615, 616, 617, 618: n = A,T,C or G
tgcatatcttgtagtagctttatttaagttaataattcctctgattatctgtccaaaaattggctctacaaaatattaagttcaaacagttttactagctttacagttttctctatagctaattctattttctataatttattttcaactacaacaagacatctctcctgcagcaaattatttctctgtgtattcaatgcgtacatttgttacattataaagcttctattcctattatcttttcaaccaagcattttaccttatacacctttcaaagaacaccatagatttcatattactcaaggtttcttcaagcttgcaaatatcccgtctcgctgtacttatctacaattcagcacatgatattttcttcatttgcaacatgtaataccaattatcatgtattttcttagtatttgaacacaaatttttgtcactagattttaagccactcgaactttcctggctggtctctgtataatgacatatgtcagtttagggggatnctntagagtcaannnnnnnnnnnnnnnnnnnnnnnnnnnnnnnnnnnnnnnnnnnnnnnnnnnnnnnnnnnnnnnnnnnnnnnnnnnnnnnnnnnnnnnnnnnnnnnnnnnnttttcttaattggtcttattttatgtcaatgatcatttataatctactaccacttaccaacctctcaatcttcaatcttttatttacatgggtcaaatagcaattaaaaatagtatagcaacactattagtccattttcacactgctgataaagacatacccaagactgggaagaaaaaaaggtttaattggacttacaattccacatggctggggaggcatcagaatcatggtggaaggtgaaaggcatttcttacatggcagcrgcaagagaaaaatgaggaagatgcaaaaccagagagccctgataaaaccaccagatcttgtgagagttattcacaaccataaaattcaaattacctcccaccggatccctcccacaatgcgtgggaattatgggagtacaattcaagatgagatttgggtggggacacagagctaaaccatatcattccacccctgacccctccaaatctcatgtcctcacatttcaaaaccaatcatgccttcccaacagtcccccaaagtc

SEQ ID NO: 719450 - DNA, 1254 bp, Homo sapiens
gcctgactctttctaactacccaggtcccagaggactatccacaaacactctcaggataccttcagtcacatttgcactgtgtcgttcccacttctttcacagagacaagggctactgcaagcctgacttaattttaaatggccaagattgaactgattagtgtcagaacaaccctgttatttaatcactgggcttttctatttaataaccaggtgaccagagcagcaaaaacgtactgattgagagagtgcagctcctgacttggcagcaaatagtccctgattagtcatttgtaattattaaattcaaaccagatctcgaacctttttgatttatctctttgctggcaaacaactttggtggtttcagaggctttgatgccttgcctttcatctgctctttctttgcggaaagattagcaaaaggattttgtgttcttgtacttgcccttagctggaacttgacttgctaaattcacgttttagcagggagaggatccacattttgttcttctccagtctgaagctccagaagtgaatgagagaattgaaagaaggagcaccaactccatttttaaaaagtaaaaaaaaaaaaaaaaaatagagacgagatctccctatgtcttgcaggctggtctcaaacttctgagctcaagcaatcctctcgcctccacctcccaatgtgctgggattacaggtgtgacccaccgtgcctggcccctactccatttttagtacactgctttttttttttttttccttttccttatttttaaaacatcctcctttttctaggatccaggaaccccagtccttttttctaggctgtcttcagtgtgctgacagggtggagaaatgggaaatcatgatgttttcagagctacggggaactaaattttaacaaatataatatgcaattatgtgctcagataccactaactataggttgaagatgttaggtagactctaaagtcagtgtttgtgagtttacatcttagttaagccatttatttgttgtggaaccttaagcgcatcattttacctctctgcaccttagtttcctcacctataaaatrgggacacgaatagtacctccctcctaaggttactgtgaaagttaaatagatcagtgtgggtaaagagcttagcacaatgcgtggccctcagcaactactcaaatattaactattaatggtaatagtagcaacagcagcagtaacagcaagtaagtacaggcaccggggggaaaatcat

SEQ ID NO: 719451 - DNA, 630 bp, Homo sapiens
ataaaaataatgtgcccaacacagagaggcaccaccattcagctacctattaattccttggaatatgaatcttttggtccaggatgattgctttagagccatgatttttttcttggctgagtacacagtatccattcttatcaaggtgctttcctcccctctcaaatatccaagtaagatttatggggtttttttgttgttgttgttgctgttagaaaaagaagacaaaattcctccaagttcacttttaccaagttctcacatttgaaactcctccacaaacatatgtgatgccatattttaaaattccatcttaagtaagcatgggatttagtccaattcattgcatttctgacttagattcatttctgttgcctgttggggaggatttttattcttaaaccttaaaacctaagactccactcaaaattgccattcaaatatttgtcttatkacttcagctttttgttccctcaaatataaaattaatacatgcaccccatagaaacgtacgaaagtcaaaacaaaacaaaaaaaagtcatgtataacctcacttcccaaaaggaaaccattattaatatttcagcgtattttcttttaatcctctcaagtgctttttttcatagccc

SEQ ID NO: 719452 - DNA, 1314 bp, Homo sapiens
acatggtagaaagaccgccagagagctctctggggtctcatgtgtgagggcactcatcccattcatgagggatttaccctcaggacctaatgacctcccaaggccccctcacctaataccaccacagtgggatttggagttcagtgtacagatttgggaggcacacaacattcagttcatagcactctctaactactaccccagtttcctttttcagccaataatgatgcccaaagtcacatgccctctgggagcattacccacaggaacatgtgggattggttcattgccacagagatttggtggggcccaaaggaacttctagaaacttcaagtttacacatcactacatctgcttttgttgtctctgtggactcccagtcgcttcacaggaggccgctggatgctgctgaacatgcatctcgggggcctgggggagctgagtgccactcccaggttggctcagactcggccctaagcaccgcgtagtgatgtgcttcccctgccaccccccacctcaccgcactctcctcgctatgttctctccatctccaggagacacttccccttcaaggccccatttaaaattctccttttctgtgaagactttgctgatctcacagccagacaagcctctccttccactggactcaacatccttttgcccgtatcaagaaggtagcaattgtcatgctccacatgggtctccctgacaagcccgggcactgcctggtggcaagaaccgcacctcattcatctttatggtgcccaacacccgctagactctcaggattgttggataaaggaagacttctttrccagacattgagcaagactcagtttttgtaaggtgtatatgctcatctctaaaataggggcagacaggcctactcaaatccagtgagtccagcaatggggggaatgccttgcaaatcctagagaactgcaaggatgtgtgaggattcttctccatgccatcacatacttctcagggccagcctggtgacctggcccaagagaagcaggtataagatcattccggccatgcatgttttcatttccatgagatgaagaactgtgtgtcagttttgactcttacatactgatgccagatgcactcttgcgtgtgtggatctctccccagtccagggcagtaacctcacaatggtacctacagatgcacaggagttgcctaaacattgcaaaaggaaggacagaattagagcagttagttttcttaggcttcctgtagagcttgtctcaatacccacccagagggcactggagggtgaagaaatttcctttctcaagccc

SEQ ID NO: 719453 - DNA, 1130 bp, Homo sapiens
tggtgtgactgtcctgatttttgctaaggctgtggtggtttacctaatattgttttacactataagtgaaaatgtcaacggagtaaaaaggtgataagcatcttcatattatttttaaaatagttttaatctttaagacaccaagaaagggtctcagggatcctcaggggttgatatagcccactttgaaaactgcagcagtaaattatgagggatatcccaaaggattattacatggccctcaaattagaacttcggttgtctccctagtgtatagacattttgtggtattctctgtttgaaatagagaaaaaaatgccaaaattatagctgaaaaccaagttttgattagatcacataaatgaagcacatcttgaaatgcatctgcaattaatgtcaccactcttcgtcattttccaagtatcacctaacttctgcctaaattaaacaagtgaaatggtatgcattaagactcctttaatctacattttccaaatctttggtagtagacctaatctcactgattccacagggatgtggtatatcttttggtttataattttaatatttaggaaacaatctaaggcccacctttgactttttcttcaattttagtccagaatgcacagatttttttttgccaatgttaggattctgctccaagtgtgcattcaagatcaggagaaacaataccaggctgaaagtccttttctgttaataatattaaatgagatattagcatgcttcccatctacttaagtcctaaacaatgtcatgaacaactagatgcctctraagatttttgtgggtcaaattataggattatttatttgatgctgttacctactatgatgatgacacttaccttgtctcttgtggctaagtgttgctaccactccagaatccaatcatctccatggcacccagaaacccatttcaatagcagagtctcctgacttcattcgtaatggatatatgacatctattactgttttttttttcaagggtgccagaattcccttcattgatatctttcccagtggcttggtgaagtggcaatagccatagttaagagacaggtataataaaccagttccaaagtccagatattcaatccaagggatatgttc

SEQ ID NO: 719454 - DNA, 868 bp, Homo sapiens
attaatatcacctaaaagcactaatactcaaaatgtacagagtccctttgtaattaaatttttaaaaaagaacagcccaaaagaaaataatatgagctaaagcttgaactctcacttccaaaaaaaaaataaataaataaaggaaatctaaatggccaacgaacatatgacaaacctataacttcaacggtatttagggagatgcaaattaaatcacaacagaatttaacaaaaattgataaaaattttaaaaactgacracagcaacaacaactctcacataccactggtgagaatgtaaactgaaattgttattttaacaaacactgtatttatttcattatgttgaggaaatctataccctataacccagagattttacatctgtatttgtatgttatatactcatacctatatagggatacatactgaaaaatattaactgcaatattacttaaaatggtgacaatttgatgacaacgtaaatattcagcaatcaaaaaataaatgaattgtgatggtatgcatataaaagaatagtatagacagtcaacattaacaaaatagagctactaacaaaaacgttaatgaatcttagaaccacattactgaagagaagctgtcagaacaaaaggcatatactgaatgcaccatttatataatctttacaacaaaacaaaacaagacaaaacaaattatattgttaaaggacatatacatggaagttaaagctgaaaagacaactgagaaatcaattcccataaaaatcatgttaaggctaatctttgtaagacgggagggtgtcagtcaggaaggtgtattggaaggactggcaatgttttattccttgacaaaagcaatcattaca

SEQ ID NO: 719455 - DNA, 1837 bp, Homo sapiens
taaaatgttgtatagtatctttcaaatatataattctgttttaataaacatgtttatccaaacatatcatgaagtaattactataattagggctgatatatctttgctttatttaataaaatgattaataacattaactttctgttttcaaaatttaaaatattatatgttagcagagagaacaatttatagcgatatgtacatttttttccattaagtacactggtatactttaataataatgcctaataagatcaatggaattatttcttgttcatttatatgtcatttacctaattattctcaaactcagaatgcaaagggaaatcaattatgttactatgcctttgtcataactattgcctcataaatagcatgcatttagctacacacttcatactattgcaattcaaatattgtgaaataccaactcaatttactgttgttttgtaattttttggaaatgaaaaatttcttacccacctaaacgtaatcttaactagaatgctttggtaaactttcttaacaaatttttcttcattatacttacatgtattttgtgatataatacaatgtacgtacagtttcagttatatcagtttttaagaagatttgtattttccccccgatataatgaaaattgatttggcagtgactactagcattacaaaggtggttggcattttaataacttgaatgagaaaatctgcagctccatgtctgtgtgtagcaacacaaatacattttatcaaaaaagaaaataatttgcctgaacagttaactgaagttaacattatttttatttttaatcttcaagattaaatcaggataaacaataccactatactaaaaatataatcaacatacttgatagttttatatgttaggtaatagatttttgatgtgaatacctaaaatggaaaaaagtgagtatttttaattcttggattataaagcctttataagataaatgatttcaaattacttccttcaaatgtagtgcaaattttgaactttatcaatttatttcctttatctgcagaggtgatcaaactcttgattttttggtttaatctttactacaggcttatagattatattatttttctcaattattaagtctccacctgcatcaaaaaatgatgcatatctacttctgtcaggtaaaggcaaataatattaatagagatataaatattttataaaatcttcttaaaggaagaaaatggtaagtatgtaaggaattacttgatcaaaaatcactttgggaggctgaggtgggtggatcacgaggtcagaagtttgagaccagcctggtcaacatagtgaaaccccatgtctactaaaaatacaaaaatttgctgggcatggtggtgcatgcctatagtcccagctacttgggaggctgaggcaggagaataacttcaacccaggaagtagaggttgtggtgagccaagatcacgccaatgcactccagcctgggcaacagagcaagactctgtctcaaaaaaaaaaaaaaaaagtatgagaattaattagggctcaagtatctggatatttttcragaaggttgtttgatccagaagaaactcaatggtggataagtgagaaggcagtagtagaaatgtcaggcaaaaatgggaagttttcttggaaatccacttcctaaaacctgtgctattgttttaaaggcctgaaatatcagagtatgtttaaagcaaacaattactgacccttgtccctccacttccgggaaaatgtgtggattgctttcctgaaaatgaataaaccaggttaaatagtagaaatgggaaaagttgtgattttgaaggatag

SEQ ID NO: 719456 - DNA, 1837 bp, Homo sapiens
taaaatgttgtatagtatctttcaaatatataattctgttttaataaacatgtttatccaaacatatcatgaagtaattactataattagggctgatatatctttgctttatttaataaaatgattaataacattaactttctgttttcaaaatttaaaatattatatgttagcagagagaacaatttatagcgatatgtacatttttttccattaagtacactggtatactttaataataatgcctaataagatcaatggaattatttcttgttcatttatatgtcatttacctaattattctcaaactcagaatgcaaagggaaatcaattatgttactatgcctttgtcataactattgcctcataaatagcatgcatttagctacacacttcatactattgcaattcaaatattgtgaaataccaactcaatttactgttgttttgtaattttttggaaatgaaaaatttcttacccacctaaacgtaatcttaactagaatgctttggtaaactttcttaacaaatttttcttcattatacttacatgtattttgtgatataatacaatgtacgtacagtttcagttatatcagtttttaagaagatttgtattttccccccgatataatgaaaattgatttggcagtgactactagcattacaaaggtggttggcattttaataacttgaatgagaaaatctgcagctccatgtctgtgtgtagcaacacaaatacattttatcaaaaaagaaaataatttgcctgaacagttaactgaagttaacattatttttatttttaatcttcaagattaaatcaggataaacaataccactatactaaaaatataatcaacatacttgatagttttatatgttaggtaatagatttttgatgtgaatacctaaaatggaaaaaagtgagtatttttaattcttggattataaagcctttataagataaatgatttcaaattacttccttcaaatgtagtgcaaattttgaactttatcaatttatttcctttatctgcagaggtgatcaaactcttgattttttggtttaatctttactacaggcttatagattatattatttttctcaattattaagtctccacctgcatcaaaaaatgatgcatatctacttctgtcaggtaaaggcaaataatattaatagagatataaatattttataaaatcttcttaaaggaagaaaatggtaagtatgtaaggaattacttgatcaaaaatcactttgggaggctgaggtgggtggatcacgaggtcagaagtttgagaccagcctggtcaacatagtgaaaccccatgtctactaaaaatacaaaaatttgctgggcatggtggtgcatgcctatagtcccagctacttgggaggctgaggcaggagaataacttcaacccaggaagtagaggttgtggtgagccaagatcacgccaatgcactccagcctgggcaacagagcaagactctgtctcaaaaaaaaaaaaaaaaagtatgagaattaattagggctcaagtatctggatatttttcaagaaggttgtttgatccagaagaaactcaatggtggataagtgagaaggcagtagtagaaatgtcaggcaaaaatgggaagttttcttggaaatccacttcctaaaacctgtgctattgttttraaggcctgaaatatcagagtatgtttaaagcaaacaattactgacccttgtccctccacttccgggaaaatgtgtggattgctttcctgaaaatgaataaaccaggttaaatagtagaaatgggaaaagttgtgattttgaaggatag

SEQ ID NO: 719457 - DNA, 1751 bp, Homo sapiens
ggagtttgcagtgaactgagatcgtgtcactgcaccccagcctgggtgacagagcaagactccatctcaaaaaaaaaaaaaaaaattcatatatgagcactcataaaagttttaggaatttgacaaaaatggttccatagctcattcaaaagaatagattttaaaataatcaataagatttaaaaagtgataatgaaagagctttcactatcaacatttaaataatattttacaattaaagtttttaaaaataaaatgttatactattatagaaataggcaagctgatcagtagaacaaaataaataggctgtaaacttgtgtttgtgtgtttatagctaataagtgtgatgcttaaatcagtgggaaaaagtattaactatttaatatagagagctagtataattattagtgccacatgtcaggagctaatgaaacttctgcaaaggaccagctagtaaatattttaggctttgtgggccataccatctctgttgcaaccacttaactctgccactgtagcatgaaagcaggtacaaataactatattacattctaagtaatttttaaaatttcaaacctctgtttttaaacacttgaaaataatacactgacaaatatgatggcttgcttttatgtaactggcacctgatagaattaaaattgacccaaataggtcaccaaaaatatattttacctgacaaattaattaacatgggttagggtcaggatgcgaggcaaagaaacaggagagtgctttggacaatgagaattaagtcactgatctctcattctatatagcaattctcctgtcttacaaacatgtcctagtgtctctctcatcttaaaagcaaacaacaaaatcctctttagtcactctttatcccattggtatatccatttctacaaagcatcattgcctgagtgttcttatgtattaatatatatttgtttatttattatttgcctttctactctaggaactgtgatccatgagggaaggatttttctccctttctttctttttttttttatttttatactttaagttctagggtacatgacaccatgtgcaggtttgttacttatgtatacatgtgccatgttggtgtgctgcacccgttaactcgtcatttacgttaggtatatctcctaatgctatccctccccccaatcccaccccacgacaggccctggtgtgtgatattccctaccctgtgtccaagtgttctcattgttcaattcccacccatgagtgagaatatgtggtgtttggttttctgtccttgcgatagtttgctcagaatgatggtttccagcttcatccatgtccctacaaaggacatgaactcatccttttttatggctgcatagtattccatggtgtatatgtgccacattttcttaatccagtgtatcattgatggacatttgggttggttccaagtctttgctattgtgaatagtrccacaataaacatacacgtgcatgtgtctttatagcagcatgatttttaaagcatttttctttcttcctcactgaaggagacattttcaatttacattctgacccatagaaaatagaaggtttctaaatgagcttattttgtatctggctgcctaaagaactcttcctacctattcctccattgaagaatcacaaacaagtgccttgggaggaggcgcaagtctcagggatccagaccataatctcagagctagaatgtaagggtaagaaaatatgaatgaccc

SEQ ID NO: 719458 - DNA, 596 bp, Homo sapiens
aaaggctctctggcctggggtaggccctggccaactatgctctagaatgtagaaaaatacrctattaattgagccaagattaagtttatcccaggattaagtttaggcctggatttattctaggctttgggctaggagatccaaaaatttcattatggttcatgtttagccggctgagctcacaatgtttagcaaatccatgtgaggatttgggcccaaagtcctgtagtgacaaacactttacatttgcatatttttaaaggagctcatggaagagatgagtagccgaccataactttggggatttggtgttataggaattgctccctcacttgctacggggaaaaatgaatactatatgaccataatagtttgctgaaaattgtctctgctattcctgccaaaaatggatggagaagattatttgagagaagaaaatatgaaaatggatccccttgaagaaatatgagagaaggaagctaatccttggtgacagaataagagacactcaaactgacattaagaacacacaagtagtccagagagtggaaaaatagctaaacttatatgaaggtgcttgatacaagggtatgtca

SEQ ID NO: 719459 - DNA, 1314 bp, Homo sapiens
gaatatgtttttaattttttgtcagtcaaaaagatggtgaatcgtattttacttttgttgtagtttccatttatttaattataagcaatgttaaaacgtcatcttaagtgtgtatgttatcatagttctttcacattgtattacacaattcatgtaacccagatatttgctcttccttttcccctaagggacaattccctctaagtatatttagggaagtaaaatagtccttcatcttccaagttatgtgttcttctcactgtctctttacttttgctaaatcacctctctgctatgggacacttctccatttgttactggtctcagcctggacagcatgactgcagttccctggggatcttgatgcttatgcttccaaggggttttacgggatgggagttgggggagaggggggaatgagttgaatttagggtaggtgtcacatattttatgaccccagctcttacttcctttcattacagttctactcaagatatggaggtgggagaagagagacttttgttgtaacaagtaacaaagatgtagaaattgaaatatttgtattactatattgttttaatatacttcattagaaagcttcgaaatgttatgttgttaatatttacttttacaggagaatattgtaaggctatgtaaattttaattataaaacagttggaaaacctctcatggaagaaagttctacacatcagagtctaaacttagactctctggaatttagccaacttttcagcctggtataacttatctttagagggtttttaaaaatgtttgttgttacaggctcacgcctgtaatcctagcactttgggaggctgaggtgggcagatcatgaggtcagaagttcaagaccatcctgaccaacatggtgaaaccccatctctactgaaaatataaaacttagccgggcgtggtgtcacatgcctgtaatcccagctacttgggaggctggggcaggggaattgcttgaacctgggacacagaggttgcagtgagttgagatcgcaccactgctctccagcctgggtgacagagcaagactccgtctcaaaaaaaaatttttttttaatttaaaatttaaaaatttaaacaaatgtttgttgttaatttaatgcccattactggcataaagtaaataaactatggaaaagtgaagagctacttcttactcttattggctctgtttgacaaatagacacaaagaaccaaaaaatgacttgtccatagtaatatgatctcagtgatagaactrgaaagtgactccaggacttcttgccctctttcctggtctcc

SEQ ID NO: 719460 - DNA, 663 bp, Homo sapiens
tttctccatgttggtaaggctggtcttgaattcctgacctcaggtgatccgcccgcctcggcctcccaaaatgctggaattacaggcatgagccaccgcgcccagcctaagtctgtcatttctaatatgctctcctagttttagctcagtagtagctgagtattatacaaaataagctctttttactgctgcttagcatgtgtctgcgaaccctagctcagtacctggcattccatgggcaggcaagaaaagtttgcagaatgaattaatctggcccaagtgtgactgagaggccagaggaggtcagtgggtgccgtctcccaggccagcagcacacacacagcttcctacagtctcccttcttgtctttgtctctttacatcctcttcccttcctcccatgtgtctctaacctgccaattgcaccaacatttattccctgctgcagagcctgtggacccacagtcyggcttacctttattttctccatctccagaatatgtctctcctccatacccccataaattaaaagtgacttaaatatataaaatggaagagagaggcaggataaaactgtttgataacttaatagtacaactggccagtctctcgtagattttttgcattcattccaaacctgttttttgttttgttttgtttttga

SEQ ID NO: 719461 - DNA, 626 bp, Homo sapiens
aatctaatgttgaagcagtccaccgcatttcaggtctcctggaaatgtgctgcgattttctgaaaattagaggcaacaacttgctgttgaggacaggaaaaaaagaggaggctaagacgcaaggtcctctgaagcttctgccagctctctcaccagaacctaactcttgataccagtggagtgaatctggaagtctcctgccttcctgagtgagttggagacgtagacactacctggacaggctggagaaatgagggacttaaaacgtagcacaccccttgccccatgccacctgactagaaatgcctgccaaaggtatatggacatgcaaggctggcacagatgtaaagctcaatatattaaactagatagcaaagaaatatacaccaagcccagcaatacaaascaccctgccttcatgcagttaaacattcttctgttttaggccacactgtacttgctggcttcatgtggcttcatgaaggcaagtgctgtgtctgttttgatcactactagatttctggcacccaacatgtagtaaaagctcaatcagtatttgttaaattcattgagagagctgggaaagaaggtagaatgaaaagaaaagaaaagaaacaaacaaaaac

SEQ ID NO: 719462 - DNA, 614 bp, Homo sapiens
ggggtaaatggtcactttggctctgagagggctgcaggatgtggtccaaagaatttatagccccaccagaagagcaggatttgtagcctgacataaattgcatatgataagggacaggctttgccagtgcctgcagttgtgatgtgcctgaggaatctaacacagaatgctggcgcttcagtcccagcctctttttgggggaggaatccgaagtcagcttctaaaagagttgactctgcatcacagttaaatgcccaaaatgattttcatttctactgatgygaaggccagtgaaaacagcaggaagatattagttgattcttataaaaactatgctaatttagtggacattaaaatgaattaataccgactgttcctaatagaaaatgtttggtttcaattcttaacatagacaaagtacatttttgaagaaaaaatctgtttttcaaccttttttttttcaatgcttgaagcaaaatcagtgatctcatttctaattgaaacaccaaggaaaagctccctgtgagacagatgttgagaaactttaaggtcttaagtataaaatttctctgagattttgaagaattagggaagaaaggacagacagatatttc

SEQ ID NO: 719463 - DNA, 1575 bp, Homo sapiens
aaaatattttcattcctaaccctgaaattctacaaatttactgcttagggatgactcctgcatgttttctcttccttttaagtagacaagttctaaatcttagctgactttcattagccatttgactaatcccattttttaaaagtgtttgagatgggttgaaaaatatgaccaatgtgatgagtacaacttgatcataattgtaaaatattagtgtgctttaggtgttagcaattaagaaaatgtgaaatgttttatttcttttctttccttcccttttttttgaggggcgggggtgggtgggtagagacagggttttgctttgttgcccaggctggttttgaacttctggcttcaagcgatcctcccaccttagcctcctgaagggctgggattacagaaatgttttttgttgttgttgttggttttgttttatttttttgagacggagtctcgctcttttgccctggccggactgcagtgggtgctatcttggctcactgcaagctccgcctcccaggttcatgccattctcctgcctcagcctcctgagtagctgggactacaggcgcccgccaccgcacctggctaatttttttgtatttttagtagagacggggtttcaccatgttagccaggatggtctcgatctcctgacctcgtgatctgcccgccttggcctcccaaagtgctgggattacaggcgttgagccaccacgcccggccacagaaatgttttaagtagtaacatgattgttaaaatctcaaatcctgagtatctgagatatcggtttgatacttagaaaatcatgagctctggaatcatttttcaaatgcctatctaggatttgaattggcatcttaattagtaacatcagtgttaactatggcaactcatttgtttcccaaaaaaatttactattttaaggttaaatataaaataacggtataagtcctgggtttgatttttttttttttaagtgtaaaaagttatctgtgttcagtaggtggagaagccarctacatcctgctgacacaaagctaatcagtggcttgacaactctagtcaaacatccacatagaatgtcttggccataatctatgtgtctcctgtattgtttttgttttaaaagatttgagaggaggggatgtggtggaggaatggtgcagctcgaaattgcacgtagttgccaattttcttttttctagtttgaacatatttctgctttgagcttctttcagctcaagtgagccattttcacctattatttcatctgtcttgctctgtcttcaatcttcattagccgttactatggataagctgctgtaaacgtttttaaaaatcaccctcaaggagtacaatattctattaaaaaatgacctttccaggaaactaactaatagcattagaaaattaacactattcctttaagcactaaaactgaaaaggagagaaggaggaggaggagccaggcatggtggcacacgcctgtagtcccagctacttgagaggctgagacaggaagatcacttgagcccaggagttcaaggttgcagtgagctatgatggcacca

SEQ ID NO: 719464 - DNA, 2561 bp, Homo sapiens
cggtaaaacattccaaaccttttacgatgagaagatgtagcttaaaaaaaaaacctcccctgaatatttttgtgaattataagaataaatgttgtcgttgatacatcttattgagtagcgtgtagtgcgttttctttgtgaaatgcctgtgtaccgtaacagataggcctccgcataaaacacttattaaaatgacgattggcttggacttggtgcagattcagagggaccatagcaaatctgtggttgtcctcgaaaatgacagtttattccgatatttaagaccctggaaggttttaagtttggcttttaatttcccttactatgtagtgagtgaaggaaattatggagcgtcctcattaatgagtcaccatgggaaaaatagattgcgtcgctcgctttgagccgcttggataaggaaatggaagcagcggcggcggagctcctgtcttttaaatggaggatcattgattgtgttggtggttgctgttactggggcattaaaccctcgccgctggagcgcgcgtctgcgcgtgtccgcgtgtgaaaaggagccgggaatcgtggggccattcataacctgcttgagctgtcctcggcaggccggggggaggtgcgcgcttccagggactctcccggtgtttactacgtcgtgcctgagaaaccaggcgggggcggggggaggcagggagcaaaaattcacctctgtgccctaggatgaaggggagaccacgggctggattgggaagcagatgggaactttctcttcctggcgctgctccaccccttacccgccccccacctcctggcttctcctcgagtatcgtcagtgttttgatggaaaaatcatttaggtgtacattattggagtggaaaaaccacttagatgtgctcactttaatcccctgtggactttctctgtaggtctctgcctgggaaattcgtatgcaccgatgtacaagcacgtgcattgcagcattcgctcgctcctcagtgttatgtgcctagacgtgtcatttctcattatgcagattccagagacattgcatgcttatggctgggagtttggcccctctgcaagatgagggggcagagagaagaaagaggaaatcgtcccaggcagctttggaagggttcttagtggacggtgctgcggtctggcttgtgtgaatgactttctaaaatggcggccaggacccactttatgtgggaatcagcagagccgatctcagaatgcacagagggaggagggggcggaggattcgagctgccttggaaagcggcagtctggaggaacattactgtattaaaaacggcttagctggcagtttgctcacgactgcattcaaaggagtatcttacctattgcagagtaaaagcagatgctactgataaaagcaggttattttaaaactaagcagatcatgtgtccctgaaattcttttattttaaaggtttttttttttcatttttaaacaaatctatttagttgtttaaatagacagtacatttttatgggttcaaagcatgtgaaaggtatacagagaaaaatctccacccctgaccctrgaattcccagttgccacacttcctcccctcaccccccaaaatccaggtaatgtctatttctggtttcttgtttatctttctgcatgtacaagaaatgttcctgctgatccagctgtggagctaagtggaccttgtttggaggaactcaaggccttttatccctattgtgggatatattttgtaaaatgtgtgattgctactaggagtaaaagtgaaatctgaataatttaagtgaaaggaataaaaaggtagttgtaccagaacgatggctctgcaagaaaatgaaatggtattcacttctggtgtcttgtacaaatcagaatgagaaaaaccatgcaatacctatattaaaactgaactttaagtgcctactcttatccttttccctagctgattacattaataactgttttacaggattaagaggtgtacactgggaatacattatataaaacgttttcaagatgaatgttctcttaacagtgattaggcttttgtagtaagtgtttgcattttacaaaaagattaaaccagacagctttggggacagcttagagacattttaacagaaaaaagaggtcagtcagttctttaaaaatttttatatttatttttaaatttacattctgattagttttgtttgtttgtttgtttttaaatggacagtagattgaggggtggatggcgatttggctttttcctccccagtgccaaagaaagaccaaatccttaaaacataatcagaacatttacaaaaattggcttttcttttcttgcaataataataaatctgttgttatttttacagttttcagtttgcggatttaaaaaaattaaatgagaactatttctgaatcgggttttagttaacaaagattcattacagggacacaatagagaaagtcctttcctttgtatgttagctgggttgaagggggaagggaggagttatacaattggttcctgtcttttagttatgagagggagagagg

SEQ ID NO: 719465 - DNA, 2561 bp, Homo sapiens
cggtaaaacattccaaaccttttacgatgagaagatgtagcttaaaaaaaaaacctcccctgaatatttttgtgaattataagaataaatgttgtcgttgatacatcttattgagtagcgtgtagtgcgttttctttgtgaaatgcctgtgtaccgtaacagataggcctccgcataaaacacttattaaaatgacgattggcttggacttggtgcagattcagagggaccatagcaaatctgtggttgtcctcgaaaatgacagtttattccgatatttaagaccctggaaggttttaagtttggcttttaatttcccttactatgtagtgagtgaaggaaattatggagcgtcctcattaatgagtcaccatgggaaaaatagattgcgtcgctcgctttgagccgcttggataaggaaatggaagcagcggcggcggagctcctgtcttttaaatggaggatcattgattgtgttggtggttgctgttactggggcattaaaccctcgccgctggagcgcgcgtctgcgcgtgtccgcgtgtgaaaaggagccgggaatcgtggggccattcataacctgcttgagctgtcctcggcaggccggggggaggtgcgcgcttccagggactctcccggtgtttactacgtcgtgcctgagaaaccaggcgggggcggggggaggcagggagcaaaaattcacctctgtgccctaggatgaaggggagaccacgggctggattgggaagcagatgggaactttctcttcctggcgctgctccaccccttacccgccccccacctcctggcttctcctcgagtatcgtcagtgttttgatggaaaaatcatttaggtgtacattattggagtggaaaaaccacttagatgtgctcactttaatcccctgtggactttctctgtaggtctctgcctgggaaattcgtatgcaccgatgtacaagcacgtgcattgcagcattcgctcgctcctcagtgttatgtgcctagacgtgtcatttctcattatgcagattccagagacattgcatgcttatggctgggagtttggcccctctgcaagatgagggggcagagagaagaaagaggaaatcgtcccaggcagctttggaagggttcttagtggacggtgctgcggtctggcttgtgtgaatgactttctaaaatggcggccaggacccactttatgtgggaatcagcagagccgatctcagaatgcacagagggaggagggggcggaggattcgagctgccttggaaagcggcagtctggaggaacattactgtattaaaaacggcttagctggcagtttgctcacgactgcattcaaaggagtatcttacctattgcagagtaaaagcagatgctactgataaaagcaggttattttaaaactaagcagatcatgtgtccctgaaattcttttattttaaaggtttttttttttcatttttaaacaaatctatttagttgtttaaatagacagtacatttttatgggttcaaagcatgtgaaaggtatacagagaaaaatctccacccctgaccctggaattcccagttgccacacttcctcccctcaccccccaaaatccaggtaatgtctatttctggtttcttgtttatctttctgcatgtacaagaaatgttcctgctgatccagctgtggagctaagtggaccttgtttggaggaactcaaggccttttatccctattgtgggatatattttgtaaaatgtgtgattgctactaggagtaaaagtgaaatctgaataatttaagtgaaaggaataaaaaggtagttgtaccagaacgatggctctgcaagaaaatgaaatggtattcacttctggtgtcttgtacaaatcagaatgagaaaaaccatgcaatacctatattaaaactgaactttaagtgcctactcttatccttttccctagctgattacattaataactgttttacaggattaagaggtgtacactgggaatacattatataaaacgttttcaagatgaatgttctcttaacagtgattaggcttttgtagtaagtgtttgcattttacaaaaagattaaaccagacagctttggggacagcttagagacattttaacaraaaaaagaggtcagtcagttctttaaaaatttttatatttatttttaaatttacattctgattagttttgtttgtttgtttgtttttaaatggacagtagattgaggggtggatggcgatttggctttttcctccccagtgccaaagaaagaccaaatccttaaaacataatcagaacatttacaaaaattggcttttcttttcttgcaataataataaatctgttgttatttttacagttttcagtttgcggatttaaaaaaattaaatgagaactatttctgaatcgggttttagttaacaaagattcattacagggacacaatagagaaagtcctttcctttgtatgttagctgggttgaagggggaagggaggagttatacaattggttcctgtcttttagttatgagagggagagagg

SEQ ID NO: 719466 - DNA, 603 bp, Homo sapiens
cacaatataaaatattgaatttccttttcctgactactagggatatttttagacttaaacaaatttgactcactgtagcctgtatcattgttacgtcgcttcttcatttgagaccagaaggtttctatgaaaccacttcttgtctatggccataccacccataccacccccatcccgtctatgaaaccacctctggttttgaatattctgatttccaatatctatttgcatgataggcttttgcacattttaaaaataaaacaaaaaattcagagttatcttaaaacattaaaaattacacagaataattataaagcaatacagaataatacagaaaaattatacagaataattatacaaaataataaaaaataataaaatgggttttatttcccaaaaggaacgcccctggcagattggaggaaaatatagggctcactgccaggaagaatgatagtgtttcgcttgtgtggagggcacctttttctaactacctttgttgcagactcgtgattgctgggattgtattgtgtggtatacttatgaagaggtttcaggcttgatttatgggacattttaaatcctgtraacactaatcctttg

SEQ ID NO: 719467 - DNA, 651 bp, Homo sapiens
tttttttccttcccaccttcatcctcctcctcgcagaggtgatcagatgtttgcaggtgcctgcttgtgtttacaagtaggtcttggaagataagagaggcagtgggaggggtgggaaagccctgttctggcagtcaggacacccagggcttggccactaaccagctgtgtgagctcggccggtctcacaccctctctgggttatggattcctgaggaatccataaacacgcaaggattcctcaggaaaacacaatacgggccgggcacggtggctcacgcctgtaatcccagcaccttgggaggccgaggcaggtggatcacctaaggtctggagtttgagaccagcctggccaacatggtaaaaccccatctctactaaaaatacaaaaaattaggccaggagcggtggctcatgcctgtaatcccagcactttaggaggccgaggcaggcggatcacctgaggtygggagttcaagaccagcctgaccaacgtggagaaaccccatctctactaaaaatacaaaattagccggggtggtggcacatgcctgtaatcccagctagtcgggaggctgaggcaggagaatcgcttgaacccaggaggcggaggttgcagtgagccgagattgcgccattgcactacagcct

SEQ ID NO: 719468 - DNA, 589 bp, Homo sapiens
gtgcctgcctcttggcgctgatgtcaaaatgaaatgaaacggtgaaagtacccagcacatggcagacacccagcatgcagtggtaattcttctgccaggttcagagaggggcagtggcttgtctaaggtcacacagagggtaggcagaggagctggtacccaaccctttggccttcctgagctgggccctgaacgggctgagatgggagggatgctcatagccttcaagaagtcagggttggggctggggaccacagagcacccagcagaggcctggtcagcattgtgcrtccttcagctgtttcccagcctgggatgggacaggacatggccactatccacccaagactgcaggtgggtgccagaccaagtgtccatcccccccgtcccctcacctcatcagccacctcggtactacggtactacatgcccccccaccactctacccagttctctacccagaatggttttgctcagtctgcaaggagccacgtcccccaggggacccagcccaggccagcctgaggcacatatcccaggacctgccagaagagctgtgtggcctcagaaaagcctctttcctgctctc

SEQ ID NO: 719469 - DNA, 617 bp, Homo sapiens
gatctgtactttcagagaacatgcatctttaagttcctcggcgccgtagcaatggatcttgggatagacaaggtaaagccgtatctcccaatgatcatagctcctttgtttcgggaactcaacagcacctattcagagcaaggtaaccctgcctcgtctgttctcctgccttttgcacatgaggatttctaacttctctcctgaatgtttccttcttcctttctgtcctccctccctgcctgagatttatttttatttatatatatattttaattatatattatatacttatatatgtttatatttatatatayacacacacacacacacacatacatttaaaaaagagagagagatgaatagtggtctatgttatgccaggctggtcttggtctcaaactcctggcttcaagcagtcttccaacctcagcctcccaaagtgttgagactatagaagtgagctactgtacccagccagagtttatttttaaaaagaaaacttatatcaagataattaacaaataggcatatttgtattatatttgattgccctcttctgtatgctttctgctgtcccagaaagaatgtttctcacataaaagatgatgctttatcct

SEQ ID NO: 719470 - DNA, 1366 bp, Homo sapiens
gcaaaaaaaagagaaagatttaagaagccgcagtgagttcagtgttccctacttttgcttaattctttactatatgcttggagtgtttcaacataaaaatgttaagagcctcagacaagagtcttcaggtgaaagtcagtttacaacttcagaaatccactgaattcattcatagagctctccccaattccttgaatatctgggaactcaggcagtgtctctggagtccaagagatgctaatctccacctggtgcagtcctaaccggctttgggactgtcaggtccagatgactccctttttaaggctcttgtgaaatcactccacccagaggatgcacaaaaagtaagcattaggtatctaaaagcttccgttaggaactcttaggaggaaatggtatttaacaagctttcttcagactaaacattgccaattccactactgggagtgatgacaaatggctctcaccccagctttgacgctagtgacctgtgcgatattgggcaagaccatctacctttccattacatcatatgggcctaaacaacttcttctgggcttaaagtgtctgttgttctaatctgagagttaagaagatgggggcagatgccaataggcaacaaacatgacctcccaaccataaattattctaggggtgcaggtagccctgcatccaaacctgttccccaagcacacatcctatttccctcatcaaacttctatagctcaaattctcaaattcagacacttctcaattaaaggccacattaaaatgcaaataatatgtgggaccgtaatcacactttagcctcagcaacacacattatctcttttaattcacacacagccattttcaacacagataaaaaaactgaggcttagaaagcttaaatgattggctcaagataacacagttcttaagtgggaaacccaagcttcaagccaaagccttcaaaatttcaatcttagagtaatttaattgcctcaaattagccttaacagggggcagaatcccaaaagaaagcaaaagaggaagggggaaggtcaaagaaagtatggtcctggagctgggaatgctgccaaggggaagatgaaaagaatgaaaaagactgaaaaacytctttgtcttactttgtcattttgcataaggctagtttccttcacaaccttatggattttaatttttcaaagattgaagtgggccgaaaacaagctaccaaggtgtgcaagacagttattattaaaactattttcctctccaaactttccaaccacagcgaggctggatcattaactgtgtgaaccaagagaaacgatttgtgaaaatcaacatgtgcagtccttggcatagcaagtaatcagggaaa

SEQ ID NO: 719471 - DNA, 607 bp, Homo sapiens
agggagataaagcccagaaccatagataaattttcagaattataaattgaaatgatgtcttatcttcttcctagagatacttacttacagtcaaaagattaggaacccagggagttttcatttctcttctcaagaagttgtttacattgtggagattagacttatctccttctcttagaagagaaggtgcccgttgattagctaatccaaacaaatttccaaatttagaatttcagttttcctctcctgaagtataaatccccacacgtatggcatratatctggctctcatcacataatttgtggagtatgaagcacagggaaacaagtacagttattgctttaaataataactttgatcaccactccagaaacctcatgtttgatttctggataaaagtaaatgactattgatattaaagacttaccaagagtttgtctatttataacattctggtctttactcttcatcaatactttgagagtattttgttatcgtatcattcccatttttatatttaaaaaacgccatcaatccaattcttgatcttttatatgtaatcatgtgtttctgtaagctttcaaaaaatttccctttgttttaata

SEQ ID NO: 719472 - DNA, 607 bp, Homo sapiens
agggagataaagcccagaaccatagataaattttcagaattataaattgaaatgatgtcttatcttcttcctagagatacttacttacagtcaaaagattaggaacccagggagttttcatttctcttctcaagaagttgtttacattgtggagattagacttatctccttctcttagaagagaaggtgcccgttgattagctaatccaaacaaatttccaaatttagaatttcagttttcctctcctgaagtataaatccccacacgtatggcataatatctggctctcatcacataatttgtggagtatgaagcacagggaaacaagtacagttattgctttaaataataactttgatcaccactccagaaacctcatgtttgatttctggataaaagtaaatgactattgatattaaagacttaccaagagtttgtctatttataacattctggtctttactcttcaycaatactttgagagtattttgttatcgtatcattcccatttttatatttaaaaaacgccatcaatccaattcttgatcttttatatgtaatcatgtgtttctgtaagctttcaaaaaatttccctttgttttaata

SEQ ID NO: 719473 - DNA, 607 bp, Homo sapiens
agggagataaagcccagaaccatagataaattttcagaattataaattgaaatgatgtcttatcttcttcctagagatacttacttacagtcaaaagattaggaacccagggagttttcatttctcttctcaagaagttgtttacattgtggagattagacttatctccttctcttagaagagaaggtgcccgttgattagctaatccaaacaaatttccaaatttagaatttcagttttcctctcctgaagtataaatccccacacgtatggcataatatctggctctcatcacataatttgtggagtatgaagcacagggaaacaagtacagttattgctttaaataataactttgatcaccactccagaaacctcatgtttgatttctggataaaagtaaatgactattgatattaaagacttaccaagagtttgtctatttataacattctggtctttactcttcatcaatactttgagagtattttgttatcgtatcattcccatttttatatttaaaaaaygccatcaatccaattcttgatcttttatatgtaatcatgtgtttctgtaagctttcaaaaaatttccctttgttttaata

SEQ ID NO: 719474 - DNA, 2588 bp, Homo sapiens
attattattaaacattagatgtacagatataaatatgcatatacctattatgtcaaatttgttaatatttccattttttttaatgagaggtctagtatgagtaaggaaaatttatttttaaacacaaatgaaaatttgattcagacaatatttccgtaagctagtcaccttaagcaaagtacaaaaccttatttaaatgagcaaattacttgccttatataatgaaaaggaatattctgccatgtatttgtacattattgaaacaacttaaggaacatttaattaagaaaaaaattaacgaaaaattcaagaatatttttgactaggacttaggactgccaatcaaatttatagtccatctgtgttagtttctcatattcgttgtctaagagatagtaaagtaacaattgctgcttttactatgtcaaggcaggtatgagtaatatttatagaccatacacactgtaaatattatagggtttacactgcacccaagtggatatctttatacttgaatagaccagagaatactcattttttcccaaatgtatttttttgtattagagataatgatactatgcaaattagcaaggcttaatattcttaccaatatttggtgatttgaaatcagccctggttaacagatggccccatcattctggaacataattgatattcttttagaaaatctcaacagaaaggccaatggacatgtattccacctggtcccttgataaattggcattttcagataggaaactttcccgacaacagagtttattagcaaaatcctgaattttatactcaccaaaggcaaatgtgttcttttcaaatttccccagtgttctaatttttcatatctttaatttttttagctttgtatttgtgttgttctttgaaattgttttaagattgctaaaaaataagtttatcatggtgtcttactcagaagtgaattttctgacaaaggccagcgaacttagtgagattcagagaggagaaaaaaaaaacaaaactatgtaatcaaacctggtatgcacccaaagtttagacaaagcaaatggagcctggcacacatgaaatgatttcaaccacaagaattcgtatggctgtaatagcatttgtgggatcattgtatgacatgcatgcacacctgttaactaggaacacaatttcacattcaatggctggctcctaaacagaaacagcttgtgcttcccmttgacatgaactgtcaagaccaaccttgcaaagacacagatatcccaacagttcactctaaccaccaagcatcacctagacttcctggaataaagaccatccctgggatcttgagaaagcaagaaagcacaagcctttcagagaaagagtggctgagaccaggtgtgattgatgagccctctcatttatacaatgagattcaaatccaggctgaaataactaaggtaatgaaagaaaaaaaaaaactagtaaagattaatgagttttaagaactgtaccctctgttctgaaacaaatgtggtagcattattgttatcacttcaaaaggaaagtcttttctgtttttaatctcagaaatttctaatctttttaaaatttcaactataatgttttaaattcagtagtcaagatttcactggaggaaaacgtatatatacaaaaaggtaaaataatgatagaaaaaatgcatacctcttctactaggagaaagtcacattttaatgtcttgggccataaacatcactatgtatgtaacttttagctacaatcagttgaggtacagacaataaattcttcaacatttggcaattgattgaagagaaatactcacaacatgagctacataaactcattctgtaaatgagaatattttaaaagatattgactacagatgtttcaaagtagaatttaaggtctcactgggtgtccccaactggtgatcactctgttgtaagcttaactctttagcaaggtcgttcaaatttctgttttcccttctcaacttttcaccctgcaagcagtcattgttacatttcaacacttctttacatcaagcacctaatataaactgggaacagctgcaatttcactgcccagccctttcttccacccttacaacatttgttctgttaatgtaggttaattctgcaaataacacttctgtaaattgttcttgcaaactgctacatcatttatgtaaggacttctgtgaactttgaaaaattaatgcctttaattttggttgatggcaacatcagcagagctctgtaaattgcactttaatgagattttgctacaggggataatctgctactgacagaggaacatcttgaaaacatctgtagacctataatttctctatgacgattagatcccaccacaagactccaaatacaaaccccaaataaagaaggaaaatgtaaagttctaaatgagaatacaacctgttctttaaaagcaagaggcccactatgaaaagtttcatgcactgaaaataaatcatttttggactaattaacatttagctttatttaattaagaaagactattagtatctccactgctgtgcatctgtatataatgaagca

SEQ ID NO: 719475 - DNA, 1356 bp, Homo sapiens
gactccatctcaaaaaataaaaataaaaaataaaaataaataagctgttcttggaaggaaattcttataagaaacttttcctggttccaatttcagagcccatctttaaggagcttctaagaagcattaatgatattcatgcacatgcacaccatccatcattttagtgtaaatctttacttgtttagaacattgtatgattctaataatactaaagatacttttatttaaaaatataatatagattttttaatgttacaaataacattagctctaacatatgaatgcaaatgacctatggttattgctttacgttgggccactcaaagccctggaaaaccttaagaacaggtgttaacaggcatgcaagcactgaagccagtgacataagtctgaatcctgcctctgaaatttactaggtgcagggtactgcaataggactttctgaaactttttttccttccctaaaattgtaataataccacctattttttcagggttgttataagaactagaggtaacatacacatagtcctggttcagtgccagaattcaatcaatagtacttttttgtattgctttcaccaaaatttctatccctcttccccagagatgaaattagtactctagaagttcttaggatactggggtatatgttgaaaatgtgagcattccagccatggtgagtaccagaaaaaaaaaaactgtacttacatagaaagtttaccaagtaaataatgtgaaaagtccctcaccacaaagcaccgagatgctgaataaattacaacagatattcaaatactcagatacaacaaatgcatggctgagctcataacaaaataaaggaggtgcccaaaggcaagcaaaaaaaaaaaaagaacccaaaacttaaacacaagtaactaactygtaagaccatgctgcccaagaggcaaagtcattgccaggaacccgaaagcctaggggactaagagccttgcaggggacggaagttttggccttgggttttcacaataggaaaaagctgaacctgaggcctggaactaaggttccataaaagggagcattgggccgggcacggtggctcacacctgtaatcccagcactttgggaggccgaggcgggcggatcacgaggtcatgatattgagaccatcctagccaacaaggtgaaaccccgtctctactaaaaatacaaaaattagctgggcatggtggtgtgtgcctgtagtcccagctactagggaggctgaggcaggagaatcacttcagcccagatggcggaggttgcagttagccaagattgcccccctgcactccagcctggcgacagggtaagactcagtctcaaaaaaaa

SEQ ID NO: 719476 - DNA, 1449 bp, Homo sapiens
ggagaaactccatctctattaaaaatacaaaattagccaggcgtggtggcgcatgcctgtaatcccagctactcgggaggctgagacaggagaatcacttgaacccgggaggcagaggttgcggtgagccaagactgtgccactgcactccagcctgggcaaaaaaaagaaagaaaagaaaagaaaaaaaaagaaaagaaggaaagaaaagaaatgaagcgaaggtgctcctctcagaaaagaaatttgtatcattcaccactatatttgatttttttcatcttattcaatcctctgactcatatatagcacactgacaaaatctggtcaaaacatcatatggtgcctcaacacattgtgtagatttttgcatcagaataaatgtgtaccttgttaacaagttaaccatgttctaaatgtcaatatctacaaaagtttaaagcacattcccatttttctagcataaagcaatgagaaggcaattaagttaatgacattcatgaagaaatcacagagctactggaagcacaaaagtcataatttacatgaaggaaataaccttcctgaggaatacagtgtaattaaggctttcctctttgaaaaggcctaatatttctaaggagctaagaaatgaatttagcctacaaattcaaacttatttttcgtgtgtacaaaatttatccaacttgaagggagaaagaaactattttcaatattctagctgtaaaaaactgtatttaaaactattactgctcacctgagtcttcgttctccaatcacaggataatcaacttttctatgaattagaagcatctaatgcaaactcacacagaacaaattaccagtaagtctctcctccattttataagcagcgacaaagttttagaacatcataaaagagctaggaacagacagggtctgtgaggaacttagaaaatcaaggggaaggcccagcttgttgtgcaattcaggtttaaatatattatcaggccgggcacagtggttcatgcctgtaatcccagcactttgggaggctgaggcgggcggatcacgaggtcaggagatcaagaccatcctggctawcatggtgaaaccccatctctactaaaaatacaaaaattagctgggcgtggtggtgcatgcctgtagtcctagctactccggaggctgaggcagaagaatcgcttgaacccagaaggcggaggtcgcagtgagccaagatcacgccactgcactccagcctggcgacagagcaagactccgtctcaaaaaaaaataataataaataaataaataaataagtaaatatattatcaggtagtcaatccctttgctttacagaaggatgtttcattgcatcccatgatacaaaattttaaagatgtaactttgtctcaaagcaacaattaacagtgatatggctaacttcaatagctagaattagaggat

SEQ ID NO: 719477 - DNA, 1449 bp, Homo sapiens
ggagaaactccatctctattaaaaatacaaaattagccaggcgtggtggcgcatgcctgtaatcccagctactcgggaggctgagacaggagaatcacttgaacccgggaggcagaggttgcggtgagccaagactgtgccactgcactccagcctgggcaaaaaaaagaaagaaaagaaaagaaaaaaaaagaaaagaaggaaagaaaagaaatgaagcgaaggtgctcctctcagaaaagaaatttgtatcattcaccactatatttgatttttttcatcttattcaatcctctgactcatatatagcacactgacaaaatctggtcaaaacatcatatggtgcctcaacacattgtgtagatttttgcatcagaataaatgtgtaccttgttaacaagttaaccatgttctaaatgtcaatatctacaaaagtttaaagcacattcccatttttctagcataaagcaatgagaaggcaattaagttaatgacattcatgaagaaatcacagagctactggaagcacaaaagtcataatttacatgaaggaaataaccttcctgaggaatacagtgtaattaaggctttcctctttgaaaaggcctaatatttctaaggagctaagaaatgaatttagcctacaaattcaaacttatttttcgtgtgtacaaaatttatccaacttgaagggagaaagaaactattttcaatattctagctgtaaaaaactgtatttaaaactattactgctcacctgagtcttcgttctccaatcacaggataatcaacttttctatgaattagaagcatctaatgcaaactcacacagaacaaattaccagtaagtctctcctccattttataagcagcgacaaagttttagaacatcataaaagagctaggaacagacagggtctgtgaggaacttagaaaatcaaggggaaggcccagcttgttgtgcaattcaggtttaaatatattatcaggccgggcacagtggttcatgcctgtaatcccagcactttgggaggctgaggcgggcggatcacgaggtcaggagatcaagaccatcctggctaacatggtgaaaccccatctctactaaaaatacaaaaattagctgggcgtggtggtgcatgcctgtagtcctagctactcsggaggctgaggcagaagaatcgcttgaacccagaaggcggaggtcgcagtgagccaagatcacgccactgcactccagcctggcgacagagcaagactccgtctcaaaaaaaaataataataaataaataaataaataagtaaatatattatcaggtagtcaatccctttgctttacagaaggatgtttcattgcatcccatgatacaaaattttaaagatgtaactttgtctcaaagcaacaattaacagtgatatggctaacttcaatagctagaattagaggat

SEQ ID NO: 719478 - DNA, 1449 bp, Homo sapiens
ggagaaactccatctctattaaaaatacaaaattagccaggcgtggtggcgcatgcctgtaatcccagctactcgggaggctgagacaggagaatcacttgaacccgggaggcagaggttgcggtgagccaagactgtgccactgcactccagcctgggcaaaaaaaagaaagaaaagaaaagaaaaaaaaagaaaagaaggaaagaaaagaaatgaagcgaaggtgctcctctcagaaaagaaatttgtatcattcaccactatatttgatttttttcatcttattcaatcctctgactcatatatagcacactgacaaaatctggtcaaaacatcatatggtgcctcaacacattgtgtagatttttgcatcagaataaatgtgtaccttgttaacaagttaaccatgttctaaatgtcaatatctacaaaagtttaaagcacattcccatttttctagcataaagcaatgagaaggcaattaagttaatgacattcatgaagaaatcacagagctactggaagcacaaaagtcataatttacatgaaggaaataaccttcctgaggaatacagtgtaattaaggctttcctctttgaaaaggcctaatatttctaaggagctaagaaatgaatttagcctacaaattcaaacttatttttcgtgtgtacaaaatttatccaacttgaagggagaaagaaactattttcaatattctagctgtaaaaaactgtatttaaaactattactgctcacctgagtcttcgttctccaatcacaggataatcaacttttctatgaattagaagcatctaatgcaaactcacacagaacaaattaccagtaagtctctcctccattttataagcagcgacaaagttttagaacatcataaaagagctaggaacagacagggtctgtgaggaacttagaaaatcaaggggaaggcccagcttgttgtgcaattcaggtttaaatatattatcaggccgggcacagtggttcatgcctgtaatcccagcactttgggaggctgaggcgggcggatcacgaggtcaggagatcaagaccatcctggctaacatggtgaaaccccatctctactaaaaatacaaaaattagctgggcgtggtggtgcatgcctgtagtcctagctactccggaggctgaggcagaagaatcgcttgaacccagaaggcggaggtcgcagtgagccaagatcacgccactgcactccagcctggcgacagagcaagactccgtctcaaaaaawaataataataaataaataaataaataagtaaatatattatcaggtagtcaatccctttgctttacagaaggatgtttcattgcatcccatgatacaaaattttaaagatgtaactttgtctcaaagcaacaattaacagtgatatggctaacttcaatagctagaattagaggat

SEQ ID NO: 719479 - DNA, 3272 bp, Homo sapiens
  misc_feature 851, 852, 853, 854, 855, 856, 857, 858, 859, 860, 861, 862,863, 864, 865, 866, 867, 868, 869, 870, 871, 872, 873, 874,875, 876, 877, 878, 879, 880, 881, 882, 883, 884, 885, 886,887, 888, 889, 890, 891, 892, 893, 894, 895, 896, 897: n = A,T,C or G
  misc_feature 898, 899, 900, 901, 902, 903, 904, 905, 906, 907, 908, 909,910, 911, 912, 913, 914, 915, 916, 917, 918, 919, 920, 921,922, 923, 924, 925, 926, 927, 928, 929, 930, 931, 932, 933,934, 935, 936, 937, 938, 939, 940, 941, 942, 943, 944: n = A,T,C or G
  misc_feature 945, 946, 947, 948, 949, 950, 1022: n = A,T,C or G
tttaataagatgacacaaagataaaatgaaaagtagttttaaatattggcttcacaatactagttaatatctcaaggcatgataaaatgtcaggtaaagttcatacataataacagtggatgtaaattcagacttcaaagaatctctgtgatacttctgattttatttgtgactgtaaaggcctcgtctccctaaataataataatcaagtaggctaagcatggtggctcatgcctataatcccaacactttgggaggctgaggtggggggatcacttgagtcaggaaattagagaccagcctgggaaacatgagaccacgtctctccaaaaacaaaaaaaaacaaaaaaaatcagccagatgcagtgccgtatgcctgtagtcctagctactgaggaggctgaggccagaggattgcttgagcccaggaaatggaggctgcagtgagctgtcatcatgccatgcactccagactggacaacagagtgaggccctgtctagaaatttagaaaaaaaaaaaagaaaatctacttgtaaacacttttagatttttaaatacatttctttttcaaatcttttttaagtttttattttatttgtatttttatttcaggaatagcacaaaagaatcaaatctttatttttgaaggagataaatccaaatgcagaagcatctttgagtgccttaaatttacattttatgatccttatcaatagcagtgtctggccagacacagtagctcatgcctataatcccagcgctttgggaggtcaaggtggtggatcacttgaggccatgagttagagaccagcctggccaacatggcaagaccccatctctactaaaaatnnnnnnnnnnnnnnnnnnnnnnnnnnnnnnnnnnnnnnnnnnnnnnnnnnnnnnnnnnnnnnnnnnnnnnnnnnnnnnnnnnnnnnnnnnnnnnnnnnnnaggcatgagaatcgcttgaccttggaaggtggaggttccagtgagcagagagtgtatcgatggattccagcntgggtgaagagcgagagactctgtctcaaaaaaaaaaaaaaaaaaaagcagtgtcaaacatccccaaataaacacaatttgccaaccaaattaataatctttgctggcccaactcttcctgctgtctaaatacttcaaaattattaattctaataagttgttgactcaagagatttctgaaggtatcatcactcctgttgataattttcctcctaccaatagccagttacatgaggaaaggattgataattccaatgaaaagacctggcttcttttctaactattggagaaactttagaaaaactttaggcaaatcctttaaactctatgagcctgtttcctctttggtaaaaatgaggattgtatccctacagaatgggtgaatgcttcctaaaacaaaaactccctccaaattcagttgtacccgtgaagtattgctgttaaatctagaacaatgaatgtaaagttataagccacagaatacaacctggaccctatcactaatttgtcaagtaaccttaagaaagtcaatctctctgggcctaattagtaaaagagattactggaccaaatcactagttccaataattgttatgggcgatggagcacttgaaattaacaaacgatgatctttgcataacacgtttcagtgggataaaataaaatattgatttaccagctaagttcagttctatcacacacaggggatatcttatgaatggaaaattcaaccatattatatatattagaaatttaaaaaatcagcctgggcacgttggctcaggcctgtaatctcagcactttgggaggccaaggcaggaggatcacttcagcccagttcaagagcagcctgggcaacatggcaaaatcctgtctctacaaaaaaaacacaaaagacacaaaaatgagcatggtggcgtacacttgtagtcccaattactcaggaggctgaggtgggaagatcacctgagcccagggaggtcaagactgcagtgagcaatgatcacagtactgaacttcagcctaggcaacagaatgagaccttgtctcaaataggaaaaaaaaaaagaaaaacaaagaaaaaatcacagctaccagcatacaaggctacaaaaaaaattggctgtttgaggtttccctcttaatctgtattcatttgtacctgttatttcactttgaattcaggctcgtactcccaagcagagaaatggtagaaaataatgaaaattaaaaaaaaaaagtgaaaaatcataaatgaggaaattatgttacctaattaaaagaaaacaatcctgtcattaattattaattatttaattatttaatttcagtagcagaactccacacccaagctccttagagcagagctagaagatcaaggcaccagatactctccaaggtccctttcagccctagggactctgtttctggtttccactgcaatttgcattctatttttatatgctacatactgttccaggcacaaataaccatgtaatatttttaatagtacctgataaactgatcattttagtaagagtccagtaaacatttatttacacatttacacacacccacagaaagcaatccttgtattctgagtccactgaagacatctcagaagctcaataaacactgttaacagtacatgttattccatactaatttaataaaccaaggacaaactgtcttttcttgcaaaagaccctagcaattagatattaaaattttccttgcacactgcagtgtatttgtgacatatacttgtggcatgcataagataagctagttccaaaataaacacagtggtaaatagtaaggaaaatctagtaactacagttcctcgtcttaagatcatgacatctttaggcattattatttcaagtgttacagtcctgaactaagttaatggacaaaaacaagccaaggcacacttatgytaaactataaaatgtctcacatatgtatctctgatttctagttaaaaaaaaaattataaacaatgttaaaatggaatacttaaaacttcactgtttttcttggtagaaattatgtatttgcttataagaaactttctaatgacataatgtagaaataaataaaaaactgaggatagaagccttattctgctttttaaaatctagaggttttcaaataactcaatcccttcatcaagtccactcctgctcattacagagcttagaataggatacaccagttcctgttctcgcattttcattttgtcccaaa

SEQ ID NO: 719480 - DNA, 664 bp, Homo sapiens
gatattaaaaatatatatatttcatacctaattttatacctaataacataatagatctttttgtatcaacacagcagtgctacatcattctttttagtggctacttaaaattctattgtatgtttgtgtcataatttaattaacacaaccctagtgatggacatttacagtaagttttgtttgtggtataaaaaataccacatagaatgtttcttgtggacatgtctctttgtatttgtttaagtatatttttaggataattttcttgagaggaattgccaggtttgataatattatgacattatcatgatgtctatgataatatcacagatactatcatatctatgataataaaggcacaaaartacatttgtgtattatcttagatatgtcaaattgtgtcagtttacattccctccagcattgcttgaatgtgcctttctctgtacacttattttaatatttgtgcaattcccacttccatagttccagtttttcctttttaattaaccagttagctagtatgacagaagattaaaataaaaattatattatttgggagcaagatggcccaatagaagcctttactaatcatcctctctgcaggaacaccaaatggaacaaatattcacacaaaaaagcatcttcataagaatcaaaaatc

SEQ ID NO: 719481 - DNA, 568 bp, Homo sapiens
taggatatttcatatatctgaaaatatatatatayacacacacacacacacacacacacacacagagtcccttagcagtgtatcataagcactagcaagggactctgactcaccatggcctctgaaactcaaatgctttcactagaggacgaggcaaacactttaaaatgatttttttttttggtattcttccaagactattgccttcctaatacaaatatgactgctgctctctaaaatgaaactactcagattcatctgcactcagtttggatagaatgttgttaaggaagaaaggtgcttttgtagagcagtccacaaaaaaatgcatgaataaatgaaagtaaactttgaatgttcgttaactttgagttacaacagcaaatagaaatgaaattgattgctacaagaaggaatgctaacaccacgtcggatataatgcaaaatgcctcaactcaacacactttgacaaaactgccagcgaagtaggtattgatacagaagactatgtaagtccacattaaacaaaagtagcagtttacaattagacctgaaaaacatttggatt

SEQ ID NO: 719482 - DNA, 587 bp, Homo sapiens
ggaggacttgataaagagcaggaagattcaacaataatgtatagacatttgctgcttttaccaaaaatgtaaggattgcaggcttctggatsttttcctgttgaaaccacaatacaatatggtgatgttcactgctgggtttgaagctttcattgttcatgagataaattttagaagtttgttcctttttcatcttacaatatataagatatagccaggtcctcatacaatatctaggacttgtaatcttgaccaaaaatataattttgtgtttaaaactacatagcttttacaatgacaagaaggagaaaagtacctactttgaatctctacctactattgatctttttgcaactgccattgatttccataagataaaaccatatgttaaatatgatatgaattggtctttcaaaaaattacatatttattataacttaatcatcttggatttgacttcaaattaaaattctttcaaataaacgtatacagtaccaagtagtatagatataagaaaaattcctcaaatactccaccagagaatatattcatgccaatcataaaattaaaactcttttttagtattt

SEQ ID NO: 719483 - DNA, 587 bp, Homo sapiens
ggaggacttgataaagagcaggaagattcaacaataatgtatagacatttgctgcttttaccaaaaatgtaaggattgcaggcttctggatcttttcctgttgaaaccacaatacaatatggtgatgttcactgctgggtttgaagctttcattgttcatgagataaattttagaagtttgttcctttttcatcttacaatatataagatatagccaggtcctcatacaatatctaggacttgtaatcttgaccaaaaatataattttgtgtttaaaactacatagcttttacaatgacaagaaggagaaaagtacctactttgaatctctacctactattgatctttttgcaactgccattgatttccataagataaaaccatatgttaaatatgatatgaattggtctttcaaaaaattacatatttattataacttaatcatcttggatttgacttcaaattaaaattctttcaaataaacrtatacagtaccaagtagtatagatataagaaaaattcctcaaatactccaccagagaatatattcatgccaatcataaaattaaaactcttttttagtattt

SEQ ID NO: 719484 - DNA, 906 bp, Homo sapiens
tttytttttttttttttccaagacggagtctcgttctgtcgcccaggctggagtgcagtggtgcgatctctgctcactgcaagctccacctcccgggttcttgccattctcctgcctcagcctcccgagtagctgggactaaaggtgcccgccactgtgcctggctaattttttgtatttttagtagagacggggtttcaccgtggtctcgatctcctgacctcgtgatccacccgcctcggcctcccaaagtgctgggattacaggcgtgagccactgcgcctggcccaatctacatctttcacctagagaaagaagtttcaatagatttaacttataacagaagatactttacttacacatatcaagatgaaatcttggctgtaaagctgattataggctcaatgtatgacatcttcatcactctaccaactaatgtaagtatccactattctcaaacattgggtaaaatgctagagggaaaatgatggaaaagatgcagtgcctgccatctgaagctcttggctagtttgtccaggagtgagacagtcatctattcagttacaaaacagcaaggagaggcatgttattcatgtgagtggagtgtgccgattgaaaagagtccttggtctgcttagctgtgtacctgtctatggcaggaagcagaaccagctgttctcttttttccaattcttttctttcattgaatcgtaaatcctgttttcacaacggccactgtttctattgctatggaaatgatgacgatgtatatcacaaattcaaatattatgatgtgactacaggactcaagaggaggaaaagatgagctgtcaagggcacagttttcctccaagtcaaatgcctttgttaatgagcaagtatgttaataaaaaactatgaaaagcg

SEQ ID NO: 719485 - DNA, 906 bp, Homo sapiens
tttctttttttttttttccaagacggagtctcgttctgtcgcccaggctggagtgcagtggtgcgatctctgctcactgcaagctccacctcccgggttcttgccattctcctgcctcagcctcccgagtagctgggactaaaggtgcccgccactgtgcctggctaattttttgtatttttagtagagacggggtttcaccgtggtctcgatctcctgacctcgtgatccacccgcctcggcctcccaaagtgctgggattacaggcrtgagccactgcgcctggcccaatctacatctttcacctagagaaagaagtttcaatagatttaacttataacagaagatactttacttacacatatcaagatgaaatcttggctgtaaagctgattataggctcaatgtatgacatcttcatcactctaccaactaatgtaagtatccactattctcaaacattgggtaaaatgctagagggaaaatgatggaaaagatgcagtgcctgccatctgaagctcttggctagtttgtccaggagtgagacagtcatctattcagttacaaaacagcaaggagaggcatgttattcatgtgagtggagtgtgccgattgaaaagagtccttggtctgcttagctgtgtacctgtctatggcaggaagcagaaccagctgttctcttttttccaattcttttctttcattgaatcgtaaatcctgttttcacaacggccactgtttctattgctatggaaatgatgacgatgtatatcacaaattcaaatattatgatgtgactacaggactcaagaggaggaaaagatgagctgtcaagggcacagttttcctccaagtcaaatgcctttgttaatgagcaagtatgttaataaaaaactatgaaaagcg

SEQ ID NO: 719486 - DNA, 1078 bp, Homo sapiens
aaaaaatattattggccgggcgtggtgggtcatgcctgtaatcccaacactctgggaggctgaggcaggcagattgcctgaactcaggagttcaagaccagcctgggcaacatggcaaaacctcgtctctaccaaaaatacaaaaacattagccaggcatggtggtatatgcctgtggtcccagctactcaggaggctgaggtgagaggatcgcttgagcctgtgaggcggaggttgcagtgaggcaagattgcaccactgtactccagcccgggtgacagagtgagaccctgtctcaaaaaatatatatatatataatatttattatgttggctttacagggggctgatggaaaatatgggggtggggcttaatccctcagcccttggctccaggactgtttagttcttttgctttattctaaaagtgtatgcaaattttgcattctattacataatataagctacattgatttttttttaatttttacttttatttttttactgagatagagtctcactctgttgtccaggttggagtgcagtggtgtgatcttggcttactgcaaccttcacctcctgggttcaagtgattctcgtgtgtcagcctcctgagcagctgggtttacgggtgcctgccaccacacctggctaatttttgtatatctagtagagacagggttatgccgtgttggccaggctggtctccaactcctgatctcaagtgatccaccttccttggcctcccaaaaggctgggattgcaggcatgagccaccgtgcatggcctgcattggttttaatggaaaataatgcattgaattatttaccartaaattagttaacttttttcctccaagtggttgagtagaattgacactccaagaagactgcacatgttttatgtgccctgtggcaccatgccaatgagttcctctttaaggggcagggcagagaggttctgttagactgtaaatggatggaaaactattagcctaaccaaattaaatagctctactgtcctcctgaggctttcctcttatgtaaatgacttgtatcctttggtataggatggatgac

SEQ ID NO: 719487 - DNA, 1078 bp, Homo sapiens
aaaaaatattattggccgggcgtggtgggtcatgcctgtaatcccaacactctgggaggctgaggcaggcagattgcctgaactcaggagttcaagaccagcctgggcaacatggcaaaacctcgtctctaccaaaaatacaaaaacattagccaggcatggtggtatatgcctgtggtcccagctactcaggaggctgaggtgagaggatcgcttgagcctgtgaggcggaggttgcagtgaggcaagattgcaccactgtactccagcccgggtgacagagtgagaccctgtctcaaaaaatatatatatatataatatttattatgttggctttacagggggctgatggaaaatatgggggtggggcttaatccctcagcccttggctccaggactgtttagttcttttgctttattctaaaagtgtatgcaaattttgcattctattacataatataagctacattgatttttttttaatttttacttttatttttttactgagatagagtctcactctgttgtccaggttggagtgcagtggtgtgatcttggcttactgcaaccttcacctcctgggttcaagtgattctcgtgtgtcagcctcctgagcagctgggtttacgggtgcctgccaccacacctggctaatttttgtatatctagtagagacagggttatgccgtgttggccaggctggtctccaactcctgatctcaagtgatccaccttccttggcctcccaaaaggctgggattgcaggcatgagccaccgtgcatggcctgcattggttttaatggaaaataatgcattgaattatttaccaataaattagttaacttttttcctccaagtggttgagtagaattgacactccaagaagactgcacatgttttatgtgccctgtggcaccatgcyaatgagttcctctttaaggggcagggcagagaggttctgttagactgtaaatggatggaaaactattagcctaaccaaattaaatagctctactgtcctcctgaggctttcctcttatgtaaatgacttgtatcctttggtataggatggatgac

SEQ ID NO: 719488 - DNA, 1220 bp, Homo sapiens
  misc_feature 2, 3, 4, 5, 6, 7, 8, 9, 10, 11, 12, 13, 14, 15, 16, 17, 18,19, 20, 21, 22, 23, 24, 25, 26, 27, 28, 29, 30, 31, 32,33, 34, 35, 36, 37, 38, 39, 40, 41, 42, 43, 44, 45, 46,47, 48, 49, 50, 51, 52, 53, 54, 55, 56, 57, 58, 59, 60,61: n = A,T,C or G
  misc_feature 62, 63, 64, 65, 66, 67, 68, 69, 70, 71, 72, 73, 74, 75, 76,77, 78, 79, 80, 81, 82, 83, 84, 85, 86, 87, 88, 89, 90,91, 92, 93, 94, 95, 96, 97, 98, 99, 100, 101: n = A,T,C or G
annnnnnnnnnnnnnnnnnnnnnnnnnnnnnnnnnnnnnnnnnnnnnnnnnnnnnnnnnnnnnnnnnnnnnnnnnnnnnnnnnnnnnnnnnnnnnnnnnnnaaaattgtctatattcattgcctcctcctctttacaccctattcacattagtatatctggcaaaaattttttttaactgaatggtaaatgcatgactgacctttcaattaaagccaggagaaagaaacaaatcttaatagaagaaatgaatagttaccctttgcttagggagcaaggaaacatgcaagttaaattcagaaaatccatttggaaaattcaagtaacatgaagaatttttatttggtatgtttgaatttctatgaaattatgaaataagccatatcctctttctaggtgctatcagctgcctcagctgcaggggtttctgtagcttttggtgcaccaattggaggagttctttttagcctggaagaggtaggtgaaaagaatacaacaattaaaattatatataattaccattacaaatatatttcacacatttcagttttrtaggtgatgtaataggtagagactttgttttcaaatttatttttctaaagttgttttccactcattcttaataaaaagtaaatgttattcatgctccatacctggaggaaactttttaaaaatttattaatgtatgaatgttagtaattatttaaaatctaactttgttgacatatttaaaagtaagaagatgtgaatttgacttaatagaggacatgtgaaacaatctatttccattggctaaattctgtatttttagtagagatggaatttcaccatgttggccaggctgtttttttgtggggtttttttgttttgttttgttttgtttttgtttttgagacggagtttcactcttgttgcccaggctggagtgcaatggcgcgatcttggctcactgcaacctccgcctccagggttcaagtgattctcctgcctcagcctcccaagtagtttttgtttaaaaaattttaatcaattcctatgttgtgttttaaagtttttcccatgtgattatttctgatacagttagtgatgttaaagaaaataattttagtgacttcagtggattattttgtttttgttttcttaataggtgtttaagacttttctttttacataaaaatgtaaccaggaatttttttttaattttttttgacaaataataat

SEQ ID NO: 719489 - DNA, 926 bp, Homo sapiens
ctttcagccaatatttgatttatcatgtaatgaaggaaagaatatatacttaaatgaaatttgtaaatgagctaaaaatctcctttaacaaatgctttgtttccttttgtctacctttctctatacacaaatcttttatatttatataactgctaaggacaaataaatactcatgtatttaaaatgtatacattgataatttatttttccaccttttacacatgaactgccagtgtttctccattgacaggaatataggaaagaaacagatgtcacgggggttgtggagaccttaatgcacagaattgatttagcaaatacactacttcgtcaccactgctctcttttcctggacctgggatctgtttctccacacttctttctttaggacccttcatttccactatatattctttcttgttgaacttaagaatgttgttttatccgaaggcaaataccaaaaaacagagggtattcttggattatgcataaactggatggctaatcctgaacagcgtaaagctggttgaaattctaaacagagaatcatagcagttttttgttgttttttttttttaacatgttgtagaaaacacattggtgacagaatacatgactcctgtccagagaaaggagagaaaaagaacagaaaggaaggaaatttgtttattgaacaccttcatattttctcatttaactttgcaggacctctgcaaagtaggtagttatakccctactttacagatgtagtaattaaagctcaagaagctttaataatttgcccaaagtcatgtggtgaacaagtcatggttcaaggaatcagactgtctttcctactttaaaacccagcctcttgctactattttgcactgtaagtgactgatagaaatcctctttctttgtgatttcttaaactactaaaacat

SEQ ID NO: 719490 - DNA, 926 bp, Homo sapiens
ctttcagccaatatttgatttatcatgtaatgaaggaaagaatatatacttaaatgaaatttgtaaatgagctaaaaatctcctttaacaaatgctttgtttccttttgtctacctttctctatacacaaatcttttatatttatataactgctaaggacaaataaatactcatgtatttaaaatgtatacattgataatttatttttccaccttttacacatgaactgccagtgtttctccattgacaggaatataggaaagaaacagatgtcacgggggttgtggagaccttaatgcacagaattgatttagcaaatacactacttcgtcaccactgctctcttttcctggacctgggatctgtttctccacacttctttctttaggacccttcatttccactatatattctttcttgttgaacttaagaatgttgttttatccgaaggcaaataccaaaaaacagagggtattcttggattatgcataaactggatggctaatcctgaacagcgtaaagctggttgaaattctaaacagagaatcatagcagttttttgttgttttttttttttaacatgttgtagaaaacacattggtgacagaatacatgactcctgtccagagaaaggagagaaaaagaacagaaaggaaggaaatttgtttattgaacaccttcatattttctcatttaactttgcaggacctctgcaaagtaggtagttatagmcctactttacagatgtagtaattaaagctcaagaagctttaataatttgcccaaagtcatgtggtgaacaagtcatggttcaaggaatcagactgtctttcctactttaaaacccagcctcttgctactattttgcactgtaagtgactgatagaaatcctctttctttgtgatttcttaaactactaaaacat

SEQ ID NO: 719491 - DNA, 964 bp, Homo sapiens
cctcctgggttcaagcaattctcctgcctcagcctcctgagtagctgggactacaggcacgtgccaccatgccaggctaatttttgtatttttagtagagacggggtttcaccatattggccaggccggtctcgaactcctgacctcaggtgatccgtctgtcttggcctcccaaagtgctgggattacagatgtgagccagcatgcccagccgatgagagactactttgttccctattattgggccgttttctgcacctgtgaggkcagtcactgtttcctgattttccagtatccccagtgcaggggctctgtggggagaaaactctgatgattattgcctgcgtgggaatctacctggtgccaaagaggcgggacaggctactgactgactggctaacagaccagcaggggactgacagcagagtgagcctgcagttgatacgttcacactctgagcctgggtacagcggcagcccctgagctgggccaggtcatagccccacccttccttaggaaccagtgtttactattaaaaagtgagggcaggaaagtgggagaacccccaaatctatacaaaacccaagaacaaaagtccattcaaccatcttatgcaaaattttgcattcagtaagttagcaatcccgaagtataaactactttcaatgttggcatacatgttaggtgtttgtgggtgagtgtcgttgacatttctaattacatagaagaggtgggtgacggggtctcaccatgctctgggagtctaaggtctaaagcggaccttggtgctgggagttgagtcttcaacaatggaactggtggccccaagtcctcacctctctctttctctttctctctctctctctctctctgggtagaagaccttttctgttttaccactgccccttgaattatcttaaaacttagtttcggccaggcgcagtggctcacgcctgtaatctta

SEQ ID NO: 719492 - DNA, 1154 bp, Homo sapiens
gctggtctctcagggaactgccacataagtcaaaacctacaaatacaatttattttcagaacaaggtctatattctgccacctaccacccaggcagtggcaccagcaagccacatcataaattcatgttgtgattcccaggaccactggtgatctagggaatcaagaattgtctgtgggtcagaaaaaagccacagttttttcttactaaaattcagctttctcttttttcaatagatattctctgattattgtaagtgttgaattagattgcagagttttagtaaaagtggattctgccagtttttctaagattaatggtggcttcagtggaggaaccaattcttggagctccctacttaactagtcctatcatgtaaccacactcctaatcttttaaaatgaagagcagtagaaatgaacaaaggtaacataaaatttactggctttctcatttttgatttctctaaagtcttactatttaaagcaaaaataataacagattttgtgtctaaagcatatgtaaaattgtagtgtataaaaatagtacataggtcagagggaggattggagatatatatagatatatagagagagatatatacacacacatacacaaacacattcttataatatgtaattttaattttatttttccctttattcttatcattgtatatgtaatgtttttgcagcccattttttgccacttactatgtgttgaaggacatgaaccaatcacaatatttgtaatgacttcatgataatccctctgtgtgtcagtgaaaatgtattcacagataaaaggctcctgactaactaatttaagcatagaaggactttgcacaaggcattaaattgcttaatccatgacaggagtgagacagctggatttaatgtctagaaatgacacccaaagacagcctgcaccactaaaagcccaggagagttgcttttttggacttagcattaggccacttgtattattcacagttctcctgagagtattacacacatctctctgtctctctgtcgctctctctgtctctctgtctttctctctctttctctctccctctctttctgtatmtatatatatatatatatatatatatttgatggtttctgttttttcttttctgtgtgtgaatagcc

SEQ ID NO: 719493 - DNA, 1154 bp, Homo sapiens
gctggtctctcagggaactgccacataagtcaaaacctacaaatacaatttattttcagaacaaggtctatattctgccacctaccacccaggcagtggcaccagcaagccacatcataaattcatgttgtgattcccaggaccactggtgatctagggaatcaagaattgtctgtgggtcagaaaaaagccacagttttttcttactaaaattcagctttctcttttttcaatagatattctctgattattgtaagtgttgaattagattgcagagttttagtaaaagtggattctgccagtttttctaagattaatggtggcttcagtggaggaaccaattcttggagctccctacttaactagtcctatcatgtaaccacactcctaatcttttaaaatgaagagcagtagaaatgaacaaaggtaacataaaatttactggctttctcatttttgatttctctaaagtcttactatttaaagcaaaaataataacagattttgtgtctaaagcatatgtaaaattgtagtgtataaaaatagtacataggtcagagggaggattggagatatatatagatatatagagagagatatatacacacacatacacaaacacattcttataatatgtaattttaattttatttttccctttattcttatcattgtatatgtaatgtttttgcagcccattttttgccacttactatgtgttgaaggacatgaaccaatcacaatatttgtaatgacttcatgataatccctctgtgtgtcagtgaaaatgtattcacagataaaaggctcctgactaactaatttaagcatagaaggactttgcacaaggcattaaattgcttaatccatgacaggagtgagacagctggatttaatgtctagaaatgacacccaaagacagcctgcaccactaaaagcccaggagagttgcttttttggacttagcattaggccacttgtattattcacagttctcctgagagtattacacacatctctctgtctctctgtcgctctctctgtctctctgtctttctctctctttctctctccctctctttctgtatatrtatatatatatatatatatatatttgatggtttctgttttttcttttctgtgtgtgaatagcc

SEQ ID NO: 719494 - DNA, 638 bp, Homo sapiens
ttttatctttatcacttttatcacttaggaaattccaagagtttcaggagctctgggccacaaatgggacaaaaaccaaatacatgtttcttattataaatcacaatatcacagtcttatttaaagtagggtgacagctttgactcaaattagcaaagcctttccttaggacctagtggrcccttttgatccaaaaggtttctactttctatttgattgttggcattacttcatgtgatccctttaccttctgcattcatattatacatatattaggtcaatgatgagtgatcttcacatttccttttcttttcatcatcagaaatcttactggcctgtttcagtttttagcggatttcttgagataaacttttacttcactgaatcaattttactcttttctgctacttaatagctcccattaaaatactaaatattttaatatttttaaatatttgtttatttatttttgagatggagtctctctctgtcacccaggctggagtgcagtggtgggatcttggctcactgcaaactccgcctcccaagtccaagagattctcctgcctcagcctccggagtagctgggattacaggcatgcaccaccatgccttgctaatttttgtatttttagtaa

SEQ ID NO: 719495 - DNA, 1303 bp, Homo sapiens
tgaatgaatctacctagatgtttttctttccctaattggaatacatacataattttattttgcaaaaatagcagagagtatatgcaatgctttataggaatttttttcccgcttgaaaatagattactggccgggcacggtggctcatgcctataatcccagcactttggaaggccgaggctggtggatcacctgagttcaagagtttgagaccggcctgattaacatggtgaaaccccatctctactaaaaatacaaaattagccaggcgtggtggcgggtgcctgtggtcccagctactagggaggctgaggcaggaggatcacttgaacccgggagacggaggttgcagtgagctgagattgcgccactgcactctagcctggcgacagagcgagtctccgtctcaaaataaaagaagattactaatgttttcccatgtcaattttcctagctcagtcaacataagaccaccattgacagcctccactgtgacaaaatcaggtttattacctcagtttaatgaaggacactgcacagcagagaaaatttaggagttctcaccaaactaaggaaaagagatagttattgcagcgtctagggagtgatggagcttaggggaaatgtaaataaaacagtattttcagcaggcacaaagcaggactatttaaagggattaacatcagttctgaactgcagtgtaaactgagagtcctttttccttggaaactacagagttgagataattacagagagctgtgtccagttaccccttatctgaatctctgcacctgagttgtcagttgctgtagcttctctgagtcaaagtaacttagcaactctaggcaagagtgggaggtttcattcttatttacataatttcaaacatcaaagtttctgacagcaaacaagatttctcagtgagtagaaaaacagtattcattcataaaagatkatccttatgctgcccttggttttataatagcttatctttgggagaaagggtgactcctgttaactttgcatcgggcgctacctgtctcattccagcccaagaatggcagggctgatttttacagtcccaattaatttttaatttctcaccataaatacaagtgtacacaattttcaatgtgtatgatttacagataatgcataatttgtttaattactgcctactgttgaaatctccccaccccatggataaagtcttataagtagaattgttgggtcaaagttatatattttgtaactttttaatttgagatagtttaaggcttacataaaagttacaaagatagta

SEQ ID NO: 719496 - DNA, 631 bp, Homo sapiens
acattcatagaacacaagggaaaatgtattcttaaattccaaaaacttgtaaatcatacagaccacatttacttaataccaaggaattagaactacaaattagcagtaagaataacacaaactgaagacacataaataactagtatcaagtgtaggcatacagataagcatttgatacaggtgtggcaaaaatagaggagcagagaaaaggcatgcaagatatccttgagctttctgagtgaaaagtaagcaagcaatactttaaggggcaaacagggcacctcccaagcaaaaggaagagcgtgcagacagatgccacagacacagaataaagcagaaaacttgctccccaatggctacagcacaggtgactaagaagaaaatagtgtcagatgaaactgatgaaacggcagcaacacggaagactactaacgcgtgttttaaaacctttggctctcagtaatgagtaccaacyaatgaaaggtctgaaatccaacagcaggcacagtgatcaaacatgctgtattatgaaaaatcaagcaggccacaacatagaggaaggtctgaagctggaggaagatgatgatgaggaagacgagtaagtagaccaacaagtattgcaagcaagaaa

SEQ ID NO: 719497 - DNA, 1957 bp, Homo sapiens
cagctgctgacactcagggttggtgcagacaatgggcaccccggcgtgcaggctttgtgcctgtcgaacctggcacacctgcaatttatggtcactctttttgccagggctgcgctaatgataataaacaacacgtgtgtcattttgctgagcctccttgagagagcgagccaggcaccttctttgcaaagtgtcagataaactcacagccaccgccatctgtcttacttggcagggaccaagggtgtcattgccaggactgggctgtccctgccccctgtgaaaacaaaacagcacccagcaaaacgagcccgggaagacagtcagtatggggagtccttgccagctgcaacaagcgggatctctgtcccctgtttttatttgtcacagtgacatccgtcagcgcaggcacctcagttctgtgccagaggcaaatgcaggaggagtgccggggggtggggggtggtggcacaggctccccgcacatccctgccaccctcctcctccttggcaggccccgtcatctcgaaggtgaggaaggagaggctgggatccttccttcctccctctcttccctttcctcccttccgtccttcccttcctctctctctctcagtcctgcccctgccctcttttttaaacctgtgtggacagtagtggctccacctggccttgcggtgagtgcgtggtggctggagctgcagcagggtcgagttccctgctcccgggcagcctgcggggggatcctgctcccctggctcagcacaggaggcgtttccatcccataggtcagtcctcacggtggatgccccctttagcgtgcccctccccccctctctcccccaacactcctccaggcttcccctcctccctcccttcccttccctccagcctcaccccctcctccatcctcatcagccttgctagtttctgtctttgcactggcagttccatctgcctggaacctcctcctccagcctcccatgcagctgctccaaggtctcagctccttgtcaccacttctgggagaccttccatgtcccctgccccggcacctccatgatgtttgtcaccatcagatggcctgtgtgctcaccacatgtgtttcatgtctacccccccaacccccaacagcttcayagggccagggacctgcccacttcctcctcaagtgtgtccctggctcacagctaggtgcatggcaggttctcaggaagtccttgttgaatgaaggcattcctttgctcctttgttcatttattctgtcaggtgtactgagtgcctacgcctgagaggccaggtcggaaggacttaaattcagaggagcaatcttatcagatggatataggctagtgcagtgagcttcccaagccggctgccccagaggaagacaccaagcagtggtggatgttaaaatagcctctgggtctcctcggagtacaagatccccaaaggggagccccgtgatgtggccccagcaatgacattatcaccttggctgcattaacagaagtatagggtctgtggcaagggaggtggtagtctcgtacttggcaatgacttggccatccttggaacaccgttcaggtgaggtcacactacttcacaagcagcagcaacaaacttgagtgtgtccagagaatggtgacccggcaaattcacgtcaaacagagtggggaagcacaggccatttggaccctcacagcctgggcttgagtttctcctctgccatttgctagctgtgtgaccgtgggtaagtcatgtaatgtctctgagtctccagttcctcctctgtaaagtgggaatgtgagcctgtcggtgctgcagggtggttgtgggagcattaaacagatgacctcagtcaaggcggttcacacagcaacggcgcccgggatgcaagagctagagctatggttgccagggtgccggctcttctcgctcagggctgggctgttca

SEQ ID NO: 719498 - DNA, 655 bp, Homo sapiens
aatgtaaagcagtaaactttacagttgcaagtaagtacaattaatataatgcaagcaaaagatataagtattgacagaacataggacttctagatgtgcatagagttaattggaaagtcttcagaacagatgtgacatattttgaaagcatatcaagtgagataatgagtaagtggagggcaggagaagtgtgttactaggataaaaaagtatgtataggtggcagtcagttgaagaccacaggcagatttgattgactgaagtgacgacttcatgctgaggaatactaggaaatgaggcttttgagactgtgaagagtagaatcgtgtcaattagagaagtgccttgaaagccatgctaaggagtttagatttgatgcttagtgatgggcaaccacagcatgcttttgagctggggagcccaagagtaaatgtgcctgagaaaaatattctagttgtgtttaataagatgcaatgagagtgaagagcttaaatatttcatggagagattggtaaaattgcaccagaaaatgggttagctttgataggaawaggcatggcttttaaaaattagctatcatatttaggttagttggattttcagtgaatgtagttaaaagatagcctcatggtctgagggcaaaaatatatagaat

SEQ ID NO: 719499 - DNA, 650 bp, Homo sapiens
gtatgtgtccaaacaaacatgatgtagttttttctttaacaattattatggaatttttaaaaacatatataaaggaagatagaatagtacatgaactagacaatttcaaattttgcttggttgatttgtgtcttaagttacttttctcctataggttcccctcctttcctccatccctttctcctactaaagatgtttcctccaactgcataatattccattgtagataaacmacaatttattcaatcaagccccattcatggacatttgcagtgtttctagtctttagatactataaagaatactataataacatatttgtggatacgtattttcaattttttttcccagtgtattcctcggttagagctctacaaatgagtctgctgtgttaaacaataaatagacatgtaattctgccagaaaatgacaaattaccatttatatgtctcaaaaatacattattacattttcaaaaacgatcagttgagtctttatattcactggaaaaaaatgctattatcaatagtaatgaaatgggcttataaagaaagtgaaacaaatgaattttgttttatggtaaaccaccattccataaataatatagaactaattacactttaagacatttaaatagctttttaggtttg

SEQ ID NO: 719500 - DNA, 650 bp, Homo sapiens
gtatgtgtccaaacaaacatgatgtagttttttctttaacaattattatggaatttttaaaaacatatataaaggaagatagaatagtacatgaactagacaatttcaaattttgcttggttgatttgtgtcttaagttacttttctcctataggttcccctcctttcctccatccctttctcctactaaagatgtttcctccaactgcataatattccattgtagataaacaacaatttattcaatcaagccccattcatggacatttgcagtgtttctagtctttagatactataaagaatactataataacatatttgtggatacgtattttcaawtttttttcccagtgtattcctcggttagagctctacaaatgagtctgctgtgttaaacaataaatagacatgtaattctgccagaaaatgacaaattaccatttatatgtctcaaaaatacattattacattttcaaaaacgatcagttgagtctttatattcactggaaaaaaatgctattatcaatagtaatgaaatgggcttataaagaaagtgaaacaaatgaattttgttttatggtaaaccaccattccataaataatatagaactaattacactttaagacatttaaatagctttttaggtttg

SEQ ID NO: 719501 - DNA, 606 bp, Homo sapiens
tcaggctagatttctagaagcatgattactgggttgaaaggtaaattcacgtgtaatatattccagtatatggttcttgttgctagatttccattcacagagaataatccttttgcattcccgtcagtaagatattatagtgcctgtttcctggtaggctgattaagaagattatgtgttcaaaaatttagatatttgtctgacaagtgaaaaatgttaatttatgtattttttcatctgaacagaacatccttttctatgcttaatagycattgacatttacttatccattaatggtcttttcattcatttttgcctgtttttctatttgtgtagttctttttcttctaaattttaagagattctttagcttttagggatattaggtcttaacttttcatggcttcatgtcaggtatctaccaaaattctaacgcctgtgaacaactctcaagttgtactttattaaattaaaggtgaatgatacaaaatacccttttcctttaatatacacaattttttaattgctttcagtttctatgacttaccatccagctctacgataatgatgtgtaaacatggtattgtattaggtagaaagatgcaa

SEQ ID NO: 719502 - DNA, 1401 bp, Homo sapiens
tttcttctaagtgaactcattaatacatagcagattccatttaattacatagctttaaaggtacttatacccatgagattttatttttaaaaaatcaacgaataatatagtaaatgaatagttaagtgttgttaaaaaagatatatgcatatgtattcatatacacrtatacatatgtaaaaattcaaaggtgacgaaagaggcaaagatgttctcttattttctagaataaaatgggagaaccagtagccagattaattcatacctttttctttaccacttctcttgaaagagattttgataaaaagagaacaagaaccttttgaaattatagggttaaaggcttaattgtttctgctctaaattatggtatgggaagattaacactacaaaatcatctacctaagctctattttaggttaattaaccccaccagcaagatactagtggtaaacgtgatacttgagagggtttcagctaacaatgtcttacttttttcttaaagaaaattataatgatgaaaacaagtctttattgttccaggttttaaaaatcaaagaagctttccagcataatacaactatttaaatttaacttttcagcccaatttttataaaattccatttactatatacagaagtcctcctgtgtggatataataatcaagacaatatcactgccctcatgaaatgcacatgtcatataaagcatatgcatgtatatgtgtgtatatacatgtaaacaaacagaaaataatactgtaatcaaggtatgtcattcctgtgatgtaaaatttcagtgttatttagccctaagaaaactgctacgtattgctgcatgatcctcatgattatcatatataaaatcagatttatgtaagtatttccctatttgacatttacgtcagaaaaaccctttttataccaaagctacatacatactctctcatacaaacacatgaatacacagatacatacaccaaacacatgtggactcacataaatacacacataaagcaaaaagctcttttgttgaaagcatatgtaattctgctattcagtactaatctattttatttgaataccaagactacaatgatacgtttcacaaatagcctctgtcagaagcaataactagagaaaaattatcaagcattaaatcaaaagagaaaatgattctttttaataaaaacacttaaaactataaactcataaaatttcaacacagctaataattttactgaaaattatgttattgctaacaaaaaagttttaatgttaaatgtatcttgacaagaattaggtaaagacttaattcgacattattgaaattgaatttttattgttttcatttaaaatatccacattacatattgccaagaataaaatatctacagtctaa

SEQ ID NO: 719503 - DNA, 645 bp, Homo sapiens
tgagctcgtgatccgcccatctcagcctcccaaagtactgggattacaggcatgagccaccacgcccagcctctacatatttattaaaacaaaaaacaaaaaacaaaaaaacacctgcacactaatgctggcattctgaatgttctgcatttctcaccattctgaaacacgaccaagccttgtgcaggtctttccaatactscaaaaagtctgataactgggactacatctgtagaagaccaagcctctccttagagtttgacattataccacatttgtacattcaacccatacttattaagggcttgttctatgactaatactatactaggcactagtggtatgattaaaaattagacataattctttctttcataaagctttaagtctagttggaagactaaacaatggtatctatcttaacaatttttgtattataagaggaagcccaactcaacatggataggaaaaagaaatgtattggctgtaactaaagagactgtctgtgggtccaattcagacagagattgatcaaggttctcaaatgataatcacaatgaaaggacacacacaaacacacatgcacactcacaaacacacatttattttcctttctctttcttcactacatgatggctacttcag

SEQ ID NO: 719504 - DNA, 642 bp, Homo sapiens
actgcttctatcaaaaatagcacatatctctgttcataaggccctgatcctgacacttgaagtcacaggtgacaagggaaaatgcagcagttgaaactttcaaggcctgaatttgtgtaatagagggaagagaaataaaaagagaaaagaaaacaatttagaggaatctaggaggcaaggaactgagggaattaaagaaggctcttgcggccgggtgctgtggctcatgcctgtaattccagaactttggatctgctccagttttgtgcacattatattgaagttttctgccaaagctcatgttcttttccttttaaagtttgtcatgtgattgtttccctataaaaataaatattggagacatgatagtttgtaggaaagaacattagactaggaataaatacctaagtttaaatyattttacactatattattttatgattgaaagcaagagaacaacttggtcagcatttagaaagatcactctggacaccatttggagaagagattggagaggaagaaacttcaggcattgagagagctatggaaataattcaattcagcaaatgtaagatgagattttcctttatctttggtaatgctgaattctgtgcctagaatttactattccatatcagtcca

SEQ ID NO: 719505 - DNA, 642 bp, Homo sapiens
actgcttctatcaaaaatagcacatatctctgttcataaggccctgatcctgacacttgaagtcacaggtgacaagggaaaatgcagcagttgaaactttcaaggcctgaatttgtgtaatagagggaagagaaataaaaagagaaaagaaaacaatttagaggaatctaggaggcaaggaactgagggaattaaagaaggctcttgcggccgggtgctgtggctcatgcctgtaattccagaactttggatctgctccagttttgtgcacattatattgaagttttctgccaaagctcatgttcttttccttttaaagtttgtcatgtgattgtttccctataaaaataaatattggagacatgatagtttgtaggaaagaacattagactaggaataaatacctaagtttaaattattttacactatattattttatgattgaaagcaagagaacaacttggtcagcatttagaaagatcactctggacaccatttggagaagagattggagaggaagaaacttcaggcattgagagagctatggaaataattcaattcagcaaatgtaagaygagattttcctttatctttggtaatgctgaattctgtgcctagaatttactattccatatcagtcca

SEQ ID NO: 719506 - DNA, 1564 bp, Homo sapiens
tttttgcagaaatatattctatagtttcaaaggcatatcttctaatcagtaacagtagggtgatccactctgcaaaatgtgttaaacttatccacaatcctcaatcttacaacgtttctgtgacatttcctgcagctgagccaacacttggaggccacagatgatcaattatcaaagtccctgcatcattttctctgcatggagtctgaggccaggccctccaagctaattggattttcccacctttcctcagtgtctgtgctaggaaggatgacagtgaaaaccagagagtggaggaaaaatcagcccctagccttttttctcccagtttgaatctagtcccatcctttgaaactgatgtataatcttgatcccctcagcttcatcatggaaatctctaaataccttggccagagttcccattggattcctccactcctggatttctcagataggagagattatcttcactcttgtttgtggacacaaacatggcctgattttcctgaggaaaacatttaaatggagagagaattgataagaggcaaagaaataaggtgatgaaaaattacaacaggaggcttcatcctgaggtcattggaggtcatcttcctgggagtggatcagtcaggctagttatgtgaacaggctctagtagacattaggatagcaaagagcagaagcagcagcgaccacttgtgcaaatgcatcttaatcccacttcttctccgatatcctagcctgtctgcttcatacttctctcatgtccaccacctgacacaagccaagctgtgtctctaagtgatgttaaggatctttttgggtttatggccagatacccaaactctaatttttggagtgaaggggcataaagagcaggttgtgtagtttttcctatctgtatgttatatagatctagggattggttcttggggccagaaatggattataagtcctacctaaggcatccaagaaaaaatctttacaaagggtcagttggagacaaagtccttagattatgtcatgaaaattagcaataggtatctagcccaaagaagagcatggcttggattacctattgctgcgtaacaacccataccaagtgtaatggtttaaagcaacaccagccacttattttccttgtgaatcagcaatttgttaagagtcawgtattatgggagctagagaataagctgcctctataattgtgtaagccatctttcagaaataacatctatccatcaatctatcttacctatatttaaacgtaccattggttctgtttctctgaagaacactgattaatacagcatttgattgagtcactgtttaattccaggccataaatcatactttggatgtcactgaatattctgcctatgggtcagatgcccacacatcttgacatgactggcgagtaagtgctggtgttacgggtttaactgtatccccccaaaattcatatgttgaagtcctatcctccccagtacttgaaaaagtgacctttgatgatcaagtttttatagaggtaatcaagttaaaataaagtcattagggtaggtcc

SEQ ID NO: 719507 - DNA, 643 bp, Homo sapiens
aaaaaaaaaaaagactatctagaattaccagtagaaagcataagagatgtaggtagacaagtagacaaagccataggtcagacatagttagcagggagaaaggaacacaaacaattaaagaaactaagctggtagagagatgaaagtaaaaatataagcaatgacagatgtcaaagcttcatgcaagagagaagtctactttcttggtccctgttattgttttttggcattatatgctayttgagatgtagtaaaaaaaaaaaaaaaaaaaaaggatgataacagcaggtaattctgagtcagcatttttgacagtcttctaatcagaatccatattttgaatgtagactaaaccacctcaaaaagggtatttatctagtgatgtgaaaaaaaaacaaataaatgaataggaagcaaataatttaagtaaaaagattaatatctaatttgtctccaaactttctggcagccagagcaaaaagaaaaaccatggtgagttactaaattttattgtcacagtaagaaaagtctcaatggcccagaggagttgagacaggataggaaaagtctcatttcaaacttcaaaatgaatttccacatgggtcattctactagggttactcttcagtacagcagccactct

SEQ ID NO: 719508 - DNA, 643 bp, Homo sapiens
aaaaaaaaaaaagactatctagaattaccagtagaaagcataagagatgtaggtagacaagtagacaaagccataggtcagacatagttagcagggagaaaggaacacaaacaattaaagaaactaagctggtagagagatgaaagtaaaaatataagcaatgacagatgtcaaagcttcatgcaagagagaagtctactttcttggtccctgttattgttttttggcattatatgctacttgagatgtagtaaaaaaaaaaaaaaaaaaaaaggatgataacagcaggtaattctgagtcagcatttttgacagtcttctaatcagaatccatattttgaatgtagactaaaccacctcaaaaagggtatttatctagtgatgtgaaaaaaaaacaaataaatgaataggaagcaaataatttaagtaaaaagattaatatctaatttgtctccaamctttctggcagccagagcaaaaagaaaaaccatggtgagttactaaattttattgtcacagtaagaaaagtctcaatggcccagaggagttgagacaggataggaaaagtctcatttcaaacttcaaaatgaatttccacatgggtcattctactagggttactcttcagtacagcagccactct

SEQ ID NO: 719509 - DNA, 603 bp, Homo sapiens
aacaaatcctacataaaaggctccccagtaatatctcaaaatggaatttttaacatgtattctttgtaattcttaygttagtcacattgggttacttgttaaagctgcaaacatgagatatactgaatcaggttgtatatgagttgtgtctgaaacctggggtttaacaagctgctcatatgattttttacaaacaaaaaagattgggaatttctgacctaatatagcaactgctcaaacgtgtcctcaggcacctacatcctctgctggtgatggtatacactggcccagcctttcttagaagtaactttactacatatgtcaatatccttaaaatgtttatcatctttgttcttaacaattttacttctggaaatctctcctaaggaaatattatgaaatatggaaaaaataaatctctaagtacagagaagagtcattagtttatattatgagaaaaaatatcctaagacaataaaatgagaagagttatgtaaattttgtttatgtacttcaatgcaatgttatttagattgtaaaatagatgtttgtgaaaagtgtattgttatttgacaaaatgctgaaattatcatgttaaatcag

SEQ ID NO: 719510 - DNA, 603 bp, Homo sapiens
aacaaatcctacataaaaggctccccagtaatatctcaaaatggaatttttaacatgtattctttgtaattcttacgttagtcacattgggttacttgttaaagctgcaaacatgagatatactgaatcaggttgtatatgagttgtgtctgaaacctggggtttaacaagctgctcatatgattttttacaaacaaaaaagwttgggaatttctgacctaatatagcaactgctcaaacgtgtcctcaggcacctacatcctctgctggtgatggtatacactggcccagcctttcttagaagtaactttactacatatgtcaatatccttaaaatgtttatcatctttgttcttaacaattttacttctggaaatctctcctaaggaaatattatgaaatatggaaaaaataaatctctaagtacagagaagagtcattagtttatattatgagaaaaaatatcctaagacaataaaatgagaagagttatgtaaattttgtttatgtacttcaatgcaatgttatttagattgtaaaatagatgtttgtgaaaagtgtattgttatttgacaaaatgctgaaattatcatgttaaatcag

SEQ ID NO: 719511 - DNA, 603 bp, Homo sapiens
aacaaatcctacataaaaggctccccagtaatatctcaaaatggaatttttaacatgtattctttgtaattcttacgttagtcacattgggttacttgttaaagctgcaaacatgagatatactgaatcaggttgtatatgagttgtgtctgaaacctggggtttaacaagctgctcatatgattttttacaaacaaaaaagattgggaatttctgacctaatatagcaactgctcaaacgtgtcctcaggcacctacatcctctgctggtgatggtatacactggcccagcctttcttagaagtaactttactacatatgtcaatatccttaaaatgtttatcatctttgttcttaacaattttacttctggaaatctctcctaaggaaatattatgaaatatggaaaaaataaatctctaagtacagagaakagtcattagtttatattatgagaaaaaatatcctaagacaataaaatgagaagagttatgtaaattttgtttatgtacttcaatgcaatgttatttagattgtaaaatagatgtttgtgaaaagtgtattgttatttgacaaaatgctgaaattatcatgttaaatcag

SEQ ID NO: 719512 - DNA, 1415 bp, Homo sapiens
gactagtcaattgtatgaaagctttaaatttctcagtgtcacagtctgagatctccagaatctggcacccttatgagacaaaacaaaggaagtttcattgtgtacttcaaagtgacacttttaaagattcggtttgtaaataaccaatccctttggattgttttcagccaagaatataagtctgtccattctccttcacttctttgtgttatagggcaagccattcttccttactttttatacttcattctgtttgcacaaatgaataggaaagcctgtataatttggagtttaatgaatcccactttctcacagatgcatgccactatttcaaatatcacctttatcaagaataaaaataatattttgattgttcatctcctttactttccttgtttcattttaatataaaggcacaaaacttgaagagaaaagagagatgttgtttattgaggtctttggaatcctcaacactggctccagccataaaagcaaaaaaggaggagctgtcaattcccctctgtctataaaaggtaattgcatctttaaggcccccaggttgagaaaggccagtacaccaggcttctgcccatggattatctacccacaagggattaaaatgggagcaaaaccaggtgaactgktatcttaaaaaaagagtagtttttctatttatttaactcactggacttttaaaattatatataccagaaactaaatctcagtcctgacaaatgtgttccatgaattaaataattttttgttgagaattacaatgtagtaaaggtgtaaagaattcccagaatttcttgtagaaagccagggaagcagttgtgtagattattttatgacaggtacgtgaaaaagtatttgattatatttatgataatgttgatatttaaaagcatatagagcttttaagagaacatgaaaagtttttaaaaagcttaaaaaacgcaattttaagaaagatgatccagcaaatagggtacaatgccacttctctgagggagacaatgaaaaagtattttagcaaatgaaaggttccatttctgaaataattagcacttctcaatgtcaagtttgctcatcttatgaacagttctattattaacatacagaaagctaatatgaaaagcacattcttatgttaattatctaattaactaatccaggcacaattaagccactaaattcacacagtattaatttttcttatgttggtctcatggatactaaatttcttgacaagttaacatttctgctggtcttcctgacactttgatgtttgataagtccactccagtggacttcttagaatgcatgaactcaagaaaagttagaggtctctcatttagtttcacacgtctgttttctagagaattttgcccaacttcacctgaagaactcaaaaa

SEQ ID NO: 719513 - DNA, 1415 bp, Homo sapiens
gactagtcaattgtatgaaagctttaaatttctcagtgtcacagtctgagatctccagaatctggcacccttatgagacaaaacaaaggaagtttcattgtgtacttcaaagtgacacttttaaagattcggtttgtaaataaccaatccctttggattgttttcagccaagaatataagtctgtccattctccttcacttctttgtgttatagggcaagccattcttccttactttttatacttcattctgtttgcacaaatgaataggaaagcctgtataatttggagtttaatgaatcccactttctcacagatgcatgccactatttcaaatatcacctttatcaagaataaaaataatattttgattgttcatctcctttactttccttgtttcattttaatataaaggcacaaaacttgaagagaaaagagagatgttgtttattgaggtctttggaatcctcaacactggctccagccataaaagcaaaaaaggaggagctgtcaattcccctctgtctataaaaggtaattgcatctttaaggcccccaggttgagaaaggccagtacaccaggcttctgcccatggattatctacccacaagggattaaaatgggagcaaaaccaggtgaactggtatcttaaaaaaagagtagtttttctatttatttaactcactggacttttaaaattatatataccagaaactaaatctcagtcctgacaaakgtgttccatgaattaaataattttttgttgagaattacaatgtagtaaaggtgtaaagaattcccagaatttcttgtagaaagccagggaagcagttgtgtagattattttatgacaggtacgtgaaaaagtatttgattatatttatgataatgttgatatttaaaagcatatagagcttttaagagaacatgaaaagtttttaaaaagcttaaaaaacgcaattttaagaaagatgatccagcaaatagggtacaatgccacttctctgagggagacaatgaaaaagtattttagcaaatgaaaggttccatttctgaaataattagcacttctcaatgtcaagtttgctcatcttatgaacagttctattattaacatacagaaagctaatatgaaaagcacattcttatgttaattatctaattaactaatccaggcacaattaagccactaaattcacacagtattaatttttcttatgttggtctcatggatactaaatttcttgacaagttaacatttctgctggtcttcctgacactttgatgtttgataagtccactccagtggacttcttagaatgcatgaactcaagaaaagttagaggtctctcatttagtttcacacgtctgttttctagagaattttgcccaacttcacctgaagaactcaaaaa

SEQ ID NO: 719514 - DNA, 639 bp, Homo sapiens
agcaggacatgcacaaagaatctaaaggcaccatttcaactttttgatgctgagacgagctgtgtcatcccagagcccagataacaacagatgatgcaacatgtagacgagggaccttctttatcaggagggaggacataccactcacctccttggtgctttctcctttaatattcagattaagggctcaaacatcycaaacataagtattagttacactttactgaagaccaggagctgtctgtttacccacttcctttcattgacttcactcttctctctcctgttctctctcatctggtttcagggctttctaaatcaggccaatagagcactattcaacctgataaccaagacagatcaaacccaaacatacagtgcttatggaaagaaatacacaaagctgttatcaggatgtgatgagtagagtggaataaaagaaggctttggttttcttaacttttctttttttctctttttaacttttaagttcagggatacatgtgcaggtttgttacataggtgaacttggttcacggggtttgttgtacagattattttatcacccaggtattaagcctagtacccattagttatttttcctgatcctctccctcttcccagcctccacccttcaat

SEQ ID NO: 719515 - DNA, 2352 bp, Homo sapiens
tgtatttatttaacaagttactagttcattcaatgaacgtttattgattgctttctatatttcaggtacccaactagacgcctatctggacacaatagtcaacaggatggatacagggcgttctctcctggagatgccagtcagttcatggagttgacttgacttgccacaggagcatggaggatggatcacctgcaccctcctccctcccatcctctttgcctctttatgagatgcctctttatgggatagctcacaaggtgaacagcaactatctaataatccaactggtgtcccctctccaataagggttataacaatctcatgtggatatgagatccttacagggtaagaaatttcctccagtctcattgtcagtagccatttttactcctgaagctatgtacttggagtgcctggaccaagatggagtaaacaagcaaataggtccctgagtcctgtgggcactctggtactcctagcagagtgaaggctgttctggagctattagcagcatcacaagccactgctcacaacctggaaggagaattcccatacccaaccactgtgtgtcccagcgtgtgatatccatccacaaggagttcattcaaactggtctgttgaacaataaaatatcccatcaaacacattgtcactgtatagcaacatccaccacaaactgaaatgctctctggcaacgacacgtggttccatcctaacttttgaaatgtaagaatgggcaccacagaagagggtggtaccaagagcccagctgagggtcctgcaccccatcaagtcacttcccaatcagtcacctgcttactttgtgacttttctgggcctctgatcccagtctcagtgagtgctgtcgactagaatgcaagctccacaaaggcacagatttttgtctgttatgtttgctgctgtgttcccagtgtctagagcagtatatggcatgcagaaaggccttgaaaaatatttgacgagtaggcgaataaatgggagcccctaaaaagcagtacccttgagccagtacttgcaagcagtacttggtgagcagtcataaagaatgtgttaagtgaatgaatacatttccaaagttaaaatgcccaaacaaaccaatccctttgagagtggttgagtctcttctgtgttcctctgagtggatcagggcttgtagcatcatcctaagcaacattccctaagttttcctgcaaggagccacagtggaggaagactccagattacatgactaatctgggagggatattaagatgttacctgtgggtcaccaggacacattctcatcaccactccccagccaaacacttacatactaatgctcatctgtggggactgaagccatctggcaaatatttatcaaggctctctgtgcctggcattgtgcggctgctctctcaggaaactggtggtaggtgagaaagtgtgactctccacatagctcaccatctggtggaggactgcgaggttgccaaggatagaagccaggacattggtcaggggcagtgccatctgccgaccctctgagctcaacggagaacacatcattgtttgcaaatggccagggcctttctgaggccacttggaagttccttcccaatgccagagcttaagaaacaataaaaacaaaattttctagaattaacaatgagaagaaagcaatgaaacaaactatgaaattgaattaagaacagtgaaaattttatttgcttaagttttttttaacttttctttattaacttcgatgaaagttttctttcaagtccttctagtctttaaagttctcactcaatcttttctctgtgttggagcaaattttgcctgctaatttccaataagcacagcccttaaaaatgaactggcttcagcatatggatcttaacactccacatttttacaggcagcagtgtaatattgttttaatatttaattttgagatttacataatatctttcctccaaagagctcaatatattgcaatatcataaaattccttttcatattcaaagattattctttatgcatgcaaatactatatttaaccaaggaataatgcaaattaggtgatgtattcagaggaattgatgggctaggtaattcttttgtaagaaaattagtgtatctgagtgattttaactgtctaagaacttcaaaagtgccttaaaaatggacaaactataggggcttgtaactattaacagaaatagtgcagcatttttaaaagaaaagtaartaatgggttgtgtctgtgttgtgggcatgatggatagtattccacatggaagtggcacgcaggccatacatgaactgcatgtaatataaatgtcagat

SEQ ID NO: 719516 - DNA, 529 bp, Homo sapiens
agttctgattaatggggatgcattttgttccctgcaatagccaagtccacaggtattaaaagctctcacaatccaaatattggaattaaatgcaaagccctgagctcagaatttactgctctaaggaagagattacaaaggaatttgaaataaatccagtggtaaatttaaggaagttcctgagctattgtttcctcctgcaatggatgcctgygaccctggcttgataaactgcttggataagaactggccccaaagtaacctttgtactagcagtgatgtaaggaatgactccctgtaactaagggagtatcacatatgaatttgggggccgatatacaagataggattatcctgttaagactgtcaatagtgaggtcatgcctgatgtcagtcaccctcagacaggaaggctgaacacagaaaccattcctctcaaagcatcactctgaccacattagtatggctgctcaaattgtgatagctatttgatgcctatgaaaataagttaaaagaccttagctggacg

SEQ ID NO: 719517 - DNA, 650 bp, Homo sapiens
gtcagagaaagaggatttcagaagttaattaggaaataacaagcaaattgagtaaattgcctaatttaaacccattagataaacatttattgcaatacaaaatcttgatgactgtaattaacacatttataaactctctaagaaactttaaaacctttcttcaattgactgaaaaccagcagctttttcaagcagagcttatggctaggctgacatgttccctgggctgtgagattggtcagcaaattccctaagcctaatattcttaaacctggtcttacctctcagatctgtagtgagaacaatgggatatgacagtggaaactttatttttcattcattacatctattgaggtataacttgcatttagaaatgcacacagatcttaagaggatatattggcagatttttatccatgttgatacccctatgttacctccaccagatccagacacagaacattcccagcaccctgcaaggttccactaatgytccccatcagccatagccgctggcactattaagacctcaatcactattttgcctgttcttgaatttcacataagtgaaatcatgtagtctggactctttttttgtctgacttcttttgcacatcattgtatctgttaagatttacccatgtttgttt

SEQ ID NO: 719518 - DNA, 1079 bp, Homo sapiens
gaattttggaggttcttgaaattaagagactgaattaaactcaacttcagcaaatcaatgataaccataagtaccattcccctccctctctccctgacactgcatgtgatgaagtgatgaacagctggagttttgctattaccctgggaacagtttactttgaccttgtcacagtctacctgcttgctattcctagtacagtacctcttctcatcagagaacttgaagcaactattattttatgctatttaaaattaaagccacagtaaggtttaggactataccaaagcaatacactagggagagggggatctaagatatcatttttctcagagacaattcatcacatttaaaaaaagatgttttatactttacctcattgtgaatgaaaaagagccacacagtagcccaacgagggcagatttaaaatcacacacattcttttgggttttagttcagtttttttttcccctggaaataagaaccatattatcctatttgaatcttcttgttatttttttattactcttgtttttggttcacttgttttattgatgttacaaactattccttctaattgtacagttttatttccttttgttgtaagtgaatttgtgattaatgtcaaataaatagtggtctgaaggctttaaaatgtttggcctttgtattcatttttcctttcctttttttttttttgaarccaagtctcactctgttgcccaggctggagtgcagtggtgcagtcttggctcactgctacctcctccacctcccgggttcaagcgattctcctgcctcagcctcccaagtagctggaattacaggtgtgcaccaccatgcctggcaaatttttgtatttttagtagagacggggtttcaccatgttggccaggctggtctcgaactcctgacctcagttgatccaaccgccttggcctctcgaagtgctgggattacaggcatgaaccacatcacctggtctgtattcattttctgttgctgctataaagttaccacagacttagtgtcttagaacaatacaaatttattatggtatgtttctggaggccatacat

SEQ ID NO: 719519 - DNA, 892 bp, Homo sapiens
tgatctattgactttcttatttaagtatcatgaccatatacctgatctctttggattgcaccatgagcttattagtgcctattttatgaatgtcatgattctagcatcagtaacaaatgactctgctttaagaaacctatttttcatctctaaygctctcactataaaaagtgcaatgaatctctaaaaaataaaccccaaggtttttgttaaacttagatttgtaaaataaaattttaaaagcaaaataaataggaaagggatttttaccattccaacataaccctttagatttctgtatatctgtatagctctccttttgtctttatatataaaatgcaaattacaatgcttacagattacttggaaatttatagatgaatttcatttacatatgttatgtaatatattaaccacatttcttggaagtaaatgtaactaggtttacttggcttcagtttacacataaaggaacagaggctctgagatgcacagtgacgtgttcctgccccacagctcagacgggacagttggaggcctgttcttttcacaaagactgacagtctggtttttcctgactctttctgctgaccaaacactaataggaatatttccactaaaacactggcagtcagagtccgttaatgaaggaagagccttctacaggttcccagaaatcttctggacacttgaccttcttcctaaacacttcattctcataatagtcctttggagttcatgttactatcctccttttcatagctaaaaaaacccataaaattttgagagactatgagacttatccaggagttcatggttaataccataaaatttgaattcaagcctctgttcttctagatcacaattctgtgctttaaaaacatttatttca

SEQ ID NO: 719520 - DNA, 583 bp, Homo sapiens
taatctttgtattttttgtagaaacgggttttgtcatgttgcccaggctggtctcaaactcctgagctcaagagatccacccacctcagtctcccaaagtgctgggattacaggcatgagccaccgcacctgtccaaatgtttctgtttctccataacattaccaatatgttgcttcataaaacttgtttattattamcaatatagttgatgaaaaatagtatcttgtacttaaggttgagtgactttccacatgtttaagtttttttatctaacttgatgattgaaattttggcatttttcgtcttccaccctgcatggaattctgggtagcataaccactaacctggccctagctgtctgttactctgtagtatttgatgttttatcttcctgctaaacacagtattgactatttttttttttttttgagacagagtctcgctctgttgcccaggctggagtgcagtggcacaatggctcactgcaacctccacctcccaggttcaagcgattcttttgcctcagcctcccgagtagttgggactacaggcgtgcaccaccatgcccagctaacttttgta

SEQ ID NO: 719521 - DNA, 1702 bp, Homo sapiens
ttgatttttgagaagcagaataayaggattgcctttcattgccctatagtgcaaagaaagtatatgctttataaccaatgttgtacttttgcctagaaaaacaagatatggctttaaatagctacaatcatctttggatgtatatgtcactgctgcttcaagttattggatgcatttgaacctctgagtttgtctttcattttaaatattgtctgttcttttaaataaacaaccacagatgtcaggaaaaagtcttaccttgtcaactggttgctccactttttaaaaatgattgaatgataacatcatattaactgcgttttactatacttacagagtcacctaaggtcctgcgagtacaagggtcgacccccaaaggcaggggcagagccagcatctgagagggaggtctcttgaccaatgggcagaatcttcactccaggcacatagccccaaccacctctgccagcaaccttgagaggaaggacaagaagaaagatgggatagaatttaaatagagaagaatgccattttatcactctgcctctgggtgaaataaagatcagtcttgatgttctaactctaattcacagtggtctcctttcagccctacccattctgcagcaaattccagctggtcagagagtcagtgctgtggctctgccatggaggctcataacccaacactggaacattccctagccaaggcagaagtccttaggcgggacttccttaccaccacgggtgctaaaagaagagttagtaggtcatgcttctaccagtaatctaaggactctctccttctcttcttcctctttctccagatttccaagccttagctaagagtaatttggcttgtttagtattgttttcttatggtccagttaattaccaaaaatatttttaaaatcatctctgttaatagaatgtctaccaacttctcactatcagaaaatactcaacctccaaacaatttgaaattatctttctgatccaggcaaagaagcaaattgaaaatcaataaagtaaaaagtgacggagattttaaattttctgtaataaaaacacttattgggttgggcatggtggctcacgcctgtaatcccagcactttgggaggccgaggtgggtggatgacctggcgtcaggagttcgagaccagcctggccacatgtcgaaactccatgtctaataaaaatacaaaattagccgggcgtggtggcacgcacctgtaatcccagctactccagaggctgaggcaggagaatcacttgagcctgagaggtggaggttgcagtgagctgagattgcaccactgcattccaggctgggtgacaaaatgaaattcagtctcaaaagaaaaaaaacatttatcgaacacctattacagccatttgctatgctagataatttacttttggcatataacttaatcctcacaaccactctaaggcccccatgaacatcattcttttacaaggaaactgtagttcacagtgccctgcccagggtcatatagttaataagtggcagggctggcattcagacttagaccttttgaactccattacaccatgtcatctgaaggctttattattaatgttgtcattacaaaagacacaccaagtcactgactacagtcacagagacccaataaattaaaaaaaaaaaaggcatgccaagataatgtctgactctgaga

SEQ ID NO: 719522 - DNA, 602 bp, Homo sapiens
agcatgtgaaaagatttttttttttcccagaaaaccatcaacacttatggaacaaaagagacttactagttccaaatttacgcagagtattttaggatcagaaaatagccacctgaataaaataattttaaaaatatatattatttacaaagagaaagacacataatcagattataaaaaactgggcagagaatatgggaatgggaagaggtatcatctcagtttttagaataaagatattcatattttcagggtataatacggtactgttgactataggtacgacatcatacagcagagcgctagaacttactcatcttgtttaactgaaactttataccctttcattagtaactccccttttctccctacctccaggcagtggtgatctttattccactttttaattctaatttgattacttcagttacctcatgtaagctaaatcaagcagtatttgtctttctgtgactggcattttttacttagcataaagtacataaggtgcatccatatgatgacatattacagaatttctcttttttaaggctgaataatatttcatygtgtgtgtatcacacacatatgtagtatattttata

SEQ ID NO: 719523 - DNA, 958 bp, Homo sapiens
gatatgttagggagaggagaaaagaaactgtcacaaaaatgaagtgaaattgagtctccatttctatgtttagaaagctgattttgaccacccttttttgttcagttaccaagattgagctgacagaaattcactgcatttacatggttttatttgtagcaatcctgtgagcgggggagccttttttttttttttttttgagacagagtctcgctctgtcacccaggcttgattgcagtggcgtgatctcggctcactgcaagctctgcctcccgggttcacacctgcctcagcctcccgagtagctgggattacaggcgcctgccaacacgcccggctaattttatttgtatttttagtagagacggggtttcaccgtgttagccaggatggtcacgagctcctgacctcatgatcagcccgcctcagcctcccagagtgctgggattacaggcgtagagcaggggaacttttttgtattggatacacagctgatgtaatctactgttactgcaataattattaagaaaaaatcataaattgtaacacatttccaaaaattatttgtaatctattacttctacagatgattttatcaataagtaattacataatttaaagtggttacaagtaaaataaattaatttgaatcaattgactatctccttagtcccagaagaagttactattgatggtgaatgctaattctcatctcaaaagaatacaggtatatttgttcctaaagcaggccagttcattctgttggcatatgtcatcttttagtaggataatcaggaaaaatatcaaggatgtcatactattaaattattgttaaggtaattcaaagacattcatgcatcaattcaaacaacttggagaaaaacagattaaaaggtccatgtttgtttactagatcatcrttgcactgacaaaaaacaagaatgaatttagtcaagca

SEQ ID NO: 719524 - DNA, 1443 bp, Homo sapiens
tcataatatttaaaaaaatagccactaacactccagtggtaaaatgaaaagaaggcatttggtaacaacttacaaaagaagaaattcatctttaacaaatataaagaaaatactcagccttctcactgataaaggaaatagaaattgaaaaaaaaatggcaacctttttagcctatgaaattgtcagggattcaaaaaggataatacatactgatgatgagaacactgtaagttgggcattccctaacactgctaaacagtcttcattgacctggaaatttgatatctatcaacatgtttattttacatctctaaaagatttgaaacttgacgtttcaattgcatttttaggaattgatcctaaggaattaagtgtgctgtcaaaatgtatgtacacaaatgtatacaaatggtcttcacagcattatttataatagaaaaraaaactagaaaacttttccgtaaagaccagtatctctctttcagaataaataatttgtaaccaccaaaacataaacttacgttcttgaaagggaatcagtgggaaaaagtgtttgtttttatacagacctatatgcatactctaatagatatttatgtttgtcaaacaatagatcacttactaagtaactgaatcattttgaaaagctctttcaagaaaaaaatctacctactgattaataattcttagcagactctagtcttcccactatgagaaggctaaaatgaatatttttatgctggtttaaaatatttatgatagaagcctagaggaatttccagtgatatcttttgatttctaaacccaaagaaatggatatgcttcattctcatactatgttttctgaaaacttttgttgttactaccaaataaaatacatggaaatggtctttattacagtagtattattcacacatctgtattttattttaacattatattctcctgaaaaaggattccacttatttcacaatgttttccaactgacagtccaatggaatataagcttatctcagaaatttgattatttcagaaagttagagctcattgtgctttaaaaagaaattgaggtgtaagaaggacttcacaaatatcatcctccttggatacataaaatgttatgctttcttatgttctattcgttgttttgtgtgtaactcagaagaataatgcaatttgccagaagcactgtaatctcagttttcaagtatttctgttggtaagagagaattattcttctatgtacacttgcttcaacttttagatttaggtcttttatatcatctttttaagtattttctgttatttattaaacagtataataaatttgtaagatgaatgccaaacaggtgtcatcttttttctgatagatcaacaaatgaacagctcagaatcagtgactgagctgacagtattactttgctgaactaaaagcatagaaa

SEQ ID NO: 719525 - DNA, 1695 bp, Homo sapiens
gggaatagaggaaagacacgaccagaatggatttgtacctggttgcacataaacattacgcaacagtaaactagtacttttatgtcactgcacacatcgctgcctacactgaactcactaaatcacagataagagggcacttgtacagtggggatggcagcctgctcgatgtgagactaaagaagctttatgctataacttaatctctgtcatgggaaaagtaaaacttataaagttaatgagttctagactttaagtagcacttgattaatttgtaacattctgaggcgttaaaacaaaccaaaattagtttctcacattccactgctgtcttttggccactgaagctttagaaaaaacatttcagtaaatttccctgataggaatcctgtttaatttctgaagtattaaattaattggstattctgtattttataataatatttgaaaaacaatctggcgtttaccacactaggtccagatatatcaacggataaaaaaaatgccttatatttttatctttatttcttcagatattattggatcattatctattaaaaactaagtgtgatataacttttttctatatattatcaaatatatatagttagcattgtttttaacacttatgatttggacttttattaaaattatctattcaaactttataaatcatatatcataccaaacaaaataaacctctaaaataaaagactattataaattggatttacatggtatttatattgaccagaaaattcactgcaaggtatactaggaattaacattccaggttgaaaaaagtaaaaaaaaaatagccctatgttagaaaacatttattggaaatgataaaactaaaatccagctaattaaaaattttctaatatgcacatagtttactccactacaataaagtatcaaaataactttatcatgtaaatggtaaaaatataagtactaatgtctatcattgtaattcttcataaaaatctatgtatatttcctttcagggctcatatgaatatatgtgtctgacttgtatcattgtcttataagtacttatggacatatgttcggccctcaaccaattaggacaagcacataagcatttgtcaaaaataaatatgaagaagaaatgatacttcattttttccaatataagaaggaccacctggttgacagctggaatttaagggatcttaaaatagtgggtaccagcaggtctgttgtacttaaaataattcaagtggtaagaattccatcaggaacatctatttcccaggatttatagctaagtccttaaaaaattgccctttgatgaaacttgaaaaaattcctgttttaaaggctacaataaaaatgccttacagcttaacaatgtttagatattttccttttaagaaataaaaatctcaaggctgtcaggtttgaatcctaaaaagggatactgagattaacagcaacatataattgtgtaagattcagtgtcacactctgtaatctatcttaaaaagccaaatagccaatagctgggtgtggtggcacaagcctgtggtcccagctactccaaaggctgaggtgggatgattgcttgagcccaggagatggaggctacaatgagccgagatagagccactgcaatccagcctgggcgacagagtgaaaccacatctcaaaaacaaacaaatgaaaaag

SEQ ID NO: 719526 - DNA, 1695 bp, Homo sapiens
gggaatagaggaaagacacgaccagaatggatttgtacctggttgcacataaacattacgcaacagtaaactagtacttttatgtcactgcacacatcgctgcctacactgaactcactaaatcacagataagagggcacttgtacagtggggatggcagcctgctcgatgtgagactaaagaagctttatgctataacttaatctctgtcatgggaaaagtaaaacttataaagttaatgagttctagactttaagtagcacttgattaatttgtaacattctgaggcgttaaaacaaaccaaaattagtttctcacattccactgctgtcttttggccactgaagctttagaaaaaacatttcagtaaatttccctgataggaatcctgtttaatttctgaagtattaaattaattgggtattctgtattttataataatatttgaaaaacaatctggcrtttaccacactaggtccagatatatcaacggataaaaaaaatgccttatatttttatctttatttcttcagatattattggatcattatctattaaaaactaagtgtgatataacttttttctatatattatcaaatatatatagttagcattgtttttaacacttatgatttggacttttattaaaattatctattcaaactttataaatcatatatcataccaaacaaaataaacctctaaaataaaagactattataaattggatttacatggtatttatattgaccagaaaattcactgcaaggtatactaggaattaacattccaggttgaaaaaagtaaaaaaaaaatagccctatgttagaaaacatttattggaaatgataaaactaaaatccagctaattaaaaattttctaatatgcacatagtttactccactacaataaagtatcaaaataactttatcatgtaaatggtaaaaatataagtactaatgtctatcattgtaattcttcataaaaatctatgtatatttcctttcagggctcatatgaatatatgtgtctgacttgtatcattgtcttataagtacttatggacatatgttcggccctcaaccaattaggacaagcacataagcatttgtcaaaaataaatatgaagaagaaatgatacttcattttttccaatataagaaggaccacctggttgacagctggaatttaagggatcttaaaatagtgggtaccagcaggtctgttgtacttaaaataattcaagtggtaagaattccatcaggaacatctatttcccaggatttatagctaagtccttaaaaaattgccctttgatgaaacttgaaaaaattcctgttttaaaggctacaataaaaatgccttacagcttaacaatgtttagatattttccttttaagaaataaaaatctcaaggctgtcaggtttgaatcctaaaaagggatactgagattaacagcaacatataattgtgtaagattcagtgtcacactctgtaatctatcttaaaaagccaaatagccaatagctgggtgtggtggcacaagcctgtggtcccagctactccaaaggctgaggtgggatgattgcttgagcccaggagatggaggctacaatgagccgagatagagccactgcaatccagcctgggcgacagagtgaaaccacatctcaaaaacaaacaaatgaaaaag

SEQ ID NO: 719527 - DNA, 598 bp, Homo sapiens
gccttgctttaaatgtttccttcttctccttcttcttcttttttttttttctttttttaaacaaataccattccttgtactttgtccctctgggaaattcctattcatccaacaagtctcattcaaatgctactttttacaatgaagctgccagatagttgtaggtacagtcaagcaccacataatgatgttttgatcaataacgaatgaacctgcatatacaacagtggtcccataagactatacaaccatatactctgtaactaacttttctatgtttaaatatgtatagatacatgaatatcattgtgttacaatttcctacagtattcagtacactaacatgctatacaggctcatagcctagatgtgtagtgggctataccatctaggtctgtgtaagtactctctatgatgttcacacatgaagaaattgcctaagggcacgtttctcagaactcaacyctgttatgtgatgcatgacagtatttttcctgtgcctctgctgttcttgacacactccaccatcatccttttgtaatcctctgtttacccatctgtcttttaaagtataggcttattgatggcaagaatctgg

SEQ ID NO: 719528 - DNA, 518 bp, Homo sapiens
aaaaacagtgtcagggctgggcgtggtggctcacgcctgtagtcctagaagtttgagacaagactggacaacatggtgaaactctgtctctacaaaaaatacaaaaaattagccaggcgtggtggcttgcacctgtagtcccagctactcaggaggctgaggtgggagaatccattgagcccagaagtcaagggtgcagtgagccaagatggtgtcactgcaccccagcctggagacagagcaagatcctgttgcccaggcaaaaaccaaaaaccaaaaatcaaaaccaaccaaacaaacaaaaaacacacaaaaaaggcagagaggtactcaaaacactagacatttatcattagttctggttttgtcaccaaatttgaacatttagacaactcacttaaatttttgatactttttactttaatttttccataagagctaacatgaagcttttytttggcatatccagtacagaaaggctgtcatatcacttactacattttacaaatacattttgc

SEQ ID NO: 719529 - DNA, 626 bp, Homo sapiens
aaaaacggtaattcataacttattttaagtagaattcccaagmctaaaatgtcaaatatgaagaagctttataaatgtcaaaccattattggtccctgcaaacagataaaggcttatgttttctacattacttcagttctagaaatgctagattatatccttatattgctcaaatactatgtactacttctacacccctgggctggtattatactttgttgccagtatagtaaatatatgtctagtctacattattcttccataaatgttatctatctctcaagaaagatcaagtacttctcagtagtttaaaatttttcacaagaaatatcattgttctcatttttcttaaatcacccaatactctctatgaagatgccatttggaaagctgtattatagaaataattttaaaaccaagggctgcattacttaaatcttaaatcacccaatactctctatgaagatgctatttggaaagctgtattacagaaataattttaaaaccaagggctgcattactgtgaaagatataagacacctattgacaggtctatcttaatgtggactttttaaaagtctatccatcagtatttttaaatgcatctacccatgaaaggtaaaaat

SEQ ID NO: 719530 - DNA, 1807 bp, Homo sapiens
  misc_feature 771, 772, 773, 774, 775, 776, 777, 778, 779, 780, 781, 782,783, 784, 785, 786, 787, 788, 789, 790, 791, 792, 793, 794,795, 796, 797, 798, 799, 800, 801, 802, 803, 804, 805, 806,807, 808, 809, 810, 811, 812, 813, 814, 815, 816, 817: n = A,T,C or G
  misc_feature 818, 819, 820, 821, 822, 823, 824, 825, 826, 827, 828, 829,830, 831, 832, 833, 834, 835, 836, 837, 838, 839, 840, 841,842, 843, 844, 845, 846, 847, 848, 849, 850, 851, 852, 853,854, 855, 856, 857, 858, 859, 860, 861, 862, 863, 864: n = A,T,C or G
  misc_feature 865, 866, 867, 868, 869, 870: n = A,T,C or G
atgcccgggctcgtgtatttaccagtgttggtcaagggtatattagcaatgttcagtattttttcccccacaggagtgtttagcacactaagcacgttgcgttggttgcaattcatcttaggccttattactgaatgtaaaatgccttcatctcttgggggaaaaggtgcggtgaaaatgcaaatcatcatttagctaaaactgaacagctgttacaagagtccataattgcagaactattgcaccactttcatcttggcaccaggatgggtgaatgagtgagtaaaaaagcccctcagttcacaagacgacagactattttcttttctacctatgttaattttccatttccctccctagcaacaccagccccacaccatcttctgtgaaacatgtcaaaatggccttaagcctggaagaagtctcactctttcccaactatctaagagtctaggctgacataaaatgaataattatctttggctttgtaagcagcaaagccaagcaagtcacttcaggagtccaaatagtggacctgcctcaatggcatcttgccacagtatttctccgtagcacacaaacactctcccagggagaaataccaccaattatagaaggaaagaggaaaataaatacctgaaaaaatgtaaatcagataatgtgatagcctcacagatttaagcatctttaaataacaataaatttatatgaattttctgtgagtattcaatgaattttcattcatatacaataaacacatatggagggcannnnnnnnnnnnnnnnnnnnnnnnnnnnnnnnnnnnnnnnnnnnnnnnnnnnnnnnnnnnnnnnnnnnnnnnnnnnnnnnnnnnnnnnnnnnnnnnnnnnctctgcatcttttcccttgtgctagttaatactcttagttataagtaataaaactttcttagcttaaagagggaattttatttgtgtcatgtaacttgagggtggaaggcaaaaggtgcatggtacaagtggaaagaaggcactgtcagatggctcctgtgtgaggtcagttggaggtcaagcagaaccagaaccaagcaaacaggtgagattgagaggctctgaagtggtgcttaagaggggtgtgatccaggtggttccccagagagagagatgttgtataaacaacatgtgttcactctttccttattgcagacaggcatcatgagcactgagctgacttgcgtcacaggcagcttattgttaatatttatattagactaggcgcacagtatccaaattaatcccagttcactaaagtaatgtatattcccaatattctgctataccacatcgatggtcatcatcctagacttcttcttgactagatataggctgcttcaytcatctccaaccgtttttcccttgttcagtcttttctgtgtttcttcattgatatggagttccattttggtgatataaactatttgatcttgcctccaaagtttcattggcatagaaaatgtaattcctcagagttttcacacatatatttttcacatatagttttcacagctatatttacacataaacctttcagtaagtaaatattaataaatgctcaaaaacacatcccatcatttgattgaagcacataaaagtagttataaaagatgtattgtttctgagcacctatttacttaaagctcagggtagaagtcgcatgttccatttaagacctgcatggtagccaaacctcaggcaacacacttgaacctagctccacccgctgtctgcttctgactcactttactcttccctttattcttagaacaat

SEQ ID NO: 719531 - DNA, 632 bp, Homo sapiens
accacgtttttaacatcttgaggtgataaagagcttgatgtcctcaaggaactgaagcayagacaggcagttagagtatactgagcaaagaagggacagaaaagaaagaggttggaaactgagccagggactgtatcttacaaaccaccatatgtcataataggaagttgagattgtattccatgcacagtggcaagtccttaaagaattccaagcagtagaatagcatgatgtctattaagtgggcagtagtgattgaaagaaggaaatctatcaaagttaaccaaaagaaatagaagaggcaaaaaatctgtggatcaaggggaggaaatctatgcattatcaaaaccttgtggagaaacaggcaaactaaggaagaagaaactgcagaagaattacatttttttgaacaataaggtgaggtgagctaagaatacaattggagtttgaccaaatggaccagtgtccacttgagtttgacccccaggtgccaccccagcttaccctagacaacgaaccttccctctatgtctataatataacaataaagcatacaaatggaaaaaacagtaataaggagcagagaaatatatgctccatctattagctccatctaagatgttttaggatga

SEQ ID NO: 719532 - DNA, 588 bp, Homo sapiens
cccccttcagacacatcragacaatcactacacctccatcaagtgagtactcagctttgtacacattaccttgagaaaatgcagtgaacaaagtcatgtaaaataatccagggttcctatggaataatggcaacttcctaaatctaatctctttgcccgtaatctaactaccatatggaggaaaaaaaagggagcaaataaaactacctttaaaacatgccaaagaataaatttggagacaaggaatataaaacagtttacacacttgagatttcaacaagatggctgaccagagatgcctggcactcatacccctaacaacaacaacaacaacaacaacaacaaagactagagcaataaataaacaattaaaattcacgtatagtgtctaaaaagagaactggagtaccacaagggaggtgtgaattccctgtgaagcatggacacccagaacagcagcatagaaaggggagcagagcaccctgcttctggtactacatcacctccaacaagattgactgggaaccagaaaggactttcatttgcaggggaaaaggtaagcagaagatctccagcagctccattaca

SEQ ID NO: 719533 - DNA, 1385 bp, Homo sapiens
ttgggaattgttttattggattgtattctgcttttgttctaaatctcaggaattcttagatcacttcactaaatccagtggcttctctgggtcatactattcttctatcagtttacttacgggatgaatataaacccctcatttaatttccccaaattatatttcaggtgaggaaatgctgtatcatagaacttgagtaaatgcagatacatagagcacaatagaggaaacatattacactgctattagaaatagtttctcttagtatgtagatactaagcaaaccagagagttcatgcctagctcctggcargctcctgctgagtcaggactcctgctgagttagctccatcagcaagtaaactctgccatttagtcccaggtataccaggagacaaccttcctgggtgccagaaagaaaagcaggtctcctcccctcttgtccgaggaaatcttgcttatttaatgatcttgtatgtttgacagtggtagtagccattccttcataaaaacccatacctcacctacaatgatgtggttaggctttcctgacccaaggaacacattcatgatagttgccatacatttctaaaagattaaactatttaatcttaacttcatatgtgataccaacagttcagactaaatttgtttatgtggggatggggggaagaggatctaactttctaaaggcaagtgatcctaaaaataagtatactcaatttacattcacatacagaatatataatattttggcctgcagcttctgcattgaaaattgttgggattccataattttccaaagtcaaggggtgtatacttgctttatatttgtgtaactgaagaatctagtcctgtgattttttttctaaaaaagtctgttacaaatgtaaattaaagttgtttccaaagtaaactgctagtaatgttattttttccttttcttaaaatagctttattgagttataattcatatatcatgcaattaattcatttaaagtatacagtaatagcttttagtatattaaaagatgtatacaaccatcactacagtcacttttagttttcttcacctcaaaaagaaattccatgccctttatttgtacacccccattgccccatcccccccatccctaagcaacccctgatatactccctgtctctatagattttcctattctgaacctttcaataaaaatattgtgtggcaatgtatattagtccattctcacactactataaagaattgccccaaactgggtaacttataaaggaaagaggtttaattgacccgcagtttcacatggctggggaggcctccggaaacttaagaatcatggtggaaggggaaacaaacacgtgcttcttcgcatgatggcaggaaa

SEQ ID NO: 719534 - DNA, 2382 bp, Homo sapiens
gattatgcaggataatctctcttacttaaggtcaaacaattaggaacttcaattacatgtgcaaaataccttcacagcaacacctagaatagagtttgattgaataatcggggactgtagtctcgccagttggtatatttttaaaaagccattgcaacatgttccaagaatagtaaggagccaataggattagagagatgtgatcatctggaaaaatagatgaatcagagataacaggagccattggaaggacactgaacctgactctgagaaagatgtgtggctgttagagggttcttaccttagacagagagagatctgaagcctattttaaaggattatgctgacactccatgggggaatagatggaagagggcaagatgatgttataacttggagaccacatcatgctgggcttactcatatattactatgttcagggataccaagtcttatttccaagtcccacttggctataatcctgattaagaaggtttaataggccgggtgcagtggctcacgcctgtaatcccagcattttgggaggccgagacaggcgaatcacctgaggtcaggagttcgagaccagcctgaccaacatgtagaaacatttagtagaaacgcttagtagaaaccctgtctctactaaaaacacaaacattagccaggcatggtggcgcgtacctgtaatcccagctactcaggagactgaggcaggagaatcgcttgaacccaggaggcggaggttgcagtgagcggagattgtgccattgcactccagcctggggacaagagcgagactttatctcaaaaagaaaaaaaaaagaaggtttaataaggaaacactgtgcatttatttactaggttcctagaactatatgataggtgtgaggaatgtaaaggtgatcaaggcaaagcaatgtatagtcttttgtttcctcaaaagtgatgcaatttacagtgagcttccctcactgttccaccattgggaccaaaatgtcatgtgatgttaagttttaactatggtgttggggcaggtcccaggccttcttgtaccttgcccaccatgtttaggctcttgagatacatgatacaggggacactccagccaaggcatagactttttaccttgattttcagacttctttattatccttttgggttaagctagagagaaaaaacaaaacaaatgactacagtgaaataatgaaaaatggggatgtaccagctgttgtttcttgacctttaacacaatgcctgttcattttagattttttcctcaatcactgtgttgtaatcctgggaactgcatttgccagcagggcagagagagatacttgtgtgatgtttggaagtaaggagggaagagaggatccttcctctggctgtggtggaggcagtgtagcaagggtaccagcaatgatggcagcagcttcctgggctctatgaccccgtggtgtctccagctttggggatgtagacagctgtgctttagctgtagcttcccacagttttctgatttctgggtcgatcaccttgcctgtctaatttacacttccaaaaatgtagtaatgagttatttyactgcactaatcctgctctgtttgaaatgtctgactgagccctcactgactcacgggtcttctctacctctctttctgcagcctggggaaggtttcaatcagctagtttcctccttcctctcatctgacctcaaccctggctcctcttaactctccaaagatgaatggtctgcaacagaagacttctgaccaaaatgaagggaaaggaaaggatgtgaggatgtctagataggtgtagagggtggtggaagaaatgtagtaagagaccccagcatgggagggggaaggggaaaagagatagtctctttaatttcttgtcatttcttaaacactttttaattccccagtcttacagttttagaagtgagttaaatgaaggatgtgagactagtcttctttatttatgactaccttttatttcccctgaactttcacatactctaataaaagtgtgttttcattactcttcagcctgagtgtgttcaggttttcttgggagagtgtgggggatgcaatatttcatttatccaacatctttggtcttatttatatacatgacctgatataattttcacatgtgttaggttttaatatgttttatatttaatatacagaaaactctattaaaaggaaagggtgcggcaaagtttgagaacttgcttggattcatgtggctaatcaaagtggacctaagatttgagctgagatcaccagacagtaattcagttaacccagagttcctttgtttgtagaaacaaatctggatttggaatcagggagaggaatgtaaggtcgacag

SEQ ID NO: 719535 - DNA, 2382 bp, Homo sapiens
gattatgcaggataatctctcttacttaaggtcaaacaattaggaacttcaattacatgtgcaaaataccttcacagcaacacctagaatagagtttgattgaataatcggggactgtagtctcgccagttggtatatttttaaaaagccattgcaacatgttccaagaatagtaaggagccaataggattagagagatgtgatcatctggaaaaatagatgaatcagagataacaggagccattggaaggacactgaacctgactctgagaaagatgtgtggctgttagagggttcttaccttagacagagagagatctgaagcctattttaaaggattatgctgacactccatgggggaatagatggaagagggcaagatgatgttataacttggagaccacatcatgctgggcttactcatatattactatgttcagggataccaagtcttatttccaagtcccacttggctataatcctgattaagaaggtttaataggccgggtgcagtggctcacgcctgtaatcccagcattttgggaggccgagacaggcgaatcacctgaggtcaggagttcgagaccagcctgaccaacatgtagaaacatttagtagaaacgcttagtagaaaccctgtctctactaaaaacacaaacattagccaggcatggtggcgcgtacctgtaatcccagctactcaggagactgaggcaggagaatcgcttgaacccaggaggcggaggttgcagtgagcggagattgtgccattgcactccagcctggggacaagagcgagactttatctcaaaaagaaaaaaaaaagaaggtttaataaggaaacactgtgcatttatttactaggttcctagaactatatgataggtgtgaggaatgtaaaggtgatcaaggcaaagcaatgtatagtcttttgtttcctcaaaagtgatgcaatttacagtgagcttccctcactgttccaccattgggaccaaaatgtcatgtgatgttaagttttaactatggtgttggggcaggtcccaggccttcttgtaccttgcccaccatgtttaggctcttgagatacatgatacaggggacactccagccaaggcatagactttttaccttgattttcagacttctttattatccttttgggttaagctagagagaaaaaacaaaacaaatgactacagtgaaataatgaaaaatggggatgtaccagctgttgtttcttgacctttaacacaatgcctgttcattttagattttttcctcaatcactgtgttgtaatcctgggaactgcatttgccagcagggcagagagagatacttgtgtgatgtttggaagtaaggagggaagagaggatccttcctctggctgtggtggaggcagtgtagcaagggtaccagcaatgatggcagcagcttcctgggctctatgaccccgtggtgtctccagctttggggatgtagacagctgtgctttagctgtagcttcccacagttttctgatttctgggtcgatcaccttgcctgtctaatttacacttccaaaaatgtagtaatgagttattttactgcactaatcctgctctgtttgaaatgtctgactgagccctcactgactcacrggtcttctctacctctctttctgcagcctggggaaggtttcaatcagctagtttcctccttcctctcatctgacctcaaccctggctcctcttaactctccaaagatgaatggtctgcaacagaagacttctgaccaaaatgaagggaaaggaaaggatgtgaggatgtctagataggtgtagagggtggtggaagaaatgtagtaagagaccccagcatgggagggggaaggggaaaagagatagtctctttaatttcttgtcatttcttaaacactttttaattccccagtcttacagttttagaagtgagttaaatgaaggatgtgagactagtcttctttatttatgactaccttttatttcccctgaactttcacatactctaataaaagtgtgttttcattactcttcagcctgagtgtgttcaggttttcttgggagagtgtgggggatgcaatatttcatttatccaacatctttggtcttatttatatacatgacctgatataattttcacatgtgttaggttttaatatgttttatatttaatatacagaaaactctattaaaaggaaagggtgcggcaaagtttgagaacttgcttggattcatgtggctaatcaaagtggacctaagatttgagctgagatcaccagacagtaattcagttaacccagagttcctttgtttgtagaaacaaatctggatttggaatcagggagaggaatgtaaggtcgacag

SEQ ID NO: 719536 - DNA, 1096 bp, Homo sapiens
tgatgtaatgagatatgaggaaaagtttactgaggcttctgcgaaggttttcttcttcagacagcctcataagaagttggtttttcttccatcatgtataaattaggaaccaattagccccaacttaatgacttataatcacaagggaaccagaatgaagatgaagctgtgcatgatagtggagaaacagaaagaatgtacatcttgggtgatgtgaataaaatgcaagatcaaccatttctaaatcttgtcctacttatagacttcccctttaatgaattagatgtttaaaaattgtataagctagtttgagttgactttttctttttttagtttcagctgaaagcatccatcctgatttgattggagaatgggtttcaatgaagattttacatttttttttcaatttacataccagctgacgtgtgtcagcacatatatgtaggagtagaaaaaattagctaaaatatttctattaaatcaatagaggagttaagtttggaaatgattaaaagatctaaatttcagagcactatgaaagaaaaatgatactggaaattagatgttgaggagatgacagttgatcaaattaatgtcttggtgaattttgaatcttggttattcatcgaggatgagggatgggattagaggatggtaaatgttttaacagctgctatttggaatggaaaaggaattaattaaagattaatgctgacaagcattgagaatccagctgagtttggagatcacaaatttataatggagctaatcagtttgtttatgaagttttttttccagtaggactgtataggagagaaatagaagcagaggaaaaggacagtgggacttaaaagctggmgactggcagagaaggtggagtagaagggccaggggccaagaaaattgacagttatacgtataatagtaatcattactttttattaataataactgattctttggcattttaacttccaacaaaatgtttaaaaattatcatatttgattgttagaaggatgttgtgaaacagattgttaatcctagtttactcatgatgaattggaaagtcatgacatttatgcattcattccttca

SEQ ID NO: 719537 - DNA, 1096 bp, Homo sapiens
tgatgtaatgagatatgaggaaaagtttactgaggcttctgcgaaggttttcttcttcagacagcctcataagaagttggtttttcttccatcatgtataaattaggaaccaattagccccaacttaatgacttataatcacaagggaaccagaatgaagatgaagctgtgcatgatagtggagaaacagaaagaatgtacatcttgggtgatgtgaataaaatgcaagatcaaccatttctaaatcttgtcctacttatagacttcccctttaatgaattagatgtttaaaaattgtataagctagtttgagttgactttttctttttttagtttcagctgaaagcatccatcctgatttgattggagaatgggtttcaatgaagattttacatttttttttcaatttacataccagctgacgtgtgtcagcacatatatgtaggagtagaaaaaattagctaaaatatttctattaaatcaatagaggagttaagtttggaaatgattaaaagatctaaatttcagagcactatgaaagaaaaatgatactggaaattagatgttgaggagatgacagttgatcaaattaatgtcttggtgaattttgaatcttggttattcatcgaggatgagggatgggattagaggatggtaaatgttttaacagctgctatttggaatggaaaaggaattaattaaagattaatgctgacaagcattgagaatccagctgagtttggagatcacaaatttataatggagctaatcagtttgtttatgaagttttttttccagtaggactgtataggagagaaatagaagcagaggaaaaggacagtgggacttaaaagctggagactggcagagaaggtggagtagaagggccaggggccaagaaaattgacagttataygtataatagtaatcattactttttattaataataactgattctttggcattttaacttccaacaaaatgtttaaaaattatcatatttgattgttagaaggatgttgtgaaacagattgttaatcctagtttactcatgatgaattggaaagtcatgacatttatgcattcattccttca

SEQ ID NO: 719538 - DNA, 1096 bp, Homo sapiens
tgatgtaatgagatatgaggaaaagtttactgaggcttctgcgaaggttttcttcttcagacagcctcataagaagttggtttttcttccatcatgtataaattaggaaccaattagccccaacttaatgacttataatcacaagggaaccagaatgaagatgaagctgtgcatgatagtggagaaacagaaagaatgtacatcttgggtgatgtgaataaaatgcaagatcaaccatttctaaatcttgtcctacttatagacttcccctttaatgaattagatgtttaaaaattgtataagctagtttgagttgactttttctttttttagtttcagctgaaagcatccatcctgatttgattggagaatgggtttcaatgaagattttacatttttttttcaatttacataccagctgacgtgtgtcagcacatatatgtaggagtagaaaaaattagctaaaatatttctattaaatcaatagaggagttaagtttggaaatgattaaaagatctaaatttcagagcactatgaaagaaaaatgatactggaaattagatgttgaggagatgacagttgatcaaattaatgtcttggtgaattttgaatcttggttattcatcgaggatgagggatgggattagaggatggtaaatgttttaacagctgctatttggaatggaaaaggaattaattaaagattaatgctgacaagcattgagaatccagctgagtttggagatcacaaatttataatggagctaatcagtttgtttatgaagttttttttccagtaggactgtataggagagaaatagaagcagaggaaaaggacagtgggacttaaaagctggagactggcagagaaggtggagtagaagggccaggggccaagaaaattgacagttatacgtataatagtaatcattactttttattaataataactgattctttggcattttaacttccaacaaaatgtttaaaaattatcatatttgattgttagaaggatgttgtgaaacagattgttaatcctagtttactsatgatgaattggaaagtcatgacatttatgcattcattccttca

SEQ ID NO: 719539 - DNA, 644 bp, Homo sapiens
gaagcagcagaaaggccctgagagctcactgggtacccaagcaggccattcctgcctggcaccacagggatgcatcaggaggatgatcagagaagcrgggggcaaaactccacggggagaaggaactctctagctgaacttcgtaacaatttgtatagggcaagaagcctcctggctagaacttggaggagggagcaagcatccaatgtgtttcttaaaaatgctgccattattcctttgctttatttattgcttctgagaagtctaataacagtataataatcttggctttgtaagttacttgatcttttttcttggaagcactgagaattttttctgagtcattaaagcctagtggtatactaggatatgcttggagccaattgatcatggtaaatcttccaaggttccctatagacccattcaatgtgtaaagtcatgccttctgttatttctgaaaagtattcttgatttataatttcattattccattgttttctctgcctcttagactccaattatagatttattcaatctccttttcgtgatttccatttcaaccactttctaaaacatgtctatctcattttcattttgttggttgtttttgctagctttcttcaatgccacttgttaaattttta

SEQ ID NO: 719540 - DNA, 644 bp, Homo sapiens
gaagcagcagaaaggccctgagagctcactgggtacccaagcaggccattcctgcctggcaccacagggatgcatcaggaggatgatcagagaagcggggggcaaaactccacggggagaaggaactctctagctgaacttcgtaacaatttgtatagggcaagwagcctcctggctagaacttggaggagggagcaagcatccaatgtgtttcttaaaaatgctgccattattcctttgctttatttattgcttctgagaagtctaataacagtataataatcttggctttgtaagttacttgatcttttttcttggaagcactgagaattttttctgagtcattaaagcctagtggtatactaggatatgcttggagccaattgatcatggtaaatcttccaaggttccctatagacccattcaatgtgtaaagtcatgccttctgttatttctgaaaagtattcttgatttataatttcattattccattgttttctctgcctcttagactccaattatagatttattcaatctccttttcgtgatttccatttcaaccactttctaaaacatgtctatctcattttcattttgttggttgtttttgctagctttcttcaatgccacttgttaaattttta

SEQ ID NO: 719541 - DNA, 644 bp, Homo sapiens
gaagcagcagaaaggccctgagagctcactgggtacccaagcaggccattcctgcctggcaccacagggatgcatcaggaggatgatcagagaagcggggggcaaaactccacggggagaaggaactctctagctgaacttcgtaacaatttgtatagggcaagaagcctcctggctagaacttggaggagggagcaagcatccaatgtgtttcttaaaaatgctgcsattattcctttgctttatttattgcttctgagaagtctaataacagtataataatcttggctttgtaagttacttgatcttttttcttggaagcactgagaattttttctgagtcattaaagcctagtggtatactaggatatgcttggagccaattgatcatggtaaatcttccaaggttccctatagacccattcaatgtgtaaagtcatgccttctgttatttctgaaaagtattcttgatttataatttcattattccattgttttctctgcctcttagactccaattatagatttattcaatctccttttcgtgatttccatttcaaccactttctaaaacatgtctatctcattttcattttgttggttgtttttgctagctttcttcaatgccacttgttaaattttta

SEQ ID NO: 719542 - DNA, 644 bp, Homo sapiens
gaagcagcagaaaggccctgagagctcactgggtacccaagcaggccattcctgcctggcaccacagggatgcatcaggaggatgatcagagaagcggggggcaaaactccacggggagaaggaactctctagctgaacttcgtaacaatttgtatagggcaagaagcctcctggctagaacttggaggagggagcaagcatccaatgtgtttcttaaaaatgctgccattattcctttgctttatttattgcttctgagaagtctaataacagtrtaataatcttggctttgtaagttacttgatcttttttcttggaagcactgagaattttttctgagtcattaaagcctagtggtatactaggatatgcttggagccaattgatcatggtaaatcttccaaggttccctatagacccattcaatgtgtaaagtcatgccttctgttatttctgaaaagtattcttgatttataatttcattattccattgttttctctgcctcttagactccaattatagatttattcaatctccttttcgtgatttccatttcaaccactttctaaaacatgtctatctcattttcattttgttggttgtttttgctagctttcttcaatgccacttgttaaattttta

SEQ ID NO: 719543 - DNA, 566 bp, Homo sapiens
ctagcaacttatagcagagttttaggatttgatgagtaattgtcatgacaagtggtttggaaaaagcagtgcagaagaaagcaccatattgagagtccagtgatacttgaattttggtcctgattttgcattggttttcattattatcttggacaaaccactgtttctgtgggttttagttatatcgcgttaatgctgcagttgaactagatgaggtacagttttgatcaagtgtttgtagtttatcttttcatgaatrtgtatctattctttcattatggatgaatgaaacatccagactttcttttttttttttttttggagatggaatttcgctcttgtttcccaggctagagtgcaatggcacaatctcggctcggcacaacctccgtctcccgggttcaagtgattctcctgcctcagcctctcgagtagctgggattacaggcatgtgctgccacgtccggctaattttgtatttttagtagagatggggtttctccatgttggtcaggttggtctcgaactcctgacctcagatgatccgccagcctcagcctcccaaa

SEQ ID NO: 719544 - DNA, 776 bp, Homo sapiens
gggggcaactggacagtcagcttctcacaggttctgaaacattgtccagtacaattttttttaggtttcacatccatccacaaatccttttaactagttaggcctgttaaaacatcaatgctttccctttagtgtactatcttaatcatttctaatctattatttaagatggctcaaatgacccctgtaacttggtagaagttggaaatgaatttatctggggtagaggcaggatgagagacttaatatctaaattctactttgatgtccgatttggtggcaaagctcacagtagtcatctgattcctccctaatgataccctggttgtcatggcgatgggaggggattgtgaaatatcacaatgaagctttatataaatctattttcaagctagatggaagacattcgagcatgacatcaataaaacgtaagatgctgtaagattgtgtaaaccccactatatctctttttcagaaccccaaggggcaacagctgctgaaagaatcagcaacataggtgtgggcggagggccatgtgggcacagtgamctccatacaacagcctctggggccctgcagaggatactaggagctcattaggaaaacagcaggaaggaccaagacagttcctgagggcagttcccaaaggccagagggtagccacacagccctggaacagggggaatttaatgcttggcaaggacactgtggtagctgtcctgcccaatgggagggaccagagcatatggggttctaagattacaatgatggcatat

SEQ ID NO: 719545 - DNA, 1380 bp, Homo sapiens
gtcccatattgtgctgatttaccccccatgaagggacatctataacaccacccttcctctcacaacaaattcctagatccaaaactatccactgaaatagtaacgatttttctcatttgtcatcctgggaatgggaactattggtttgccaagttgagagatatttataactcaatgaaaaacatcaggttccttgggcgacgtcattacccaacccgagagcttgctctctgagaccagaatgactaagaaattaaataaagataattccttattattctctcttctaaccatagatacatccaatatgaatatttcattaggaaataaagacattgtgttccatgcattgtcagaaggaagaaatttggctgaaatgtttaaacatgaaggctccttcatgcttttcttgaaggatggctaagaacagggttatctgtcaaactcaatgtgttgcttaacagtaattcaggtggcwgccagatgaatgattctcatgctggcagagaatttccgttctcttgcaactttaaactgaaaggtagggcaatagcagatctgctgcccacacatggcttccaagagactgcactaacaatatgcacttgtatacataaatatttaggacacataaaccagttggaaaaacaccgatccttcaccttctttggtagaaccttgaaattcttaattttcaccagtcccttctttaaaatccagattgtatttatgagcttttaaatcatgccccccagatgtgtaagcataaaggctaaatgttgtggtttcaggtaatctatactgcacgtggttgtgacatttatcttccaaagacacagctatcatcatgtcattcttctggctcaaaaggcctcctgatgtcagccatcacttaaacgagctgattacttcctcctaggcattatgcctatatgtgattctctgattccaggtggaagggagtgcccagggctgcagccgctcaagaataagccttaacccaggtgtggacaactgagtgaaggtagggattttgacaatgatccagtgtccttatgctttgacagcaaaaatactttgctgtcataaagtgaaaatacgtaataattagtgacactatttattaattatatctcctaatttactgggttggttttatgatgatgaagccagtttatgtttgtaaaaagcatctgacacatggaaggaactcaatgcatattatgttttatttaaagtcaagttaaagataacatagagggcaaattcaaagaaacacaaataaatgatatcaattcccagcttaaacagtagctgattggaatgttatttagctagagaatggcctgaatatacttttaaaaatgtgaaacggcagca

SEQ ID NO: 719546 - DNA, 1154 bp, Homo sapiens
ttggttgtgacagtgctataattcaagttggtgcagggtacaatgggacaaagaggaagaattaatctggttcatttagacttgggctgtgtagtgggaaaatattttataaaccctgctcatatcttcaacacatgagtagacaaagccagctttaaaaattagaattttttttgtttgaaaggaaaggaaatccgaacttgaagaggctctaatcaaaggcttttcttagagaaaccttctggttacrgccactctgtgagctggggtaacataggcctccccctcactgcagagatgctggataagatagagcagcagcaaccacaatatgcatagccaagctcaaagtgcagagggaaatgaacagtcattctaatgttgtatactcagaaaaatagcaataaatgtggaataaagttattttcatacaaagactgtgtttcctactcatggacccttgctcaatgacctactcatggaccctttactgaccattaaaatttttacatcagtagtaaaggcatggatctcagaatgtaaatgcaaagatttagttaacatttgtgtaaatctgaataagccctgactgcaaaaactaacaataaaaatgtccttttttaaaaaattaaaatgctgacctacaacgagtttgaaagaggtaggagggtgatttgtaattaaagctttctgaagatctcattttctttgggaataaagtagagagataaaattcagactttagttaaataagcatgttttgtataagccgggtgcatactaaaagttccaacttcttctcaagcatagcagataaaggatattatcaaatgttcatcaagggaggagatatgtaggcaaatattatgaccatagagtgggcatggtaaaaaatagcacaaaataggcagtaaaactgaatcaagatatatcagtaattttggttttgttttcgtttttcaagtccagcttatgtgctttaaagaaatgcatataaaacgtagtgattgaaaaagttaaaaataaggggttgaggaagagatattttaggtaagtatgaaccttgtagaattactaaaatttgcaaaatgttctttaagcctaaagcattggaaaaggtaaagacagttattacaaacaactattactgaaaa

SEQ ID NO: 719547 - DNA, 1154 bp, Homo sapiens
ttggttgtgacagtgctataattcaagttggtgcagggtacaatgggacaaagaggaagaattaatctggttcatttagacttgggctgtgtagtgggaaaatattttataaaccctgctcatatcttcaacacatgagtagacaaagccagctttaaaaattagaattttttttgtttgaaaggaaaggaaatccgaacttgaagaggctctaatcaaaggcttttcttagagaaaccttctggttacagccactctgtgagctggggtaacataggcctccccctcactgcagagatgctggataagatagagcagcagcaaccacaatatgcatagccaagctcaaagtgcagagggaaatgaacagtcattctaatgttgtatactcagaaaaatagcaataaatgtggaataaagttattttcatacaaagactgtgtttcctactcatggacccttgctcaatgacctactcatggaccctttactgaccattaaaatttttacatcagtagtaaaggcatggatctcagaatgtaaatgcaaagatttagttaacatttgtgtaaatctgaataagccctgactgcaaaaactaacaataaaaatgtccttttttaaaaaattaaaatgctgacctacaacgagtttgaaagaggtaggagggtgatttgtaattaaagctttctgaagatctcattttctttgggaataaagtagagagataaaawtcagactttagttaaataagcatgttttgtataagccgggtgcatactaaaagttccaacttcttctcaagcatagcagataaaggatattatcaaatgttcatcaagggaggagatatgtaggcaaatattatgaccatagagtgggcatggtaaaaaatagcacaaaataggcagtaaaactgaatcaagatatatcagtaattttggttttgttttcgtttttcaagtccagcttatgtgctttaaagaaatgcatataaaacgtagtgattgaaaaagttaaaaataaggggttgaggaagagatattttaggtaagtatgaaccttgtagaattactaaaatttgcaaaatgttctttaagcctaaagcattggaaaaggtaaagacagttattacaaacaactattactgaaaa

SEQ ID NO: 719548 - DNA, 1154 bp, Homo sapiens
ttggttgtgacagtgctataattcaagttggtgcagggtacaatgggacaaagaggaagaattaatctggttcatttagacttgggctgtgtagtgggaaaatattttataaaccctgctcatatcttcaacacatgagtagacaaagccagctttaaaaattagaattttttttgtttgaaaggaaaggaaatccgaacttgaagaggctctaatcaaaggcttttcttagagaaaccttctggttacagccactctgtgagctggggtaacataggcctccccctcactgcagagatgctggataagatagagcagcagcaaccacaatatgcatagccaagctcaaagtgcagagggaaatgaacagtcattctaatgttgtatactcagaaaaatagcaataaatgtggaataaagttattttcatacaaagactgtgtttcctactcatggacccttgctcaatgacctactcatggaccctttactgaccattaaaatttttacatcagtagtaaaggcatggatctcagaatgtaaatgcaaagatttagttaacatttgtgtaaatctgaataagccctgactgcaaaaactaacaataaaaatgtccttttttaaaaaattaaaatgctgacctacaacgagtttgaaagaggtaggagggtgatttgtaattaaagctttctgaagatctcattttctttgggaataaagtagagagataaaattcagactttagttaaataagcatgttttgtataagccgggtgcatactaaaagttccaacttcttctcaagcatagcagataaaggatattatcaaatgttcatcaagggaggagatatgtaggcaaatattatgaccatagagtgggcatggtaaaaaatagcacaaaataggcagtaaaactgaatcaagatatatcagtaattttggttttgttttcgtttttcaagtccagcttatgtgctttaaagaaatgcatataaaacgtagtgattgmaaaagttaaaaataaggggttgaggaagagatattttaggtaagtatgaaccttgtagaattactaaaatttgcaaaatgttctttaagcctaaagcattggaaaaggtaaagacagttattacaaacaactattactgaaaa

SEQ ID NO: 719549 - DNA, 524 bp, Homo sapiens
  misc_feature 3, 4, 5, 6, 7, 8, 9, 10, 11, 12, 13, 14, 15, 16, 17, 18,19, 20, 21, 22, 23, 24, 25, 26, 27, 28, 29, 30, 31, 32,33, 34, 35, 36, 37, 38, 39, 40, 41, 42, 43, 44, 45, 46,47, 48, 49, 50, 51, 52, 53, 54, 55, 56, 57, 58, 59, 60,61, 62: n = A,T,C or G
  misc_feature 63, 64, 65, 66, 67, 68, 69, 70, 71, 72, 73, 74, 75, 76, 77,78, 79, 80, 81, 82, 83, 84, 85, 86, 87, 88, 89, 90, 91,92, 93, 94, 95, 96, 97, 98, 99, 100, 101, 102: n = A,T,C or G
aannnnnnnnnnnnnnnnnnnnnnnnnnnnnnnnnnnnnnnnnnnnnnnnnnnnnnnnnnnnnnnnnnnnnnnnnnnnnnnnnnnnnnnnnnnnnnnnnnnngcgccaaaagtcatcaggactcccatatgcccagtttctatgcctgactctgaaaagagtggcacagcccaagtcatgcagtctttaatttgggccatcttgtggattttcgtctttatgtaaagtacatggagaatctattgaarggttttgagcaagagaatgatttactctttgaaatcttcacagggactgcattatagagagttagtttcataaaacagaaagaatgtgttcaggaccagtaatagattgggaggatgacaataatggagactgggatgaatagagagatttaggcagtatctatgagctggtaaaatggagaacccttgaagatcaattaactgtaagtagtggcagaataagagaagtaaaagaagaaaataaacatattcttatctaaatgctacaagaaaatt

SEQ ID NO: 719550 - DNA, 524 bp, Homo sapiens
  misc_feature 3, 4, 5, 6, 7, 8, 9, 10, 11, 12, 13, 14, 15, 16, 17, 18,19, 20, 21, 22, 23, 24, 25, 26, 27, 28, 29, 30, 31, 32,33, 34, 35, 36, 37, 38, 39, 40, 41, 42, 43, 44, 45, 46,47, 48, 49, 50, 51, 52, 53, 54, 55, 56, 57, 58, 59, 60,61, 62: n = A,T,C or G
  misc_feature 63, 64, 65, 66, 67, 68, 69, 70, 71, 72, 73, 74, 75, 76, 77,78, 79, 80, 81, 82, 83, 84, 85, 86, 87, 88, 89, 90, 91,92, 93, 94, 95, 96, 97, 98, 99, 100, 101, 102: n = A,T,C or G
aannnnnnnnnnnnnnnnnnnnnnnnnnnnnnnnnnnnnnnnnnnnnnnnnnnnnnnnnnnnnnnnnnnnnnnnnnnnnnnnnnnnnnnnnnnnnnnnnnnngcgccaaaagtcatcaggactcccatatgcccagtttctatgcctgactctgaaaagagtggcacagcccaagtcatgcagtctttaatttgggccatcttgtggattttcgtctttatgtaaagtacatggagaatctattgaaaggttttgagcaagagaatgatttactctttgaaatcttcacagggactgcattatagagagttagtttcataaaacagaaagaatgtgttcaggaccagtaatagattgggaggatgacaataatggagactgggaygaatagagagatttaggcagtatctatgagctggtaaaatggagaacccttgaagatcaattaactgtaagtagtggcagaataagagaagtaaaagaagaaaataaacatattcttatctaaatgctacaagaaaatt

SEQ ID NO: 719551 - DNA, 618 bp, Homo sapiens
tcctcccattgctggcacctgagatccttaccatccctacatccctaacmctgctcgcacctctgcaaatcgtacctttattagacagtctgtttaagaaatcccactggaggggactgtctttttcaggccaggacctcgctgacctagcaccatctttggcttttatctttattcatggagagcgttccattctgctagggggctttgcagggcatgagtcaaggcctgaagcccactgaacacaatgcttagaaatctcaggggtgttcaaagattcatgccttattcatgcaaaggctttccaaaataattaattcttttttaaaattttaatttttttttttttgagatgatggagtttcactctcgtcacccaggttggagtgcagtggcacaatctcggctcactgcaacctctgcctcccaggttcaagcgatcctcctgcctcagcttcctgagtagctgggattacaggtgcccgctgccacgccgggctgatttttatatttttagtagagacggggtttcgccatgttggccaggctggtctcgaactcctgacttcaggtgatctgcccacctcggactcccaaagtgctgctgggattacaggc

SEQ ID NO: 719552 - DNA, 663 bp, Homo sapiens
gtagagacaaggtttcaccacgttgacttcaagcgatccgcctaccccggcctcccaaagtgctgggattacaggcatgagccaccgcgcctggccctcagtatatttttgagagaataaattagttcctatccctttcattgactgaactcttctcatcttcaaagacgtccctccccgactctctgtttcctaggacaaggtcaggtatggttacccactttgagatgtacttttcttttttgtgccatgtccctggagccgagcttggtgctaataatagcagctgaagcattccctgagcaaggttggatgggacgtggcgcgggggggtgaggaaggggcgttcccagccctggctcaggtgtctcggccgtttgttcagtcaggcgggctccttatcctctctgagwctcctcatccttttctacaggatggggataatctcagaacccacctcacagggccatggtggggaccagcagtgcgatggtctgtttatgtgccaacctggctgtgttacagaccccagctgctcaaccaaacactgagacatgtcgctgtggaaggattttgtagctgtgactgacgtctctaatcagttgactgtgctgtatacatttaaggtatacaacatgatgttttgatatatatatatatata

SEQ ID NO: 719553 - DNA, 655 bp, Homo sapiens
gtggcctgagtaaacaggcggaggaaggatgtgcggagcatctgtagaaaggatccccatttcagccggtgcattggctcccgcctgtaatcccagcactttgggaggccaaggtgggcagatcacccaaggttaggagtttgagaccagcctggccaccatggcgaaaccctgtctctaccaaaaatacaaaaattagctgggcgtgctggcaggcacctttagccccagctactcaggaggctgaggcaggagaattgcttgaacccgggaggcagaggttgcggtgagctgagatcgcgccactgcactccagcctgggtgacagagcaagactctgtctcaaaaaagaaagaatgacagggtgcaggsatgggggctatcgaggtaagggaaaagcggggcaaaatcagggagagctcgaatgaaaggcaagggagtttggaatgtatcctatcagccgctgaaatattgtttatttctcaaatatatcaccttctctttgtcccccatagctattgttgcagctcagacttcatcctctttctcctggactgttgcttcctcctcactgcagacccagaggaacctttcgaacacccaaacccgttctcccatggttcaaaaccattccataatttccatgacttccccc

SEQ ID NO: 719554 - DNA, 645 bp, Homo sapiens
agattttaaaggcagttttataaccaggaatgtacaaatgtttaatgattccatttttcctctccatgttgctgctaccttagttagaaataaacatagtctcaatatcacccggttcagaccaaaggatattaactttagataaacgtatcacccaaacattgtcacaatacttttttcccaggtcctcatcttgctcaattcccttagagcataatacataaacaaaattattttactgaagtgaaaaccgaggcaaatgtttaaactctgatgtaaatagagatggctcagtatcagcaacagataatcagtgtcccctgtgtgccaaataatgtccttattacagattccaagctgcaggaaaattagagtctamgtctttcaagaataaattataaacatcgttagaatcagtggtctttagcttacaatgcactgtccataactcaattgattgaaagaaagaacagttccctcttgtacctaggctcttagtctttttttttttttttttttttttttttgacaaaatctaactctgttgccaggctggagtgcagtggcgcaatctcagctccctgcaacctctgcctcccagttcaagaagtgattcccctgcctcagcctcccgagtagctagga

SEQ ID NO: 719555 - DNA, 645 bp, Homo sapiens
agattttaaaggcagttttataaccaggaatgtacaaatgtttaatgattccatttttcctctccatgttgctgctaccttagttagaaataaacatagtctcaatatcacccggttcagaccaaaggatattaactttagataaacgtatcacccaaacattgtcacaatacttttttcccaggtcctcatcttgctcaattcccttagagcataatacataaacaaaattattttactgaagtgaaaaccgaggcaaatgtttaaactctgatgtaaatagagatggctcagtatcagcaacagataatcagtgtcccctgtgtgccaaataatgtccttattacagattccaagctgcaggaaaattagagtctacgtctttcaagaataaattataaacatcgttagaatcagtggtctttagcttacaatgcactgtccataactcarttgattgaaagaaagaacagttccctcttgtacctaggctcttagtctttttttttttttttttttttttttttgacaaaatctaactctgttgccaggctggagtgcagtggcgcaatctcagctccctgcaacctctgcctcccagttcaagaagtgattcccctgcctcagcctcccgagtagctagga

SEQ ID NO: 719556 - DNA, 615 bp, Homo sapiens
gaagtcatttatagtcatttccactggccaaagcaggtcatgttaaacttttcatttgttttgtttttccattttggtgtgtgggtataatccgcatgattatcaatatcccatttccattgatccatacagaaaatgcacagcacctaccactctccacccacgccgtgccaggtggtgagcactgggtcatttcattccacccacactctcaggagtctgtgtgcaagatgtggcctcctggtgtgaggactgccccagccctcctctgtacctgaaagctacccttgccagctggattctggttaagttctgtcaaagacacaaccaggtgcaacattaaaaggcaggaggaagggcaaagcgttgcccccccgcaacaccccggctcgtggctatggggacagcaggttcctaaagcagcagygacgagagtagaaggttccagctgccatcggtggagtgcccagtgacagccgcagggccgtgggctcagaattcctgctcggcggcagcagcagtgaggagagcacctgctctcaggctctgggaactctcaaggcctcattttgcccttcagacctagggacagcggcagctttcttagtctctgat

SEQ ID NO: 719557 - DNA, 1803 bp, Homo sapiens
  misc_feature 868, 869, 870, 871, 872, 873, 874, 875, 876, 877, 878, 879,880, 881, 882, 883, 884, 885, 886, 887, 888, 889, 890, 891,892, 893, 894, 895, 896, 897, 898, 899, 900, 901, 902, 903,904, 905, 906, 907, 908, 909, 910, 911, 912, 913, 914: n = A,T,C or G
  misc_feature 915, 916, 917, 918, 919, 920, 921, 922, 923, 924, 925, 926,927, 928, 929, 930, 931, 932, 933, 934, 935, 936, 937, 938,939, 940, 941, 942, 943, 944, 945, 946, 947, 948, 949, 950,951, 952, 953, 954, 955, 956, 957, 958, 959, 960, 961: n = A,T,C or G
  misc_feature 962, 963, 964, 965, 966, 967: n = A,T,C or G
agcagaagacctagtctgccccaaagcatcttgggaaatgtgtccagtgcagagaaaaaaggaaatgcagccatgttttcctctcacatatggttttggacaggataaaatgagataatttctgcaacacacctacatggtgcctagccataggagcracattaagtggtaattactattattactcacagctggtctgtgtagctccaaagtccatcaatgttctgctatgcatactacctccctaccccaaatgacagtctccaaactttttggataatatatcactataattttttttttttgacacgtagtcttgctctgttaccaggctggaatgcggtggcatgatctcagctcaccgtaacctctgcctcccgggttcaagtgattctcctgcctcagcctcccaagtggctgggactagaggcgcccactaccatgcccggctaatttttctatttttcgtagagacggggtttcaccatgttggccagatggtctcgatctactgaccttgtgatctgcctgcctcggcctcccaaagtgctgggattacaggcgtgagccaccgcgcctggcccatcaccataattttttaaaggtttagcatacagactccaaaataccaaaatatgcatattcatatatttatataatatacaagtactactttacatgttaaaacttattacaagagagatagttaaaagccacacaatgtatgaaataaaatctttaaataatatttattttattaatttctagaacaaaaaatatctgtaagcgatgtgttcaatgtgtttcattatttttataatgttggtttaaggaggcggaggttgcagtgagccaagatcacgccacnnnnnnnnnnnnnnnnnnnnnnnnnnnnnnnnnnnnnnnnnnnnnnnnnnnnnnnnnnnnnnnnnnnnnnnnnnnnnnnnnnnnnnnnnnnnnnnnnnnnatgtaaccagctggagttctagaaaacctggcatgcctttgacctttcccatagtttttcacaggactcctgcctttaatgggaaagttacccattgcactgacctgatgaggatgtatcttgtcttcccaactcggcaggatgcagcccaatggactgcttggaatcaaaatgttgaaatcaacgtttcccattccagccaaggcaatgtacaatcaacaaaacacagacactagtcacatcactcagtgcctaagtttgacccggcaagattccaacttgcgtctgttggcctccagagcccttgctctactcaaaatggggagaaatgagtagatcttgctgtggtggtctctgggcaaaatggggaagtggatggtcacctgagttaggtcacctgctagaaattccttctgaaatccttttcataaacataaacatacataactagacaaagacaaacaaaaggccctccaaaaccaagttccaactttcagaaatcaagagtatctctcccaagcagtgccctttattctccttccaatttagggtaaatcccctcaaagaaggcccttcctgttgccagggagggtcaacgaaacctcagaaaggtcaaaagacctctgaggaggccagcaaactaggaaagggggaagaggtgctggctgcacagagaaaacttaccaaagatgtctttcaaaaccagaaactatttctttgctgcaagctatttatgcactgaaggtcaccactgtcccattgacaagcaaggcactggagacagcccccagttcaatggaaccaagcaactgcttggacttgtctccaggtctgtc

SEQ ID NO: 719558 - DNA, 1803 bp, Homo sapiens
  misc_feature 868, 869, 870, 871, 872, 873, 874, 875, 876, 877, 878, 879,880, 881, 882, 883, 884, 885, 886, 887, 888, 889, 890, 891,892, 893, 894, 895, 896, 897, 898, 899, 900, 901, 902, 903,904, 905, 906, 907, 908, 909, 910, 911, 912, 913, 914: n = A,T,C or G
  misc_feature 915, 916, 917, 918, 919, 920, 921, 922, 923, 924, 925, 926,927, 928, 929, 930, 931, 932, 933, 934, 935, 936, 937, 938,939, 940, 941, 942, 943, 944, 945, 946, 947, 948, 949, 950,951, 952, 953, 954, 955, 956, 957, 958, 959, 960, 961: n = A,T,C or G
  misc_feature 962, 963, 964, 965, 966, 967: n = A,T,C or G
agcagaagacctagtctgccccaaagcatcttgggaaatgtgtccagtgcagagaaaaaaggaaatgcagccatgttttcctctcacatatggttttggacaggataaaatgagataatttctgcaacacacctacatggtgcctagccataggagcaacattaagtggtaattactattattactcacagctggtctgtgtagctccaaagtccatcaatgttctgctatgcatactacctccctaccccaaatgacagtctccaaactttttggataatatatcactataattttttttttttgacaygtagtcttgctctgttaccaggctggaatgcggtggcatgatctcagctcaccgtaacctctgcctcccgggttcaagtgattctcctgcctcagcctcccaagtggctgggactagaggcgcccactaccatgcccggctaatttttctatttttcgtagagacggggtttcaccatgttggccagatggtctcgatctactgaccttgtgatctgcctgcctcggcctcccaaagtgctgggattacaggcgtgagccaccgcgcctggcccatcaccataattttttaaaggtttagcatacagactccaaaataccaaaatatgcatattcatatatttatataatatacaagtactactttacatgttaaaacttattacaagagagatagttaaaagccacacaatgtatgaaataaaatctttaaataatatttattttattaatttctagaacaaaaaatatctgtaagcgatgtgttcaatgtgtttcattatttttataatgttggtttaaggaggcggaggttgcagtgagccaagatcacgccacnnnnnnnnnnnnnnnnnnnnnnnnnnnnnnnnnnnnnnnnnnnnnnnnnnnnnnnnnnnnnnnnnnnnnnnnnnnnnnnnnnnnnnnnnnnnnnnnnnnnatgtaaccagctggagttctagaaaacctggcatgcctttgacctttcccatagtttttcacaggactcctgcctttaatgggaaagttacccattgcactgacctgatgaggatgtatcttgtcttcccaactcggcaggatgcagcccaatggactgcttggaatcaaaatgttgaaatcaacgtttcccattccagccaaggcaatgtacaatcaacaaaacacagacactagtcacatcactcagtgcctaagtttgacccggcaagattccaacttgcgtctgttggcctccagagcccttgctctactcaaaatggggagaaatgagtagatcttgctgtggtggtctctgggcaaaatggggaagtggatggtcacctgagttaggtcacctgctagaaattccttctgaaatccttttcataaacataaacatacataactagacaaagacaaacaaaaggccctccaaaaccaagttccaactttcagaaatcaagagtatctctcccaagcagtgccctttattctccttccaatttagggtaaatcccctcaaagaaggcccttcctgttgccagggagggtcaacgaaacctcagaaaggtcaaaagacctctgaggaggccagcaaactaggaaagggggaagaggtgctggctgcacagagaaaacttaccaaagatgtctttcaaaaccagaaactatttctttgctgcaagctatttatgcactgaaggtcaccactgtcccattgacaagcaaggcactggagacagcccccagttcaatggaaccaagcaactgcttggacttgtctccaggtctgtc

SEQ ID NO: 719559 - DNA, 671 bp, Homo sapiens
gggtgatgccagctgccttgaactacaggtctgaaggcacagctgttgctacttgatctacgtctcccttaactaagtctcaggtttgtaatcttatcacacagggaacctagggttccatatgacaggactgaaaatccctagctctgtcacttactaaatagtcatgtctgccttttctaaccttcctgaacttcagttttactccttataaaatgagaataaagacaacccaaacttcaaagggctgtttcaaggattaagtggaagtcatgtatatgcacgggttttgtaaactttaaagagctagaaaaacatttattttaatggtgtctcaacttgagtctgcactgggctgcagccatgcctgggtgtgtttgatgacctggtctgtggggcttctgggtgtcactccgtgtgaggatgaggaagtggtttggctcacatgccagaaaaagacgcaaagacggctgggcagcatgtgggaagcttcagatatctatgcctaacctggctctgtggacggaagtcagaactcagcaaagaggctgggcgtggtggctcatgcccgtaatcccagcactttgggaggccaaggggggtggatcatctgaggtcaagagtttgatactagcttggccaacatggcgaaaccccgtctctacyaaaaa

SEQ ID NO: 719560 - DNA, 574 bp, Homo sapiens
tttaaacccaacaccccaataggacaggttcttgcagctggctgggaaaattgtccctaggtttcttcctttcttccctaattatcccagagaaatttcaataaaaatgtagaacaaggaaaattccaggccttacacacagttaaataatgagtgactttatagaggaatgaatgaatgaaggcagagmatgacggtcgataaagtgcctggaattgtgcctgacacatagtaaacactcaatcactatttcccaaatggttgaataaaggaataagaatatcaaagtatatggaagggaagaatttcagtgtgagatgcaaatattttaggatagcaatttccctacttaaagctcacagataaagtttatggtcctgttgaaatttgagttctttttttttttttttttgagatggagtctcgctctgtcgcccaggctggagggcagtggcacgatcttggctcactgcaacctccgcctcccaggtttaagcaattctcctgccttagtctcctgagtagttgggattacaagtgtgcgccactacacccagataatttttgtattttt

SEQ ID NO: 719561 - DNA, 629 bp, Homo sapiens
tgctcatactccttcccatatccttgcccaaaggctgccaatttacaacctacctactaaattctactactacttacccaaatatatatgtatgtatgtatgtgtgtgtatatatatgtatacacatatgtatatatgtatatatatacacacacataaatatatatatatataaaaatgtatatatatatatatatttttttttgagatggagtctcactctgttgcccaggctggagtgcagcggtgcgatcttggctcattgcaacctctgcctcctgggttcaagcaattctcctgccttagcctcctgagtagctggtactacaggcataagccaccacacccggcaaattattgtatttttagtagaggcagggttttaccatgttggccaggatggcgcctttttttaaaagatcaacaaaattgatagaccgctagcaagactaatgaagaaaagagagaagaatcaaatagatgcaataaraaatgataaaggggatatcaccaccgatcccacagaaatacaaactacaatcagagaatactataaacacctctatgcaaataaactagaaaatctagaagaaatggataaattcctggacacatacaccctcccaaga

SEQ ID NO: 719562 - DNA, 841 bp, Homo sapiens
cacccagtgcttggcacttagcggagacattcagttaaagaataaatgaataaaaatgaatgaatgaataccttgtataaaaacccattattctggctctttgttaatgagtctcagcctgctgagaatcacaattacatttccacgtagcctaatccagcttcctaaaggatttcttaaaaaaaaaaaaaaatactcaacaggagtccttttccctctagtcacctgccatctcaataagggcttataaatgcactggaacagcaacaggactctcatacacaaacctcaggaccataaccttgcagagccccccagggatgccagtgccttgattcactgggaagtacccagcaaaaatccaatttttcaaggctacccttctgtagcctccaagaaggcacatccaagcttactagatagcaagaagcatttttagatctcttgtctgcactgttgtttttttgtttgtttgtttgtttttttgagatagactctcgctctgtcacccaggctggagtgcagtggcatgatctcggctcactgcaacctccgccttccgggttcaagcaattctcctgcctcagtctcctgagtagctgggattacaggcttgcacaaccatgcttggctaatttttgtattcttgggagagacgggttttcaccatgttggccaggctggtcacgaactcctgacctcaagtgatctgcccayctcagcctcccaaagtgctgggattataggcatgagccaccgcacccgccattgtctgcactttttgaaaagggaattgagcctcactcatcttatcccttttcttctaattgtttcagaaagt

SEQ ID NO: 719563 - DNA, 621 bp, Homo sapiens
ggcgggcggatcacgaggtcaggagatcgagaccatcctggctaacacagtgaaaccccgtctctactaaaaatacaaaaaattagctgggagtggtggtgggcacctgtagtcccagctaacttgggaggctgaggcaagagaatggcgtgaacctgggaggtggagcttgcagtgagccaagatcacgccactgcactccagcttgggtgacacagcgagactccatctcaaaaaaaaaaaaaaaaaaaaaagaatctctgtgatgcattcttttaaaartttagttccaggaaaaaagacagttttgccagataaaatggaattgcctcctctaatgagaaaaggggatttgcataatctgtaaagattctcttattaattggaagctcaatttactatattaaatttaatatagtactcaataactaatacattagtattttttatagtgttatcctgccatctctatatgatttttattttttacatttttgtttttttgactatatgaggtttaaagccttttgaaaagtagatggatgtctatgataaatttgggatattgacactaaatggtataattgctagagatttaaattccaatctgtactttcatcc

SEQ ID NO: 719564 - DNA, 590 bp, Homo sapiens
ttttcaaaagaggctcaagatctagacacaaatcacagagctttaaaaaagcagagattttagggattaactaatctaaatctcccatttcaggaataaagaatttcaggcccaagaagttaaataacctgctgaagactcagtgttctttacacttcattctgaaatgcctttttgtaggcttatcttttatataaagtcagaaatgtctctagacatatatctttatgtcttggactgttgagatccgccaaaaagaactgggtattatatttcaacttatatctgagtgacaataaacaaaaaatgattactaactatgcagtaagtctcagagatgacatggatcagaatgggcaatttattttgggaatggacaagggatggtgtcaaagcttcaatttgtcttgatttctatttatraagtatacagactgagctaaatagacttcatattcttaaatcactattattaagcatagaaagcattttcttctttttttttttggtcagggtcaatagagattacatttaattattaattaaaatggctacaattttagaaatatttactatatttaatttttaca

SEQ ID NO: 719565 - DNA, 847 bp, Homo sapiens
tttgtctgaagagataaaagagaaaaatacacagataaatcaaaatcaaataggataaatagaaaaaagttagctacatatctgactgtgaaagtgtagatgatgaagagaacacctcagctaggtaaaaacaatttccttcaaagaaagattaccacattgattaatttatcctcaacaccattggaaattacaagatagtaaaatgatatcttaaatacattgagtgaaagtgaatgttaacctatrgttttaagtcagggaaattcatttgcagaaaacaaaagacattatatgccactatcacttcctcactgaagggcactataaaagataaacattagaagaaattgacctcaaacagcaaactcgtattacaagaaagaataaagaatatggaacactgtgactatgtgagtgataaggtttggatctgtgtgccttcacaaatctcatcttgaattgtactcccataattcccctgtattgttgtggggggaactggtgggagataattaaataatgggggcagtttctcccatactgttctcatggtagtaaataagtcttaggagatttgatggttttgttagtggaaacccctttcatttgattctcattatctctcttgctgctgccttgtaaaaagtaccttttgccttctgccatgattgtgagacctcccaagccatgtggaactgtaagtccatgaaacctgtttcttttgtaaattgcccggactttggttatctttatcagcagcctgaaaacaggctaaacagaaaattgataccaggaggggagtgctgccaagaagatacccgaaaatgtggaagaaacttctgaa

SEQ ID NO: 719566 - DNA, 616 bp, Homo sapiens
gctggagtgtagtggttcactgcaacctctggctcctgggtgcaagcgattctcctacctcagcttccgagtagctgggactacaggtgcccaccaccaygcccagctaatttttgtatttttaatagagacaggatttcatcatgttggctaagctggtctcgaactcctgacctcaggtgatctaccttcctcagcctccataagtgctgggattacaggcatgagccaccaagcctggcagaattccagtttttaaagacatatgaaccagataaaatctggccatagtgaaatattttctttgctgttgaaaggaattcttttatgacagtggaagaaagttgagaaggaaacagaaaatgacagagttcaggtaataaccagagttagagctaccatcccttgaaaaaattcaaggccttttcatcagagggcacaaacagaggaagattcagaggatttatgttcagaatatcttggtaaaagtcttgcattactacatatttgattcaggttgattcacttggcagagaaccaaaggagacttggtaaggactagaattattgaaacaaataatactcaaatttgatatttaccattaatgtcccaaac

SEQ ID NO: 719567 - DNA, 612 bp, Homo sapiens
agacattgatgagctgtatgtgaacagacaagtagctcttactacaaataatttatccccatgtgtgccagttttcataatggtgtttatatgtgtttcacaatacagcggacactcacaaaaccctattagcattgctaccaagttgtctttgtaaagttaagtagyggaaaggagggaaggtagttttaagaaatgtattaagtgctttataatctgccaggcactattcttattgttatatatgtattaactcatttagccatcaaaacaaaaccccatggaataagtgctattattatccccatttaaaaaatctggggataattgcaaagggaatattataactggcccagtttcaaggccagcaagccctagaaccagaattcaaaatatgttatctggctccagagccgattcacataaccactagcctgtagtgtctcccacaaaacatataactagcattgaatctaccctctcacaaaacaaagcccaagcttggactctgacacactccttcctcttagaaaatatggagaggagtagggcatagaagaggtcatgtggtcaaaattgcctcctttcctctaattctgtttatagtaaatg

SEQ ID NO: 719568 - DNA, 1200 bp, Homo sapiens
  misc_feature 895, 896, 897, 898, 899, 900, 901, 902, 903, 904, 905, 906,907, 908, 909, 910, 911, 912, 913, 914, 915, 916, 917, 918,919, 920, 921, 922, 923, 924, 925, 926, 927, 928, 929, 930,931, 932, 933, 934, 935, 936, 937, 938, 939, 940, 941: n = A,T,C or G
  misc_feature 942, 943, 944, 945, 946, 947, 948, 949, 950, 951, 952, 953,954, 955, 956, 957, 958, 959, 960, 961, 962, 963, 964, 965,966, 967, 968, 969, 970, 971, 972, 973, 974, 975, 976, 977,978, 979, 980, 981, 982, 983, 984, 985, 986, 987, 988: n = A,T,C or G
  misc_feature 989, 990, 991, 992, 993, 994: n = A,T,C or G
cagaataacaagtaaacaagatagtttcacatactgagttttgctctgaagaaacaaataagatacatactggacctagagaatgactggtggctatttttgactgggtggtcagggtgaacctctgaggagatagcttttgagctgagatcttcaaattctgaggggtaggaggggagaaatatttgattattattttcccttcacagacaagaggcagcattacttggcagaatctcgctaggcagcaaagtgtgatagaataggccctggagtttgggcctggtttggctattaattagctttgtgatctttgatagattccttactcttactgtctttgatagacatgtactttagcacttaaagtttttactgctgggaagatgtccaaggcgctaatagagtataaaggagagaagtataccttgtagaccaggcgttaacctctcagggcaacttagaggcgctcttctttcctggagggggaaaaaaggaaaaagactatttgtttcttggtgggaaaatgaccctgaaagaaagttgactctttatttttatttwtttttttttttgagacggagttttgctcttgtcgtccaggctggagtgcaatggcgcgatcttggctcgctgtaacctctgcctcctgggttcgagagattctcctgtctcagcttcctgagtagctgggattacaggcacccgccactacttttagtagagatggggtttcaccatgttggccacgctggtcttgaactcctgatctcaggtgatcagcccacctcagcctcccaaagtgctgggattacaggcgtgagccaccgcccccagctgactcttttgtaataaagagctggaacaaattgatggttctttatgactagatgtnnnnnnnnnnnnnnnnnnnnnnnnnnnnnnnnnnnnnnnnnnnnnnnnnnnnnnnnnnnnnnnnnnnnnnnnnnnnnnnnnnnnnnnnnnnnnnnnnnnncagacccctgtgcagtttgtagcgtgctcacatttgccaagaaagaagtgagctcagcgaggttaagcagtgcctgtgagtcacatggctgcaagtagtggcctggactggactgcagagcccatgctccccaccgctttccatgggcaactctaggccatcattctccacccctcagacccaaagctgccttttcataatgcttg

SEQ ID NO: 719569 - DNA, 613 bp, Homo sapiens
ctgtaggcgtgtgccaccacgccagctaatttttgtatttttagtagagatgggggtttaccatgttggtcaggctggtcttgaactcctaagctcaagtgatccgcccaccttggccttccaaagtgctgagattacaggtgagtcaccgcacctggcctgaatgttcttaatgtcactgaactgtacatataaaaatggttaaaatgggcagttgtatgttatggcactggagatataaaaaggaatttgatctgatacctgccctcaaggagtagtttactttagtagtagtgcatgaccactggttttcaaggaaatagaggctcaagtgrtaaggaaatgctggtagcttataaaagttttgtaatgtgataaaaagataagttctgggaaagtagtcattatgagttcttgacagttcagtctgatctactggaccgggataactcagatgggaaagttacttttccccaacctctctgcacagcccgagagcatgagtttaaaaaccattggtctaggtagaaacgttcaggtgcatcagttggcatgtttgattcctctctgtgttgtacattgagaccttgaggcacagaatgatagggttatt

SEQ ID NO: 719570 - DNA, 397 bp, Homo sapiens
ttacatatgatatttattgggttgaaaagtataatcatggctaaactggattaatttacttatctgttcctcagaaaaattgtaagattaatccartaggctttgattattcaatcttattataaattgctttatagtactactaaaaataagacaattcaacacttacatagttggtgtctaacaatgggagacataataaaatttcagagaaatgagatgacacttaatattttgctaaaatgcaatcatacaattttaattaaaatctgttttttcatgttcccatacaatagataatgacaaggatataaggatatgagggtcatttctaacaagtattattttaagtgataatagcgtgaaaattcagaactacaactaaaaaaaaaggaaa

SEQ ID NO: 719571 - DNA, 950 bp, Homo sapiens
  misc_feature 913: n = A,T,C or G
tggattgcaaaattgtatatcttttggggggtgggagtagaggaggcttatgaatccataaagtgtctccactcaaaagtgagttagttgcataaaacaattaatttaattttaaaaaggtgtaaaaattatttctaaaatatactttgaatgtcctttaaattttttttttcaggagacccttttttcttaggtatgaagtttaagtttcaattcacagagaaagctagattcacttctctagttcacgttaggaaaaataataatgctgtctttgagttactccaaattacctgctgaaactttgaataagtagaaatgagtatcttatacatctgataagcacagatttcttcataattgtttacccataaatttcttttaataaaattaacaagttgtttaaaaaactctctttggagtaaaattgatatttaggaaaaaattacactttctagttgttggtactaatcattgataattcattttcttctarattactccattttgaaacatatagtcttcttcctcattattgtttggtataatcttgacaatattacttaccacatttataaaatgtactattactgtgtctttatatattagtgaactggtctggatgaataataagaaattctattactgtaaactcaagtatagtcatttaattttaatattttcaataagctagacttgatctatgtattaacatgcttggcgttatatgcaaaaatggtaagaaagcaagcattaattatcttaaaatagtattttggtgcactttgctgcataatttattcaattttccataattttctcctacaatttagagtgtattataattatttaagaagtgtcatgtctgaaaaaacagtatttcttctgtgtatatacattacagggctgacgnttcagacatcagaaatataacatactaaagtcaggaa

SEQ ID NO: 719572 - DNA, 1267 bp, Homo sapiens
taaccaaatttggcttacagaagaatgtaattttcattcttggctctgtctataattatgtcatcttcaccaagtcaaatcttctctgaatctctgtttcctcatttaattaaaagatttgaccacataatttttaagatctatccagttttttttcttgagacaggatctcactccacccaggctggagtgcaatggtgatacaaggttcactgaagttcagtttctggactcagatgaccctcctacctcagcctcccaggtaactgggactacaggcatgcatcaccacatccagctagttttttatagagatgaagtttcgccatgttgcttaggctggtcttgagctcctgagcccaagctgtctgctcactttggcctcccaaagtgctgggattacaggtgtgagccatacccagcctccatctgatgtttaaattgctttttaaaaaaatttcacctcttcattgatgatttaaaaatattttcagtccacagtcagtaagtctatgaggaaactacagtaaaatgttctaaaattactctgttttccttataatatattagattcttgccatattttgtcggatgttcataatacattaaccagactggagatcaaatgttcatcatcaatgggatgaatgaatcagttgtgatatagtcataccaaagaatactaatagctatgcaaaacaatatggctgaatctcacagtgatgttcaattaaaaaaaatagggcacaaaagaatacttacagctatattccttttgtgtaaatttaaaaaccaggaagaactaaactctattatttagggatgcacatataggttataaaactacacacccacacccacacccctccatatacatatatattatacacacacatatatacatacatatatgtgtatgtatatacatatagatatgtatatatacacttatatgtgtatatgcatacacgtgtgtgtgtatgtatgtgtgtctgtgtgtatttagggaagctattattctaaaggtcagaatagtgtttatctccaaggttcaaggaagggagggtccccaagtagcttttaaggtactagcaatgttctataggcagtgattaaatgagacttttgyattacttattaagtatatggttcataaatttttctgtgtatgagtattataacaaaaaatactaatgccagaacctataagtgtaggaaattgtcttctattaagacttttgattttgtctgtatggtatctgtgagt

SEQ ID NO: 719573 - DNA, 1267 bp, Homo sapiens
taaccaaatttggcttacagaagaatgtaattttcattcttggctctgtctataattatgtcatcttcaccaagtcaaatcttctctgaatctctgtttcctcatttaattaaaagatttgaccacataatttttaagatctatccagttttttttcttgagacaggatctcactccacccaggctggagtgcaatggtgatacaaggttcactgaagttcagtttctggactcagatgaccctcctacctcagcctcccaggtaactgggactacaggcatgcatcaccacatccagctagttttttatagagatgaagtttcgccatgttgcttaggctggtcttgagctcctgagcccaagctgtctgctcactttggcctcccaaagtgctgggattacaggtgtgagccatacccagcctccatctgatgtttaaattgctttttaaaaaaatttcacctcttcattgatgatttaaaaatattttcagtccacagtcagtaagtctatgaggaaactacagtaaaatgttctaaaattactctgttttccttataatatattagattcttgccatattttgtcggatgttcataatacattaaccagactggagatcaaatgttcatcatcaatgggatgaatgaatcagttgtgatatagtcataccaaagaatactaatagctatgcaaaacaatatggctgaatctcacagtgatgttcaattaaaaaaaatagggcacaaaagaatacttacagctatattccttttgtgtaaatttaaaaaccaggaagaactaaactctattatttagggatgcacatataggttataaaactacacacccacacccacacccctccatatacatatatattatacacacacatatatacatacatatatgtgtatgtatatacatatagatatgtatatatacacttatatgtgtatatgcatacacgtgtgtgtgtatgtatgtgtgtctgtgtgtatttagggaagctattattctaaaggtcagaatagtgtttatctccaaggttcaaggaagggagggtccccaagtagcttttaaggtactagcaatgttctataggcagtgattaaatgagacttttgtattacttattaagtatatggttcataaatttttctgtgtatgagtattataayaaaaaatactaatgccagaacctataagtgtaggaaattgtcttctattaagacttttgattttgtctgtatggtatctgtgagt

SEQ ID NO: 719574 - DNA, 806 bp, Homo sapiens
taaacaaaattaacacatattttgtatatgtattayatcttgtattcttacaataaagtaagctagagaaaagaaagtcataaggaagagaaaatacatttactattcattaagtggaagtggatcattatagaggtcttcatcttcattgtcttcatgttgagtaggctgaggaagaggagaataaagaggggttggtcttgctgtctcaggggtggcagaggcagaagaaaatccacaaataagtggatcccatgcagttcgaaactgtgttactcaagcatcaactgtataaggcacttgtaaaagcaagtacatagtcaaattcagaatactttaacactataatggtggtatgtaaatcatttatatccttagtatgaaagttaaaagacaagatgtaaattatgacataaaaaatataaattagggggtaaagtaaacatgatgagttttttttacacagtcaaagttaacttgtgatcgacaattaggtgagggtgggagccaagatgaccgaataggaacagctccggtctacagctcccagcgtgagcgatgcagaagacaggtgatttctgcatttccatttgaggtaccaggttcaactcactagggagtgccagagagtgggcgcaggacagtgggtgcagcctgtgtgcgagccgaagcagggcgcagcattgcctcactcgggaagtgcaaggggtcagggagttccctttcctagtcaaagaaaggggtgacagacagcacctggaaaatagggtcactcccaccccaatactgcacttttccaacaggct

SEQ ID NO: 719575 - DNA, 806 bp, Homo sapiens
taaacaaaattaacacatattttgtatatgtattatatcttgtattcttacaataaagtaagctagagaaaagaaagtcataaggaagagaaaatacatttactattcattaagtggaagtggatcattatagaggtcttcatcttcattgtcttcatgttgagtaggctgaggaagaggagaataaagaggggttggtcttgctgtctcaggggtggcagaggcagaagaaaatccacaaataagtggatcccatgcagttcraaactgtgttactcaagcatcaactgtataaggcacttgtaaaagcaagtacatagtcaaattcagaatactttaacactataatggtggtatgtaaatcatttatatccttagtatgaaagttaaaagacaagatgtaaattatgacataaaaaatataaattagggggtaaagtaaacatgatgagttttttttacacagtcaaagttaacttgtgatcgacaattaggtgagggtgggagccaagatgaccgaataggaacagctccggtctacagctcccagcgtgagcgatgcagaagacaggtgatttctgcatttccatttgaggtaccaggttcaactcactagggagtgccagagagtgggcgcaggacagtgggtgcagcctgtgtgcgagccgaagcagggcgcagcattgcctcactcgggaagtgcaaggggtcagggagttccctttcctagtcaaagaaaggggtgacagacagcacctggaaaatagggtcactcccaccccaatactgcacttttccaacaggct

SEQ ID NO: 719576 - DNA, 806 bp, Homo sapiens
taaacaaaattaacacatattttgtatatgtattatatcttgtattcttacaataaagtaagctagagaaaagaaagtcataaggaagagaaaatacatttactattcattaagtggaagtggatcattatagaggtcttcatcttcattgtcttcatgttgagtaggctgaggaagaggagaataaagaggggttggtcttgctgtctcaggggtggcagaggcagaagaaaatccacaaataagtggatcccatgcagttcgaaactgtgttactcaagcatcaactgtataaggcacttgtaaaagcaagtacatagtcaaattcagaatactttaacactataatggtggtatgtaaatcatttatatccttagtatgaaagttaaaagacaagatgtaaattatgacataaaaaatataaattagggggtaaagtaaacatgatgagttttttttacacagtcaaagttaacttgtgatcgacaattaggtgagggtgggagccaagatgrccgaataggaacagctccggtctacagctcccagcgtgagcgatgcagaagacaggtgatttctgcatttccatttgaggtaccaggttcaactcactagggagtgccagagagtgggcgcaggacagtgggtgcagcctgtgtgcgagccgaagcagggcgcagcattgcctcactcgggaagtgcaaggggtcagggagttccctttcctagtcaaagaaaggggtgacagacagcacctggaaaatagggtcactcccaccccaatactgcacttttccaacaggct

SEQ ID NO: 719577 - DNA, 806 bp, Homo sapiens
taaacaaaattaacacatattttgtatatgtattatatcttgtattcttacaataaagtaagctagagaaaagaaagtcataaggaagagaaaatacatttactattcattaagtggaagtggatcattatagaggtcttcatcttcattgtcttcatgttgagtaggctgaggaagaggagaataaagaggggttggtcttgctgtctcaggggtggcagaggcagaagaaaatccacaaataagtggatcccatgcagttcgaaactgtgttactcaagcatcaactgtataaggcacttgtaaaagcaagtacatagtcaaattcagaatactttaacactataatggtggtatgtaaatcatttatatccttagtatgaaagttaaaagacaagatgtaaattatgacataaaaaatataaattagggggtaaagtaaacatgatgagttttttttacacagtcaaagttaacttgtgatcgacaattaggtgagggtgggagccaagatgaccgaataggaacagctccggtctacagctcccagcgtgagcgatgcagaagacaggtgatttctgcatttccatttgaggtaccaggttcaactcactagggagtgccagagagygggcgcaggacagtgggtgcagcctgtgtgcgagccgaagcagggcgcagcattgcctcactcgggaagtgcaaggggtcagggagttccctttcctagtcaaagaaaggggtgacagacagcacctggaaaatagggtcactcccaccccaatactgcacttttccaacaggct

SEQ ID NO: 719578 - DNA, 1452 bp, Homo sapiens
ttaccttggtcccgtagctccaaagcctatgcattttccactttgacagctttaaaaactttcattaggtatcctgaatgtggagaggtttcataaacatcccataataggaactcttatatccctctctctaagcaatcctttggctttccagaacaaaaccatttcatgaaaggggataacatgcactaaagtcactcagagaaagccactcacgatctcacctggcccaggcagacagtgctttcagtatatttaggtcagagggaaaaagacacggagtttaactcatgtcttattctatgcattggccatgttggactgaacagtcagggaactgatggccaaaaggaaaactcagcattagagacatgattgcttcagcaactacatctagtcccaggggctcctcagtccatgaatgagtcattagaagtaacaacgacaaaaaaaaaaaaaaaaaaaagaatcatcccttatcacaccatggctatatgaagaaaattaccaacatgaaaaaagaagggccagtgtttggctttcttatgactgagtaggagtaactatgtagctgtcctaaatgaattcggtcattaatatagagaaaattttttcatgtaaaaatgtcttcatttgctagctataaatactatctctataaatactatctcaataaggaatgacataatctgaaaccaggttctccttctctataattatattcaaattgcccaaagtccatctgtactgtcaaatgaaacagaaatggggccagaattccagtgactcaggcaaaacttcctggcaaacttgtggagactttttttctacaccagaattgttccctttgctgcaactgccttcattttcctcttagttctagaggtgaaggctatttagaaacagaataaagagctaaaattttcaagctttcaaggcagggtaaagaggggccaggggaatgtgtatgtgtggtcacatgtatgtgggcacatgtgtgttaagtttgatgcataggttgggggaagygggtacggtttgaaagaggataccaaaagcaaacttaatcttaatcctccccctcccaaaaacatggctcaggaatcaatcaggcaagaactagaaaattggtctgggggtcatgaaatctaatctttagtccaccagcaataagactttcaaaaagtcaattgctcctgactcttgtcttctcttttcataaaattttcaacatccacacaggaatattgggaataaaattaaataacagctacgaaaaggatgcgagaatacttttattattattattattattattattataaagttttagggtacataagttagggtaataaactttagggtaaagttttagggtacatgtgcacaacgtgcaggtttgttacatacgtatacatgtgccatgttggtgtgctgcacccattaactcat

SEQ ID NO: 719579 - DNA, 1452 bp, Homo sapiens
ttaccttggtcccgtagctccaaagcctatgcattttccactttgacagctttaaaaactttcattaggtatcctgaatgtggagaggtttcataaacatcccataataggaactcttatatccctctctctaagcaatcctttggctttccagaacaaaaccatttcatgaaaggggataacatgcactaaagtcactcagagaaagccactcacgatctcacctggcccaggcagacagtgctttcagtatatttaggtcagagggaaaaagacacggagtttaactcatgtcttattctatgcattggccatgttggactgaacagtcagggaactgatggccaaaaggaaaactcagcattagagacatgattgcttcagcaactacatctagtcccaggggctcctcagtccatgaatgagtcattagaagtaacaacgacaaaaaaaaaaaaaaaaaaaagaatcatcccttatcacaccatggctatatgaagaaaattaccaacatgaaaaaagaagggccagtgtttggctttcttatgactgagtaggagtaactatgtagctgtcctaaatgaattcggtcattaatatagagaaaattttttcatgtaaaaatgtcttcatttgctagctataaatactatctctataaatactatctcaataaggaatgacataatctgaaaccaggttctccttctctataattatattcaaattgcccaaagtccatctgtactgtcaaatgaaacagaaatggggccagaattccagtgactcaggcaaaacttcctggcaaacttgtggagactttttttctacaccagaattgttccctttgctgcaactgccttcattttcctcttagttctagaggtgaaggctatttagaaacagaataaagagctaaaattttcaagctttcaaggcagggtaaagaggggccaggggaatgtgtatgtgtggtcacatgtatgtgggcacatgtgtgttaagtttgatgcataggttgggggaagcgggtacggtttgaaagaggataccaaaagcaaacttaatcttaatcctccccctcccaaaaacatggctcaggaatcaatcaggcaagaactagaaaattggtctgggggtcatgaaatctaatctttagtccaccagcaataagactttcaaaaagtcaattgctcctgactcttgtcttctcttttcataaaattttcaacatccacacaggaatattgggaataaaattaaataacagctacgaaaaggatgcgagaatacttttattattattattattattattattataaagttttagggtacataagttrgggtaataaactttagggtaaagttttagggtacatgtgcacaacgtgcaggtttgttacatacgtatacatgtgccatgttggtgtgctgcacccattaactcat

SEQ ID NO: 719580 - DNA, 591 bp, Homo sapiens
aaagggagagatccagattgccagaaaagttggagcaaaaccaagagagagttttcacagaagccagggtaagacaaaattttgagaaagataattgtcagcaaatacacaaggattgaaaagcttctttyggtatatctaatagaaatcttatggtgagaacagcccacgtgggtgctgagggtggatgccagcttgccctgggttcaacctgagtggtgaggaggttgaggccaagtgtgaatttgtatttccagaaaatggtctgtgcctggagggagcaaaatactttatattcacgtgatagagttccttaagatagggaatccagagcagagctggagggcttagccttaaaatggaaaagtctcaccctttgctctaagaaaatagaaaggtagctataggtataggaataataataggtgtgggagaaagattgtgagggagttgatatttgatagctttgattatctgggtcaaataaaagctggggtaccttttgaaattgagtatgaaaagttggaacagctataatagcacattataaaaggagctaatcaaaaaccaaccagtcaaccaattaaccaa

SEQ ID NO: 719581 - DNA, 572 bp, Homo sapiens
ttctaaataattttccaagaaaaagaagcctaggaggtggtggtgataagaagggagcttttaacagaatagcgagacaaagaaaatgctcttccccaaaagagacctgtatgcaataaacagaatcaaaacactcattttgactgaaaagcttcccttttcagttcataactggattatctccaaaaatcacattctttaccataaacacgcttacataacatttcctcatgaaaaatttctatactaacatttagactaagacctcacctataaaatgaccctttagtaaaaaacatttaatttctcactaggtagcttagcttaatttaacctttagccttcattttccatgtatataatttcttatttacattttcttttttttttggagacggagtcttgctctgtcacccaggctggagtgcagtggtgccatcttggcttactgcaacctccacctmccaggttcaagcaattctcctgcctcagcctcccgagtagctggggctacaggtgcccgccaccacccccggctaatttttgtattttagtagagactgggtttcacc

SEQ ID NO: 719582 - DNA, 611 bp, Homo sapiens
aaatgattttttgctgttactgaaacattcaacactaaaaagatactttctaccactgaatatattcaaataatcattgtgtcatttctgagcatatagtcctgcctcagaaccgtgggatactgtatttttcaggaagtaagaaaaatctccaaaacagaaggtgctgctatggtcatcaaaccataagcttacgtgggtggctaccatcaggaaattattttgcatgccaattttaagagggtcaaaactccaatgaatgtatagtctggcgttatttgttaagtcagtctcattattttcattatcccttgtgattggaaaatgaggacaaatggacaatgagctcactgtatgatgaggcaagcaaagttcagggaactaaatgatgaattctcatttgtattcccatgactgacttgaagggcagtgcaatttaccttcactctgttcttctatgatataaagtccaggttttcatcgtccayttagttttacaaacatatcctcctctaaccttttaatgccaagctaattttttttttgtattagcacagttgaatttaaaactatccgaatgcttgaatattcctccacgagttagttaattt

SEQ ID NO: 719583 - DNA, 1831 bp, Homo sapiens
ataggaaactttgagccccaccttcccttcaaatgggtcactctgtaacaatgtaccacaggtttcttcttgtgttctaaagcacctccagctgtttctggatttgggtcactgtgggtggttgttttacagattaactctgcaactctgctctaggtctcccactaaatgctcccttaacaccctttccctctccttcatatcacttattgcaattatgataattaattatgcatcaagctatttaatgcctacttccctcccactacgatatgagtttcctggaggcagggattgaatctgtcccaatctgctgcatttctgctgcctgacatagtgagtgacccagccactgaatgaagcactagtctcaaagctcttgtaaaatctgccaggttacctgagagcttgtcctctgtgatgaagtgtttttgtcctcttgctcagttttaggaataactgttagcttttcttttattttcaaatcactttaagataattaattttcaaaataaagttttccaccccaccaaggaaaaatagaaactttcacattatatgcaatggtggatgtttgtgcctttagtaataaattcgctgatcttgaaatgtttctagtatatcaatgatgcccagatgrtatgctcttgcatatcagtagtgtttatagtgtcctaaaatggtagaacaaaaaacaaacggagaaaaagttattttggtgctaaattaccaacaattcctctgggtaacacaatttattttagttcttcctaacacacacacgtgcttcctctcagatgctgtaatagcaaattgacattgaactgggggtgggagtggtctggagaagggcattaccattgctgaacacttaattgagcacctactgtatgctaagcacttttctaatattctgtcatttagtccccatctccactgaggatgctgaagtctagacatcaggaaatggatggtgaagaaatatagtcaagatctggaattctcagggaattaagcaccctcttctgcttctgtctgttagctgctgagtaagaggcaaaggaaaaggaaagtcatgtgcccttcactcaacagccagtctgttttgactgagctgtggccatcctgaattatcctcagaccttacaatctctcactatgaccttatggtcactgtttgtgccttcacacaaggcaggtgttggccctggccaggatctctctgggtggtattttggtaaaagccttgtttttgtaagagaaagcagaggtggaactcaagagttagtagtttacatgtatttaaaaggtgagttttctaaaaccttctaagtagtcatattctttttcaaatcccaaatgattctgtttggaataaactacaagtcatcatctatttaccacattgagagagttggaaagcagacaacaggaagaaaagggaggaagaaagaaaattaacatttattgagcattaattctgtgaactgttaggtacttgagcatgttatgtaaattcttgcaatcctagtgaggtatatgctttttatctcattatacagataaaaacactgaggcctacataggttaaatgatttgcctcaaattggcctgcatgttagtgagtagtcagcttgttctctctgaggcccaaacctgtgctttgctttacatggcatgattgtgttaaggacggatgaaagcaaggtcacctcccttccctcagaattaaagacgttatctgtatctctaatgggcaatgagtttcaaagatgtacaccttatgtgacaactggtatgcaatatattacattgtagctttgcccttttt

SEQ ID NO: 719584 - DNA, 1831 bp, Homo sapiens
ataggaaactttgagccccaccttcccttcaaatgggtcactctgtaacaatgtaccacaggtttcttcttgtgttctaaagcacctccagctgtttctggatttgggtcactgtgggtggttgttttacagattaactctgcaactctgctctaggtctcccactaaatgctcccttaacaccctttccctctccttcatatcacttattgcaattatgataattaattatgcatcaagctatttaatgcctacttccctcccactacgatatgagtttcctggaggcagggattgaatctgtcccaatctgctgcatttctgctgcctgacatagtgagtgacccagccactgaatgaagcactagtctcaaagctcttgtaaaatctgccaggttacctgagagcttgtcctctgtgatgaagtgtttttgtcctcttgctcagttttaggaataactgttagcttttcttttattttcaaatcactttaagataattaattttcaaaataaagttttccaccccaccaaggaaaaatagaaactttcacattatatgcaatggtggatgtttgtgcctttagtaataaattcgctgatcttgaaatgtttctagtatatcaatgatgcccagatggtatgctcttgcatatcagtagtgtttatagtgtcctaaaatggtagaacaaaaaacaaacggagaaaaagttattttggtgctaaattaccaacaattcctctgggtaacacaatttattttagttcttcctaacacacacacgtgcttcctctcagatgctgtaatagcaaattgacattgaactgggggtgggagtggtctggagaagggcattaccattgctgaacacttaattgagcacctactgtatgctaagcacttttctaatattctgtcatttagtccccatctccactgaggatgctgaagtctagacatcaggaaatggatggtgaagaaatatagtcaagatctggaattctcagggaattaagcaccctcttctgcttctgtctgttagctgctgagtaagaggcaaaggaaaaggaaagtcatgtgcccttcactcaacagccagtctgttttgactgagctgtggccatcctgaattatcctcagaccttacaatctctcactatgaccttatggtcactgtttgtgccttcacacaaggcaggtgttggccctggccaggatctctctgggtggtattttggtaaaagccttgtttttgtaagagaaagcagaggtggaactcaagagttagtagtttacatgtatttaaaaggtgagttttctaaaaccttctaagtagtcatattctttttcaaatcccaaatgattctgtttggaataaactacaagtcatcatctatttaccacattgagagagttggaaagcagacaacaggaagaaaagggaggaagaaagaaaattaacatttattgagcattaattctgtgaactgttaggtacttgagcatgttatgtaaattcttgcaatcctagtgaggtatatgctttttatctcattatacagataaaaacactgaggcctacataggttaaatgatttgcctcaaattggcctgcatgttagtgagtagtcagcttgttctctctgaggcccaaacctgtgctttgctttacatggcatgattgtgttaaggacggatgaaagcaaggtcacctcccttccctcagaattaaagacgttatctgtatctctaatgggcaatgagtttcaaagatgtacaccwtatgtgacaactggtatgcaatatattacattgtagctttgcccttttt

SEQ ID NO: 719585 - DNA, 1431 bp, Homo sapiens
gggaacaccctaaactagttatccccagcccttttctagggtgcaaatacattcataaaggcagacccctcatgacttgatcactgcctaaaaggtcttccccacctcttaataccatcacaatggagattaagtttcaatagtgaatattgggggcactgatactatagaaaaaggaaaaccaactgtgggtttggacaaaccacttaacttctctaggctccctctgttaattgaggaaatcgggtctcagcttctaaagtttttcttgatctccttctgcaagcaaaagttaatccagaagcccaataagtaaaacagatagaaggggtgttgttctcatgatagaggtttttggggaggtaggcttgctgttgaagttcaagctcccttacctctctaacttagtcccagaagggacttcttggtgcatctttcaatagcactgtggtaaatcacttttaggggttgtttcagtttcaatgttatataatcctagtggttctcaaagtgtgatcccagaaggatcattatcagacctgcaaattttcaagtgactccccatacttaatgagtcagacactctagggatgggccccagcaatctgtgttttaaaagcccctcaggggattgtagtgcacctctttgagagccattgtattgctccctgatgctaaagagctgtgttccttctgaacagttgccaatactgagaccaaccaaagagaagtgagtagactggggtgagcaagggaagaagtaagtggagaaagaacttaggaacaactgtgaatttctcctgagaatcggataccagagagctgctcaagacactgccctgccaagtctttagatcctataagaagagttgggaaacaagtacatcctcagcatctgtaatgtctgggttttaaaaagcagtgacaaaggacatttcaacatgcaattgaaacaacatgctcttgaaaaaaatgtgccctgcctggccctgtcctccccactgttgcctagtgatcccccttccatgatgtttgtttggttaatttatacagagatatggatgaaatgaggccccataataatgtcgatgataactgtgatgacaataatagcactagctagagaatggcaggcactgtgctaattttatatgggttttcttattcaawccttataatatctttatgagggactattgttatctacagttttataggttaaaaaaaacaaggttgggaaaggtcaagtaacttgtgtagtaggcaaaataatggtttcccaaagatgcccacatcctgatgcctgaaaactgtgaattgttatattacctatcaaagggactttgcagatgttactaaaaatggtgaaatggggagattaccttagattatctagaagggtccaaaacagtcacaagagtccttgtaaga

SEQ ID NO: 719586 - DNA, 1404 bp, Homo sapiens
ttgaattttccagttttcctcctgttaattgatttctagttgtataccattgtggtcaaaagagatacttgataaaatttcaatcttcttaaatgtattaagacattttgtgacttcaagtatgctctattttagaggatgtttcttgttagcttgaaaagaacacctgttctccggctgtggatgaaatgtgaacatacatctgttaggtccgtttggtctaaagtgcagatcaagtctaatttttttttccttacagattgtctgtctaaatgatctatccattgttgtaattggagtattgataatttcaacagtgtcaataaggttacctatatctgtagtattattgattgctctgtatctctccctccagatattaatgtttgctttacattttcaagtgctctaatgttaagtgcatatttatttataattgtttcatccctttaatcaactcatccctttatcattatatagtgaccatctttatcacctgttagagttttatcttaaggtatattttgcctgatataaggatagttatccatgttgtttttttgttttaatttgcatggaatatcaaattttctcatcccctaaattcacaccatatgtgtccttgaagctgaagtgagtctcttgtaggcagtatattgttgggtctccttttgtaatccagttcagccactctggcttttgaatgtagaatagaatgaatttatcttcaaggtaattattgatagataagaacatacaattgacattttgttcattgcttttcagccttttaacatatttttgttcctttatttctcccttgctgtcgttctttgagattttatgattttctgtagtgacaygctttgatttctctttgtcttttgggtatctactataggtttttgctttccgaatagcatgaagcttatacatactatcttgtagttggagcaaactattttaaactgaggtttgatcatattcaaaactctatacttttactcagcccactatattttatatatttggtgtcacattatatatttttaatattctatatctattaacaaattattgtagctataattattattattttggattttaagcttcatactagcaataaaactgatttacacaccactactacactattagagtgttctgtattttttatatatttaccttaatcaatgagtttcatacttttctgtgctttcatgttgctctatagcaaacttttgctgcaaattcagaaattctttaaaataattattttgaattctttgtcaagaagtttatagatttttgtatttttgcacggtttttcatgtcaaataattgttttaaaggagagttattagttacaagagaatatattggcaattcaaccaaaacttg

SEQ ID NO: 719587 - DNA, 645 bp, Homo sapiens
tgttctcacactgctatgaggacgtacccgagactgggtaatttataaaggaaagaggtttaattgactcacagttcagcatggctggggaggcctcaggaaacttacaatcatggtggaaggmgaagtaaacatgttcttcgtatggcagcagcaaggagaagtgcccagcaaaagggggaaaagcctctataaaaccatcagatcttgtgaggactcactatcaggagaacagcagcatgggggtaaccaccctcatgattcaggtacctcccaccgggtcccttccacgacacgtggaggttatgggaactacagttcaagatgagatgtgggtggggacacagccagaccatatcaaagagtgccctgtgtttcttgactcctaagagcttccctcatttgtgttctccctggccctggcgatgcatggcaataccaagttatttacctttagtgtgaaggattgtttaatgatttgttaggttatttatgtagatcagtgctgtttaaactacattatatgaatggaggggcgatgcaaagaccttcctaggagtttgggaatggggatgttttaaagggaatttgttttacatccttaacgtctgtatattttctgatattctgtatattttatgatct

SEQ ID NO: 719588 - DNA, 603 bp, Homo sapiens
tgaaaccactcctccatctgctttttatcttttagaaatttgttgaaatatctcaaactgctgatggatctttccttgcacatttatgttggaaacatatataataggatgtgtgtgtgtgtgtgtgwgagagagagagagagagagagagagagagagaaacaagtctcaggaaggtgaaaaataaatttatgttgctaacttaacatatcttcttgtgaatttttaaaagggaaaattttcaaacaatgactacaaagaatcatattacccaggaccaaggtgctgaggttcaggattcaaaacagtagttttgattttttaaagtattgataacttcaacagggaaagcaataaaatttcagatgcactttgaaaatatgaataaatgaaaacaatctctaattttctcatgaagaagtctaaacttaaaactgattccggattccagggactgtggtaatctcattttgacacaaaaggaagaaagcataaatgattaacaaaaataaaatcataaaataagctaattcaataaaactgatccttgttacatatttttattggtgatttgatgaaaaatcagattttttgagttcccag

SEQ ID NO: 719589 - DNA, 603 bp, Homo sapiens
tgaaaccactcctccatctgctttttatcttttagaaatttgttgaaatatctcaaactgctgatggatctttccttgcacatttatgttggaaacatatataataggatgtgtgtgtgtgtgtgtgagwgagagagagagagagagagagagagagagaaacaagtctcaggaaggtgaaaaataaatttatgttgctaacttaacatatcttcttgtgaatttttaaaagggaaaattttcaaacaatgactacaaagaatcatattacccaggaccaaggtgctgaggttcaggattcaaaacagtagttttgattttttaaagtattgataacttcaacagggaaagcaataaaatttcagatgcactttgaaaatatgaataaatgaaaacaatctctaattttctcatgaagaagtctaaacttaaaactgattccggattccagggactgtggtaatctcattttgacacaaaaggaagaaagcataaatgattaacaaaaataaaatcataaaataagctaattcaataaaactgatccttgttacatatttttattggtgatttgatgaaaaatcagattttttgagttcccag

SEQ ID NO: 719590 - DNA, 841 bp, Homo sapiens
tgacatacttgcttttgcgtgtactattagaggcatgtaatagactataatatctgaacttacaatatatggtcaatagctactgaatacagatggcactgtgacatcaggaagaatataaaatatctccatatttgagattgtgaagaaaaatcaccatttggagtcagaaaatccagattttagttgtgcgacccagacaagtgcttttacttctgtgagtctcagtttccttatcggttaaatgatcatatctcttgcacctgccttggtgtgctattctgtgrataaagtgagataatagatgtaaaaacatcagtgaaaggctaaacacatacaagtgtcactagtagtcatggttagctactgaaattagatggcacttttcatgacaattcaatccaagctgtgttgcaggcaggaattacaagtgtggtatcttcttgagttgagaaaaatggaattaaaggactatttacaagtctctttgtgatcctcggaaaaaaacaataatccctttttccgtggataatattctcattcctctgatgattacagtcaacaagggctggtcagtgactcagagaaagagcctatcctacctgaaagaggtgtgctcaccaccaagtagtcaaaacatctatgtgagtgttcacagacacggtcagtcttttctgcactcaccgaagctgatacagacaggaagcacaggacagtttggggcaactcctaatcccatcctccaagccacaattacacacttggttttcctgactatcttctcatttaaggttagctgttaatatacagtttgatgttttaaaaagggggttttaggtga

SEQ ID NO: 719591 - DNA, 914 bp, Homo sapiens
tcccaccattctcatcttggattgtagttcccataatccccacgtgtcatgagagggactcggtgggaggtaattgaatcatgggggcagttttccccatgmtattctcatgatggtaagttctcatgagatctgatggttttataaggggcttcccccatcactcgattctcattcttctctctcctgctgtcttgtgaagaaggatgtatttgtgtccccttctgccatgattataagtttcccaaggcctccccagacctgtggaactgcgagtcaattaaacctctttcccttataaattgcccagtctcaggtatgtccttatagcagtgtgagaacagactaacacacccaggcttccctgaagtgagctgtggcctttgcactaagggatgggagcaggaatgatgggtatctgctcggggtgggaacatgaggcatcaggtgcatcttcttcaggctgtccctgatgtgctggtgattggtcccaccaggcaggtgacagtaccccagagcagtggaacactctgagataatagaagtgttttgagatctgtgctgtccaacacgcgagccactagacacttgagctatggctagtgcaactaggaactgaaatttcaattgtctttaaatgtatttaaattaattaaaattaaaatagtcacatgtcaccagcggcaactgtatcagccagtagagcccctgaggatggaggagcaatggtttggaaggaacatggatcttagaatgcccagtggagcagagattctccacctaaatggattacttatctcagaacagttgagtgagagaaaaacaaggcaatgttttaggacagttaggaagatagtatcaatagtatgacataatgggtatatcagggacttggggctcaccttttgagttca

SEQ ID NO: 719592 - DNA, 914 bp, Homo sapiens
tcccaccattctcatcttggattgtagttcccataatccccacgtgtcatgagagggactcggtgggaggtaattgaatcatgggggcagttttccccatgctattctcatgatggtaagttctcatgagatctgatggttttataaggggcttcccccatcactcgattctcattcttctctctcctgctgtcttgtgaagaaggatgtatttgtgtccccttctgccatgattataagtttcccaaggcctccccagacctgtggaactgcgagtcaattaaacctctttcccttataaattgcccagtctcaggtatgtccttatagcagwgtgagaacagactaacacacccaggcttccctgaagtgagctgtggcctttgcactaagggatgggagcaggaatgatgggtatctgctcggggtgggaacatgaggcatcaggtgcatcttcttcaggctgtccctgatgtgctggtgattggtcccaccaggcaggtgacagtaccccagagcagtggaacactctgagataatagaagtgttttgagatctgtgctgtccaacacgcgagccactagacacttgagctatggctagtgcaactaggaactgaaatttcaattgtctttaaatgtatttaaattaattaaaattaaaatagtcacatgtcaccagcggcaactgtatcagccagtagagcccctgaggatggaggagcaatggtttggaaggaacatggatcttagaatgcccagtggagcagagattctccacctaaatggattacttatctcagaacagttgagtgagagaaaaacaaggcaatgttttaggacagttaggaagatagtatcaatagtatgacataatgggtatatcagggacttggggctcaccttttgagttca

SEQ ID NO: 719593 - DNA, 1136 bp, Homo sapiens
catgagcaaccgcgctcagccctaatcattctttttgaagctcaaaaaatctcatcttagacctaaaatccttcaggctggcacctgtgtctatctgatcagcccccatcatgtttatagctttttatctctggcactacaaagcagcctaggtaatttcctgcttctacatagaatcacttccaggcaccctagatttcttttcttgatggtacttagacaccaatatcttgtttataaggagtgttcattgctattatgttgttactgcttccagactttttcaatggagagagctaggatatactaactttaaagaggaaaataataaacccacttaatatgtatattatacctactttaaattgaaaatatatctactttaaactgaaaagtgcagttttgctattttttttaattttcataattgtaccttttaaaaatattgaaacattttagatattaaaaacagtgatggactggactatttcaattaccttgcaatatatttataatcacttcaaattagtaacaacaatattattatgatcaaagaataactgaatgtagtgtaagattatttgtagttctgtgtttctaatgttaggtacttaaatagatattagcagctgggagggaatgaaaggaggagagcagaaagactgtcactaagacagcccctggcccaccaacgttcagccctaagacctccctaacttcaccctaatggatggagtttgtggtaaagtctgtggccagcacatcctgtaraaagagaaactagggcacaggtggaaattccctaaagtggcacatgcccagtaatatggaactgtgtcctcaagttaaccccaagctcatcataccatcattattataaaatttatatgtgattttaccccctctccaagtgggcttttctgtatgaattatgggtaagaacatgtgcaatttaactttagttatataaccacaaactgccgatcaaatgacatcatcctgtcactcctccccacaaacccaatacaagcacctttagctctgtaaagaggggctgacttcacttcgtagaagtcagcttgctctccatctgagagtgtattactgtgcttctatgcttaaataaactttgcttt

SEQ ID NO: 719594 - DNA, 1247 bp, Homo sapiens
ttaaggaaatactgtgttccacaatttataagaatatacagtgtataaaaatgttttcatcaatgtaatttaaacatacatagaggccgggcgcggtggctcacgcctgtaatcccagcactttgggaggccgaggcgggcggatcatgaggtcaggagatcgagaccatcccagctaaaacggtgaaaccccgtctctactaaaaatacaaaaaattagccgggcgtagtggcgggcgcctgtagtcccagctacttgggaggctgaggcaggagaatggcgtgaacccgggaggtggagctggcagtgagccgagatcccgccactgcactccagcctgggcgacagagcgagactccgtctcaaaaacaaaaacaaaaaacaaacaaacaaaaaaaaacatacatagagattataatggaaaaacaaaactgctaggaatttaaaaaaatacaaaatgaaattggcgtgggcaatcgccactttctgtctaaaaatcatttgcctttgtctctcctttgtctctcctaataagcaataaaataaatatatggattttctacaaaagaaaagcccatatcagaaaagaaaatgggaggttgtcagctttcttgaaattgaaaactggaagggattttttttttcttatgaaaataagaggcagaaaaaaagaaatcaaaaaggaaatcacttttactttatcaacagaaggaagatgagtcagttatgaagactttcactcttaatgtgaatatctaatgaaagaatacaacaaaatgctaaatatgcaaacaaaaaacttgaccttggaagaaagagagacaaaacagaacatagaagataattattttataatctattatgttatgaaattatttgaaaaatctcataaatgatctcttatagtctatatatttttataaatttaaatttatatatttaaatatagaaatatatgcacatatatcaacatctaaatttatatttttaaatatttatattttatataatgcatgtttatttaaatataaatttgaatatttatatatgcaaatatatatttctatatttaaatgcataaatttatatattgatatatttaaatatatatagatttatatatttatatayatatatgtaaatttttttcttcaaataataggaggaaaacctaagctcaaataaatctagcagacggaatcaaggaacagagtcatgttgtggccaggatgataaaattgggcta

SEQ ID NO: 719595 - DNA, 642 bp, Homo sapiens
taagtgccccatttgctgaatgaataaatgggtaaaccttagatagatctgccttcagagctataatttgctgatagaaaatgtcacttgaggaataaggtgaaattttgttttttctgttgctcagaattaaatgcatatattttttagaacrtttgcactattgcagtcttggcctccctccctgttgtgaaatcataaacagacactgagacgctctcaccagaggaatcttaaaagcacgaggcacagtttgtggcttctgagcctaggatgttaatactggaagttctttcccctcactcgtttaaacgagaccatagctgagactgaattacctttacagacacgtgaggcagaggaattcacagaggctctgccctcatatgaccgagctaatagtggactcacagaagaatgcctttctatttttctaacagcccccaaatacccaattcccaactgaatcaacacattgaagactagaacgactttcaaaggcataagaggccgggtgtggtggctcatgcctgtaatcccagcagtttgagaggatgaggcgggaagatcacttgatgtcaggagttcaagaccagcctggccaacatggttaaaccctgtctctactaaaaatataaaaat

SEQ ID NO: 719596 - DNA, 642 bp, Homo sapiens
taagtgccccatttgctgaatgaataaatgggtaaaccttagatagatctgccttcagagctataatttgctgatagaaaatgtcacttgaggaataaggtgaaattttgttttttctgttgctcagaattaaatgcatatattttttagaacgtttgcactattgcagtcttggcctccctccctgttgtgaaatcataaacagacactgagaygctctcaccagaggaatcttaaaagcacgaggcacagtttgtggcttctgagcctaggatgttaatactggaagttctttcccctcactcgtttaaacgagaccatagctgagactgaattacctttacagacacgtgaggcagaggaattcacagaggctctgccctcatatgaccgagctaatagtggactcacagaagaatgcctttctatttttctaacagcccccaaatacccaattcccaactgaatcaacacattgaagactagaacgactttcaaaggcataagaggccgggtgtggtggctcatgcctgtaatcccagcagtttgagaggatgaggcgggaagatcacttgatgtcaggagttcaagaccagcctggccaacatggttaaaccctgtctctactaaaaatataaaaat

SEQ ID NO: 719597 - DNA, 642 bp, Homo sapiens
taagtgccccatttgctgaatgaataaatgggtaaaccttagatagatctgccttcagagctataatttgctgatagaaaatgtcacttgaggaataaggtgaaattttgttttttctgttgctcagaattaaatgcatatattttttagaacgtttgcactattgcagtcttggcctccctccctgttgtgaaatcataaacagacactgagacgctctcaycagaggaatcttaaaagcacgaggcacagtttgtggcttctgagcctaggatgttaatactggaagttctttcccctcactcgtttaaacgagaccatagctgagactgaattacctttacagacacgtgaggcagaggaattcacagaggctctgccctcatatgaccgagctaatagtggactcacagaagaatgcctttctatttttctaacagcccccaaatacccaattcccaactgaatcaacacattgaagactagaacgactttcaaaggcataagaggccgggtgtggtggctcatgcctgtaatcccagcagtttgagaggatgaggcgggaagatcacttgatgtcaggagttcaagaccagcctggccaacatggttaaaccctgtctctactaaaaatataaaaat

SEQ ID NO: 719598 - DNA, 642 bp, Homo sapiens
taagtgccccatttgctgaatgaataaatgggtaaaccttagatagatctgccttcagagctataatttgctgatagaaaatgtcacttgaggaataaggtgaaattttgttttttctgttgctcagaattaaatgcatatattttttagaacgtttgcactattgcagtcttggcctccctccctgttgtgaaatcataaacagacactgagacgctctcaccagaggaatcttaaargcacgaggcacagtttgtggcttctgagcctaggatgttaatactggaagttctttcccctcactcgtttaaacgagaccatagctgagactgaattacctttacagacacgtgaggcagaggaattcacagaggctctgccctcatatgaccgagctaatagtggactcacagaagaatgcctttctatttttctaacagcccccaaatacccaattcccaactgaatcaacacattgaagactagaacgactttcaaaggcataagaggccgggtgtggtggctcatgcctgtaatcccagcagtttgagaggatgaggcgggaagatcacttgatgtcaggagttcaagaccagcctggccaacatggttaaaccctgtctctactaaaaatataaaaat

SEQ ID NO: 719599 - DNA, 642 bp, Homo sapiens
taagtgccccatttgctgaatgaataaatgggtaaaccttagatagatctgccttcagagctataatttgctgatagaaaatgtcacttgaggaataaggtgaaattttgttttttctgttgctcagaattaaatgcatatattttttagaacgtttgcactattgcagtcttggcctccctccctgttgtgaaatcataaacagacactgagacgctctcaccagaggaatcttaaaagcacgaggcacagtttgtggcttctgagcctaggatgttaatactggaagttctttcccctcactcgtttaaacgagacyatagctgagactgaattacctttacagacacgtgaggcagaggaattcacagaggctctgccctcatatgaccgagctaatagtggactcacagaagaatgcctttctatttttctaacagcccccaaatacccaattcccaactgaatcaacacattgaagactagaacgactttcaaaggcataagaggccgggtgtggtggctcatgcctgtaatcccagcagtttgagaggatgaggcgggaagatcacttgatgtcaggagttcaagaccagcctggccaacatggttaaaccctgtctctactaaaaatataaaaat

SEQ ID NO: 719600 - DNA, 551 bp, Homo sapiens
tgagatgcagcctgaccactttggagagtgtcctgatgaagaaaagacaggaaaggcaagatgtgagtgggacagctgtgtcacatttctgtaattctgtagtatttcaaacctcttcattattattatatctattatggtgatctatgatcagtgctccctgatattactactgtaatgtttggagcaccacgaactgcacccacctaagacagcaaccgtaatcaagaaatattgtgtgttccgactgctccacagactggcccttcctcctctctctcctcaggcctccctcttccataagacaaaacaatgtagaaattaggccaattaataaccctacaatggctcccaagtgttcaagtgaaagaaagggttgcacrcctcttactttaaatcaaaagcaagagatgattaagcttagcgaggaaggcatgccacaacccaagacgggccaaaagctgggcctcttgtgccaaacagtgagccaagttgtgaatgcaaaggaaaagttcttgaagaaaattaaaagtgctaccccagtgaacaca

SEQ ID NO: 719601 - DNA, 551 bp, Homo sapiens
tgagatgcagcctgaccactttggagagtgtcctgatgaagaaaagacaggaaaggcaagatgtgagtgggacagctgtgtcacatttctgtaattctgtagtatttcaaacctcttcattattattatatctattatggtgatctatgatcagtgctccctgatattactactgtaatgtttggagcaccacgaactgcacccacctaagacagcaaccgtaatcaagaaatattgtgtgttccgactgctccacagactggcccttcctcctctctctcctcaggcctccctcttccataagacaaaacaatgtagaaattaggccaattaataaccctacaatggctcccaagtgttcaagtgaaagaaagggttgcacacctcttactttaaatcaaaagcaagagatgattaagcttagcgaggaaggcaygccacaacccaagacgggccaaaagctgggcctcttgtgccaaacagtgagccaagttgtgaatgcaaaggaaaagttcttgaagaaaattaaaagtgctaccccagtgaacaca

SEQ ID NO: 719602 - DNA, 551 bp, Homo sapiens
tgagatgcagcctgaccactttggagagtgtcctgatgaagaaaagacaggaaaggcaagatgtgagtgggacagctgtgtcacatttctgtaattctgtagtatttcaaacctcttcattattattatatctattatggtgatctatgatcagtgctccctgatattactactgtaatgtttggagcaccacgaactgcacccacctaagacagcaaccgtaatcaagaaatattgtgtgttccgactgctccacagactggcccttcctcctctctctcctcaggcctccctcttccataagacaaaacaatgtagaaattaggccaattaataaccctacaatggctcccaagtgttcaagtgaaagaaagggttgcacacctcttactttaaatcaaaagcaagagatgattaagcttagcgaggaaggcatgccacaacccaagacgggccaaaagctgggcctcttgtgccaaacagtgagccaasttgtgaatgcaaaggaaaagttcttgaagaaaattaaaagtgctaccccagtgaacaca

SEQ ID NO: 719603 - DNA, 1328 bp, Homo sapiens
tttgaaaggaatgatgcagtaaatgatcattgggtaggcaaccaattggaatggtgatataacttagcagaataatttaattttctaaaagaacagtaatatagttgcatatattaataaagggtagaatgttgctgttaatagacattggagacagattgattttctagggtctttcacatcattccatgagggaaaccctgtatgatatcctcaagtacaataaatatctttcatgttatataatgactgcaacttcatttaaacactcaagggagaacaaccatatttaagtggataaaactgatattttaaataatattttaagagatggttatgcttaaaaacagaaaattgtgatagagattaacatcaattacatggattatctatattccatatgctggaatcattactttttaaaattccatagttacattttgttctgattatggcatattatgaacttctgtgtaacaaacctactgtgttaaacgttataaaatggctaaacggtggaagkgtttatttgttaatgttaactactcagaatgaaccagtgtattttctgtagcaagaactctaaacatttatttggtgaataagtgaatgtacataccatttaccgagagcttcctatatgccaaaaacttgctgtcatttatttaatattaacaataatattgcaagactgataactacagatagattatttatgttaagtaattttctctgaaaacaaacactaactgaaagcccattttcttcatggagtgttttcatttgggttgatgattggtattaaaagaaacgaatgatgtacctacttgtttataagtgacaccatcaacaaaaatcgttgaaaaataatggttgaaagaacagttgtttgccattaaacagaagtttttctcaacgggcacaattgcatttctctattagttcacatgtagttggtataaccaatagcctgcttaagaaaaaggcaacataactcccccctccccctttttttttttttttttgagatggagttttgctcttgttgcccaggctggagtgcaatggcatgatctcagctcaccgcaacctccgcccctcaggttcaagtaattctgctgcctcagcttcccgagtagctgggattacagacatgcaccatcacacccggctacttttgtatttttagtagagacgggatttctccatgttgaggctggtctcaaactcctgacctcaggtaatctgcctgcctcagcctcccaaagtgctgggattacaggcatgagccaccgcgcccgacccataactccctttttatctttaca

SEQ ID NO: 719604 - DNA, 1221 bp, Homo sapiens
attttgatatcagttttaaagctttttagaacagaatttgcttgtcattgttttgttttgtcccatttttacctaaaataagaacttcaggaagattcaataagttttcaggtcaaaaggaaataaatatgacctaatatagtacttacctcacatatgctttgcttataaaactaataattctgtaatctctactccattcttcctaaaaaatgsttattattggtgtgatttaaaaattgcaaaactgaatacttaattaaggaaggcaaatattgcaatcttttcataaggattatagatgaaatgttaaagatacagcaatgacctctattgtagatgcaccaattatcttcagttaaacaaagagaaagagaaaattgctcaaatttaattctgtcaatgtgagcaaaatatattttctatcattttaaatacttagcataaaagacatactggagtatattagatcgaaactatccaatatggtcagttaattctgtataataaaattatgcaaccacaaaaataacatatttcactgtctcaaaattgaaatagtttccaaatacttatttcagaattaaaacaatatgatttattattggtaataactttaagaaaagacaaaaaaatcatgttttaggcatttcaagatcaatagagttaggtttatactaataaggtaaactattaaatcacattatttattaaaatgaattgatataacctgcatggcttattaaaatgattaatgtggcctatggatgaaaaactcaactgagatatgatttaaaacatataataactatcacataagtacattactaaaacaaatactaccatgaaacataacaaattaaaatcttgaaggagaaacacatgtaagtatagaatattataaacatgtcagaattttattaattttagaagtaaatacatagagtgctagagcagaagttatataactgctaatacagatttcaaatagcattcattgcaaagcatcagcattacttaaattgaacaaatttcagttgtcaaatatctccagacaaaggccaccaagaacacagtgatagttgaacaagttgaatttatgactctttgcatgaaaggaaaacacacagcaaagaaagccatagtgcctctctcagtaagagaaagacctattacaggatttgagctttggtccggtaattcaggggagggtccaaggat

SEQ ID NO: 719605 - DNA, 2242 bp, Homo sapiens
  misc_feature 1291, 1297, 1319, 1320, 1321, 1322, 1323, 1324, 1325, 1326,1327, 1328, 1329, 1330, 1331, 1332, 1333, 1334, 1335, 1336,1337, 1338, 1339, 1340, 1341, 1342, 1343, 1344, 1345, 1346,1347, 1348, 1349, 1350, 1351, 1352, 1353, 1354, 1355: n = A,T,C or G
  misc_feature 1356, 1357, 1358, 1359, 1360, 1361, 1362, 1363, 1364, 1365,1366, 1367, 1368, 1369, 1370, 1371, 1372, 1373, 1374, 1375,1376, 1377, 1378, 1379, 1380, 1381, 1382, 1383, 1384, 1385,1386, 1387, 1388, 1389, 1390, 1391, 1392, 1393, 1394: n = A,T,C or G
  misc_feature 1395, 1396, 1397, 1398, 1399, 1400, 1401, 1402, 1403, 1404,1405, 1406, 1407, 1408, 1409, 1410, 1411, 1412, 1413, 1414,1415, 1416, 1417, 1418: n = A,T,C or G
ttatatattataattcttagcaaagcaccagcacacagtaagtgttcaataaatatttagaggaagcaggtaaaaggtgtcatgagttagatatttcmaataggaggagatggacccttgatggggtcaaccagcatcaagtgtgcctcttttacaaaaccaggaacccaatcttctccttttttcaaagttgatccaggcttatggaattcagttcataaaaaccaagctcaagggagtgaatgccaattcaataacaatgaaaagtctaacctctaggtaacagaaatatctgtgtcagccattcattgcatcctttttcttgtagcaaggcttccagcaggcgactctagggtcattcgtggccaatatgattcatttgcaccagctctgaagcctagtgcatgccatttagactctagggacaccttgcaaagttcttgctttttactttcaccccttcctcatagatgactctttgctttttaaaggaattgaagggctattctatagacaggagtaaagcctgttcagagatgttctaaacaccagattttgtttgcttgagaagcaaagagaagataatttagacaagggcaaaagcaccatgagaagactttgaaacagttttacccaagttgtaactggagaagaagacttgatgagtcttgtgaattaggcagatagcattcatgagctggagagaatgggaaatgcagagtgcaagggagattagttttgagggagcaggtggcagtgttgagtgatgctgaggggagatcagaatgttgaaagagaagtatgactgatatctggttagtttctttgttttgtctttcttgagctgctttcaccaatgatgtacatatgaaaaagggatgttatgaataagttaccttcaaactaaattaactgagtggtttttacatggagcttcaggatatccagaagcatatgtctaggaataaaaatggttcatttttgagggctgggcgcagtggctcatgcctgtaatcccagcactttgggaggcaaaggtgggcagatcatgaggtcaggagttcgagatcagcctggccaacatggtgaaaccccatctctactaaaaatacaaaaattagcctggtgtagtggcgcacgcctgtaatcccagctagtcaagaggctgaggcgggagaattgcttgaacccgggaggcgaaggctgcagtgagccgagatcgcgccactgcacttcagcctgggtgacagaccaagactccctctcggaatataataatatatagtagtangtgtanctcagtgcttcagtttctattnnnnnnnnnnnnnnnnnnnnnnnnnnnnnnnnnnnnnnnnnnnnnnnnnnnnnnnnnnnnnnnnnnnnnnnnnnnnnnnnnnnnnnnnnnnnnnnnnnnngcacatgaggtgtgttgtgtggggagcttatgttgccatatgttttccaacagaactacttggcccacgaggagcttttgattgctgtggaaatgttgtctgctgttgctttactaaaccaggccttggaaagcaacgatcttgtgtctgtgcagaatcaactcagaagccccgcaataggcttaaacaatctggacaaggcatatgtggaacggtaaggaacattttccaaaccttctttcaatgcagaaatgcatgtttggcagatcttaaaagtgaggaatttgcctgttggtggagaaatccatataccatgctcatgtttcttgaaaactagtctgttttaagagtccttctaattagtatccttgtttacagtattccttctggggaacaagaagaatcagaaagtgatcatcctgtggcaattaataaatgactttgtcgttggcaaagattatttgataggctgaaaataaaggaactattggaaacatacctttccttgggcgtcttttggaaaccgcagaatgtagaagagttggaagcaactttaataatcatccagtccaattcttttatgtcactgatgcagaaacagaatccgggttatggacctaaaattgggcagttgggccccaaactccactcttctgattattaagccaaagaaatcctgagaccacagtgggtcatggcagtgggtaacaacatccatttatctttcatttcatgtttctgaagtgtgctaccagatagtacaactgatagcattgttataaaacactatagcggatcttgagagaaaatcaaatggccagaat

SEQ ID NO: 719606 - DNA, 1059 bp, Homo sapiens
aagaaataaatggagtgaatattggagtgaaatttagctatacatgagtgcgtaagtaagaaaagagaaaggctgggtgtggtggttcacgtgtgtaattccagcactttgggaagccaaggtgggcagatcacttgagctcaggagtttgagaccagcctgggcaacatggcaaaacactgtctctacagaagttacaaaaaattagccatgtgtagtgccacatccctgtagttccagctactcgggaggctgaggtgggaggattatctgagcctgggaggttgaggcttcagtgagctgtgattgtgcccctgcactccagcctgggcaatggctgaatgagaccctgtctcaaaaaaataaaataaaaaggaaaagaggaaaagaaaagagaaaagaattttacattcatttgaaattaargtgagagtttcaattcacaatgtagatttatgtaaattaaactgtatgccaaaagtcaacagtcctcttctttgggacattatgtaagaatcttgaatggacagaaatagtttttactctacaaagagttattacgcaaaaactatgagctaggtgctgaacttgacagtgggatggaaaacatcttagtcctggtctttaacctcaagtttgtcatagtctagtgacagtctaatgaggcatagtatgggtcagggtcccagaaggaaatagatggcacactcaaaaaggtaatttgaagagtacttaattgtggaaacatttataaatgaatggctaagattaagaaaaccacagatgtgatgaaacacccagagaccagcaatatcaagaagttggtactgggccagcctggtgagacctacagccatgggccagggctgctggagaggagctgtggccttatccaggttccagaaatccagaacctaccaaactgtggcctggctgagaggaaggtgggaaaataaataccttaacatctttttctccccacctccccatctcccaacttccattggccaaatccacctggaagccagagggcaagggactgtggtttgggctgtaagg

SEQ ID NO: 719607 - DNA, 658 bp, Homo sapiens
  misc_feature 536: n = A,T,C or G
ggaatgattgtagaatgagatctttacagtagaagctcatatttgataagaccaaaaccagtaatgagccaattaataaaaatatttggttaaagtcccaaattctaaaaactataataacatggcacatgcaaattcatttgacaatatttaaatgtagagtcaagacctcccctctattctagtataaatctgtattttgaagtcttttttgcataaatcacatccataaacacatctctctccagtttcaatttatctaaagtgaatcagacatttctcagacattctkaatctagaccatgttaggggtttttatgattcctgttccagtcttttaaacttttcttactaacacctattgtaatagtcatttttttttaaatcgagactttccagagcattcaactctgtttcagaacaacaactatactcttttctgctcatctagtttgacaattttcataatatttaattaaaatatgcttaatttaattaattaaaatactacaatcacaagtctaattaacccaacnaggcctgggaacaaacacaacagactcttggttagtaaataacagcagaagtgggagcagaagtccttggatacattggagagtagttactgccctcaagtgcccagcatgctgtgcatatc

SEQ ID NO: 719608 - DNA, 1165 bp, Homo sapiens
ttacttacttcttaacgacccacctgtctgccttattttatgtgaaaggttataaggcataggccacttttgcatcttaaagtgaaaagaagtttaggcctcctttttattttattttatttttattttttgagacagagtctcactctgttgcccaaactaacaatctcagctcactgcaacctccccctcctgggttgaagcaattcttgtgcctcagcctcctgagtagctgggactacaggcacctgccaccatgcccagctaattttttgtattttagtagagacagggtttcaccatgttggccaggctgcactcgaactcctaagctcaggcaatccacctgcctcggcctcccaaaggccaggtattacaggagtgatcggccatgcccgacctaggtctccttctaagagtcttctccatccctttaatatcttttttcagaaaagatctctttttgcaattaataaggcatattgcagacattggatatataccacttttcatctctctggaatacttcccaaagaaactctgggcaaaccttggtaacaagagacagacatggctggcaattcacttggcttctgactcacaccaataaaaacctatacctccaaaaggaaggttcaatcagttgcacagagaaggcttttataacccatctggtacacactccttattttatagctgagaagttcaggtcagatggaatgggcttactagcaaaacctttcaccccactttagaaaggtttcctgagatttcctttgccctacccagtcgggtatagtaggcccaatggttgcagratagacaatgtttgggcagatcaagtacacctagggaatccatatctgcaaacatctctttcatcagctgtaaaattagagaggaggaaaaagcattctgagtttcttcctagcattcttaatattctataacttccagaattattttcaataacttgagccctcaagcacatggaatgttgacatctaggtccttcaatgcagagagtaaaattcctcctgacctcaaagctactcacaaataggttatgttccaaaagtgtttgtgagcaaaattttagtcagaataattttgcagtggaaaatgtattatatacggtggtgtgacaggccaggtcagaagataa

SEQ ID NO: 719609 - DNA, 1165 bp, Homo sapiens
ttacttacttcttaacgacccacctgtctgccttattttatgtgaaaggttataaggcataggccacttttgcatcttaaagtgaaaagaagtttaggcctcctttttattttattttatttttattttttgagacagagtctcactctgttgcccaaactaacaatctcagctcactgcaacctccccctcctgggttgaagcaattcttgtgcctcagcctcctgagtagctgggactacaggcacctgccaccatgcccagctaattttttgtattttagtagagacagggtttcaccatgttggccaggctgcactcgaactcctaagctcaggcaatccacctgcctcggcctcccaaaggccaggtattacaggagtgatcggccatgcccgacctaggtctccttctaagagtcttctccatccctttaatatcttttttcagaaaagatctctttttgcaattaataaggcatattgcagacattggatatataccacttttcatctctctggaatacttcccaaagaaactctgggcaaaccttggtaacaagagacagacatggctggcaattcacttggcttctgactcacaccaataaaaacctatacctccaaaaggaaggttcaatcagttgcacagagaaggcttttataacccatctggtacacactccttattttatagctgagaagttcaggtcagatggaatgggcttactagcaaaacctttcaccccactttagaaaggtttcctgagatttcctttgccctacccagtcgggtatagtaggcccaatggttgcagaatagacaatgtttgggcagatcaagtacacctagggaatccatatctgcaaacatctctttcatcagctgtaaaattagagaggaggaaaaagcattctgagtttcttcctagcattcttaatattctataacttccagaattattttcaataacttgagccctcaagcacatggaatgttgacatctaggtccttcaatgcagagagtaaaattcctcctgacctcaaagctactcacaaataggttatgttccaaaagtgtttgtgagcaaaattttagtcagaataattttgcartggaaaatgtattatatacggtggtgtgacaggccaggtcagaagataa

SEQ ID NO: 719610 - DNA, 1433 bp, Homo sapiens
aagtgaatctggtttcccttttccagaaatacaccataggtaagggggaatcaatagtgtgtgaataaagactagtaatatatgccctaataattcactgatataaaacaaatcagtgaggaataactgctgtgtgtatatttggagaggggaaaggggcagttagtccaacttgccttcatggatcagagaaaagaaagaatggaaagttaaattcaaatctaagaccccattctttgaatatatctccttcccacctcagagggaaaaattcagtctattcctctgtaaaaccaayagctacataaggaatagcatctcttcatctaggtacaaaatctttccttggttcacatagttaagaatccaaaaacataacaatcgcaaagcaggccaaacccaataatattcatgaactcagaaaaatgagcacaggctttgtatcatagccctttaacctctgcaaaccacacattagataaaggccagcaaactttttctgtaaagggccaaatagtagacaccaaaacatttaataagccgaaaggctcgagagccacactaattaacactgctgttgtagtggaatatccacggaaaacacgcaattgaacagtatggtcatattccagtaaactttatttatggatgcaggcattttaatttcatgtaattgtttttcgtttgtttgatttttgttgttttgtttggttttattttgtttttgagacggagtctcactctgtcgcccaggctggactgcagtggcgcgatctccactcactgcaagctccgcctcccgggttcacgccattctcctgcctcaccctcacaagtagccgggactacaagcgcccgccaccacgcccggctaattttctgtatttttagtagagacggggtttcaccgtgttagccaggatggtcttgatctcctgacctggtgatctgtccgcctcggcctcccaaagtgctgggattacagacgtgagtcactgcgcccagccaaaaattattcctttgataatctttataaagtcactggtatagcaaattttttaattaatatgaatcataaaaataaaaatattatttaaaatatccttatattatttgatgggcaaccgattcaaggactttattaatcctaattccctcaacacgtattttttcaatgtctgtccatcttatttgtgacaatttcctcatttataagagaacagaaattttttttttttttttttttttttttttgagatggagtctcgccctgtcgcccaggctggagtgcaatggtgcatctcggctcactgcaacctccgcctcctgggctcaagcaattctcctgcctcagcctcccgagtagctgggattataggcacctgccaccacgcctggctaatttttgtatttttagtagagatggggtttca

SEQ ID NO: 719611 - DNA, 1433 bp, Homo sapiens
aagtgaatctggtttcccttttccagaaatacaccataggtaagggggaatcaatagtgtgtgaataaagactagtaatatatgccctaataattcactgatataaaacaaatcagtgaggaataactgctgtgtgtatatttggagaggggaaaggggcagttagtccaacttgccttcatggatcagagaaaagaaagaatggaaagttaaattcaaatctaagaccccattctttgaatatatctccttcccacctcagagggaaaaattcagtctattcctctgtaaaaccaatagctacataaggaatagcatctcttcatctaggtacaaaatctttccttggttcacatagttaagaatccaaaaacmtaacaatcgcaaagcaggccaaacccaataatattcatgaactcagaaaaatgagcacaggctttgtatcatagccctttaacctctgcaaaccacacattagataaaggccagcaaactttttctgtaaagggccaaatagtagacaccaaaacatttaataagccgaaaggctcgagagccacactaattaacactgctgttgtagtggaatatccacggaaaacacgcaattgaacagtatggtcatattccagtaaactttatttatggatgcaggcattttaatttcatgtaattgtttttcgtttgtttgatttttgttgttttgtttggttttattttgtttttgagacggagtctcactctgtcgcccaggctggactgcagtggcgcgatctccactcactgcaagctccgcctcccgggttcacgccattctcctgcctcaccctcacaagtagccgggactacaagcgcccgccaccacgcccggctaattttctgtatttttagtagagacggggtttcaccgtgttagccaggatggtcttgatctcctgacctggtgatctgtccgcctcggcctcccaaagtgctgggattacagacgtgagtcactgcgcccagccaaaaattattcctttgataatctttataaagtcactggtatagcaaattttttaattaatatgaatcataaaaataaaaatattatttaaaatatccttatattatttgatgggcaaccgattcaaggactttattaatcctaattccctcaacacgtattttttcaatgtctgtccatcttatttgtgacaatttcctcatttataagagaacagaaattttttttttttttttttttttttttttgagatggagtctcgccctgtcgcccaggctggagtgcaatggtgcatctcggctcactgcaacctccgcctcctgggctcaagcaattctcctgcctcagcctcccgagtagctgggattataggcacctgccaccacgcctggctaatttttgtatttttagtagagatggggtttca

SEQ ID NO: 719612 - DNA, 592 bp, Homo sapiens
cggggcaggagcaggcagtccacctaaggcrgccactgaccaactgcagtgatgtgggcaaggtgagcccagggctgttgtggctaccaattttttcaagaaaagccagaaatttcaaactcagaaatttggattctattttattttaaactcccaacatttaaaagtttacaacgaaacatttgaaacaaaaactccacatatcaaatcggcctgtagtctgcgtctgttgcctaaggagaagtgtgagtgttcagaaggtggtcagtgaagaagtaaagagctcaggaagaaaaacgtgatacagaacagtaaaaaggaattggtttgcagtgaccattgaatagaggatgaggacgttgtcagcgattacctaggatgtttggtcgacccctgacgatcatggatttaatttgtttgtttttcagaaatcactgactgcttttgtcaaaatcagaagagtactcatgtggctatttgaaattttgtcctggtaaagatcccatgcattggctccagggcttccaggagtcagggactcaggtggtttgcaagcaaggctcagccaggaacctcctcacatccactttat

SEQ ID NO: 719613 - DNA, 1456 bp, Homo sapiens
tgtacacaccaccattgttgcattattgcaacttaaaaaatgtgcttgctttgcccgcatgagaattaacacaggggtcttaatttacctttgcatctctaaaactttgccatgtgcctagctcatgtcaggccctcaacaaatgttcactgaaatgaaagaacaactaagagcttaatatttcaaaataacacctttcttctctggttagaaacttctttataaaactgcatacaaaatagtctgcatttctgtttgtctatcagtgactcaggcaattggagtttttcaaaacatggctaatgcagagggtatttgaatgctgttgagtggagagagacttccctccaaattaattgtccctgctaattgctttaagcaggactgttcccaatagacgacatatagtttccttaagtcactggtggtgtgaactggttgacaaagaacctccataaatcctagtacaacttcatcatgaccctcaaatctacgatgatggcattcttatgaagctagacctgcttggtcacttccagaatctggttctaccaaccagtccttgtaggcatttgatttgacatatttagtaacaactatttagaaaggactgcactagctgtcagggtgggggatatcaaagagagtatatatagataaaacaaatgaatttcatggccccaaggagctcatagtgtaggaagaaacaggcatccaaataaatcaattgcaatgcagatttgtacgtgtactcttgggtgtacttattgttttcataacatccatctccttgtaatgtgtgcatcgttttatcacactggagattaagttcctctcgtaaaggcctttacatttttgagactcacttttaacagagctctttccaaagcactattgtgttcagtacatgggtggctgccttacttcctaaccgagggctggggaggacctcyatgtctcatgcatgcatcattgtcatcgttataactccttctgagaataggaagtcaggaacacaatggggcaccccacagactgtcaatggtttagaaatgtggagacttaattcctctctctgcaggagaggatggaggtttcagaatgtctagacttagagtgatgaaagacaacctcagtactttttggagacaaatgcttttgctggagtgacagcttaattacccaggcaatcaggtcagttttcagaaaatccagtttgtgctcttatttagccctctaaacctttttgaagcaaggcttctttcattcttttgcaaatgagctggagaagatgcaaggaagatagatggaagtggagttatctaattgggttgggaacaggaatctacccacttcaccacacacacacatacacacacacacatgcccaactcctatctaaactcaagggccaagaatgggaaatgatgttgaggaggagagtaggatgctgaac

SEQ ID NO: 719614 - DNA, 1456 bp, Homo sapiens
tgtacacaccaccattgttgcattattgcaacttaaaaaatgtgcttgctttgcccgcatgagaattaacacaggggtcttaatttacctttgcatctctaaaactttgccatgtgcctagctcatgtcaggccctcaacaaatgttcactgaaatgaaagaacaactaagagcttaatatttcaaaataacacctttcttctctggttagaaacttctttataaaactgcatacaaaatagtctgcatttctgtttgtctatcagtgactcaggcaattggagtttttcaaaacatggctaatgcagagggtatttgaatgctgttgagtggagagagacttccctccaaattaattgtccctgctaattgctttaagcaggactgttcccaatagacgacatatagtttccttaagtcactggtggtgtgaactggttgacaaagaacctccataaatcctagtacaacttcatcatgaccctcaaatctacgatgatggcattcttatgaagctagacctgcttggtcacttccagaatctggttctaccaaccagtccttgtaggcatttgatttgacatatttagtaacaactatttagaaaggactgcactagctgtcagggtgggggatatcaaagagagtatatatagataaaacaaatgaatttcatggccccaaggagctcatagtgtaggaagaaacaggcatccaaataaatcaattgcaatgcagatttgtacgtgtactcttgggtgtacttattgttttcataacatccatctccttgtaatgtgtgcatcgttttatcacactggagattaagttcctctcgtaaaggcctttacatttttgagactcacttttaacagagctctttccaaagcactattgtgttcagtacatgggtggctgccttacttcctaaccgagggctggggaggacctccatgtctcatgcatgcatcattgtcatcgttataactccttctgagaataggaagtcaggaacacaatggggcaccccacagactgtcaatggtttagaaatgtggagacttaattcctctctctgcaggagaggatggaggtttcagaatgtctagacttagagtgatgaaagacaacctcagtactttttggagacaaatgcttttgctggagtgacagyttaattacccaggcaatcaggtcagttttcagaaaatccagtttgtgctcttatttagccctctaaacctttttgaagcaaggcttctttcattcttttgcaaatgagctggagaagatgcaaggaagatagatggaagtggagttatctaattgggttgggaacaggaatctacccacttcaccacacacacacatacacacacacacatgcccaactcctatctaaactcaagggccaagaatgggaaatgatgttgaggaggagagtaggatgctgaac

SEQ ID NO: 719615 - DNA, 651 bp, Homo sapiens
catccaaaaagccaagttgcaaacccgtgagtatctgctgttctatgggtggctgagagattggcctggctaccaatatggcttcagtcatagcatctgcttgccagtgtgcccgtgttctgtgcatcagagttgagctggcttcgctatctgcatctgakcacaaaacacagtcttcccagggcttgcctagcttgcactgccctcaatacagtcattaaaaaaaaattgacatgatggggtcatgtcccattaaagagattttctaaagcattatctttattattgtttaattccacttttaaaattcagattaagagcaagaacctgctcagagccagccacgcttcttgcttgtcatttgctcccttctcttacacttcctacacagaaaaacaaaacaggtggaaggcattttccagcctcagggccatgcttctgagagaacaatgcctcctatattgccatctacagggtgttgtgcaggtttgctctgtaaaccggcagtcctttctgaagccaaaggaggagttgctggtaataataaagtccatgaagtcacagcagtgttctgctcattcatgtcacaaggaaatgtttgggggttttgtggaacacatttccagccaggaccagaggcacaggggagct

SEQ ID NO: 719616 - DNA, 651 bp, Homo sapiens
catccaaaaagccaagttgcaaacccgtgagtatctgctgttctatgggtggctgagagattggcctggctaccaatatggcttcagtcatagcatctgcttgccagtgtgcccgtgttctgtgcatcagagttgagctggcttcgctatctgcatctgagcacaaaacacagtcttcccagggcttgcctagcttgcactgccctcaatacagtcattaaaaaaaaattgacatgatggggtcatgtcccattaaagagattttctaaagcattatctttattattgtttaattccacttttaaaattcagattaagagcaagaacctgctcagagccagccacgcttcttgcttgtcatttgctcccttctcttacacttcctacacagaaaaacaaaacaggtggaakgcattttccagcctcagggccatgcttctgagagaacaatgcctcctatattgccatctacagggtgttgtgcaggtttgctctgtaaaccggcagtcctttctgaagccaaaggaggagttgctggtaataataaagtccatgaagtcacagcagtgttctgctcattcatgtcacaaggaaatgtttgggggttttgtggaacacatttccagccaggaccagaggcacaggggagct

SEQ ID NO: 719617 - DNA, 1207 bp, Homo sapiens
agaccagtttactttttttaattaaaaagaggaatacaatgtcctttccataagtagactcacaaagaaggtaggagtcattttcttccattaatgtcacaacaaaacagtcttacatactctgaattggagtgaaaattagagaaataaatcacctgcmtgatgagcatacattatcatggaatttttaaaggcctcatcttttgggtacctggcaataactaagcaaaaataaccaacagggtaaaaaaatgccaccatcatttcaatgaaaataaccaaactgctcccagaaaacaaagtagcaaatccatttaggctcactggtgcatgtctggaactttccaaatgaaaccttgcatcaaagaaaagtttaaacacttttcttcaagatcagtcaaaactaaactaagattgcaggcttaaagagttacaaatttccactcttaaaagcaatcttattttgtttgattgcagttgggtccaaagcaagaaatgaaatatttaaaatggaggatttgtaatatattactggtatcctttcttaagtggctatccctccaaagaatgccaaaactttgtagacttgattggattggtactggaaatggtaaacaacactgcaaaataatgaagagaacattttatccaagttagcacaaatgaataagctttatttttaaatgaaaaattccaaagatactgattcacaaaaagagggagcatttcaagttcacattagaaaagtcattggtaggaaccaacaatacagtatttagtgtagctgttctggaacaaaatggagctaaattgattaagcagggatatgagctacaaaatgaatatcagatataacagactaatgctttaaagaactacaagctgctgattctcaatagccttatgagtttttaattcttacattatagaactctataaaccaaatcaccttcaaaatgataataaattgaaaatcttcaaaataatcaatcttctttgaatgtgcttctattcaaaaagaatgtgagaattgagtttttccaaaaagtgacaaacctaatttcagtgatgatgacttttttttatttccaactggagaaagaggcaaagatctagttgctatttaagtttgacaaagtctacattttgaggaaatcttattatccttagaatatttagaataatgctagtagttaagagtgaacaa

SEQ ID NO: 719618 - DNA, 596 bp, Homo sapiens
gcctggttgagactttctctgagctgtgctgtagtcagaagctcgtccattcctccatcccctctctttctctttataggtatcagccccgcatggcagtgtgaggctatccctgccttctcaggctctatcctcccttcatgcttcaaagacttttcttacacttctaattccatctcaccgtctgcttcccagaggaccagaactggcacaagatctttgtgaaaagtgtttcttcttttttcaaatgtctgggcggtttcacatacttaccccactctcctttttgtgagaatccagacccagggatttttgtctgtaactattgagatgggatttttcccttgatcttgacccccttcgtgggcaggaactggagtgtctcgtttcactcagcctgcagttcatggacggctaagtgttaacagctcagtgaagggtcagggtgacagcctcctgcacctgccctttttcracacccaagttcttgttcggtgtccaggaagaatcaagtcacaggaactctttgaaagacaatgaatgtggaagactttattgagcagtagaagtggctctcatggaaggggagctggaaa

SEQ ID NO: 719619 - DNA, 667 bp, Homo sapiens
ccaatgaagagtctttgaaggaatccatgtttcagttcgaaagctttgaactagaaaagtcataaattctcaatttaggcaaaattacttattcagtgtatgcctttttctgtgcttggctattttgctagaagaataataaaatattgttcatataaattttagttatctgaactcatatgcaattggaagtgaatgttttagagcaggtattttgatgtgtgctttattgttggatatgggtttgggggatagggaatggccggggagtcctactgagataattagggtgcactggtggcctcaaacatgggccagattattgacactcctgtgttttccaccctctactgctgattggagtttttgctgccctaccccttaagacttccttttcyttcctcttatcctttctggtaactggtggcagcaaggttagtggctccatctgtgggctcatgatggtgttggcaagatactccttagcaattgttataccagctggaacatcatcccagcatcactgaagaacctgggcaggggataatggaagctgttctatggtgttaaggagagcattttttgtcatgattagttagaagtcaaatagcatcgagagtggtgaagactcaaagcgaggtctttcccctgtagagtaaacgtgtgt

SEQ ID NO: 719620 - DNA, 2272 bp, Homo sapiens
ctgacaacacatgggatggtttgactgctcctgtcagtggaggatgtggaagaaaacacagggattgctgaaccactgcagaaaggagagcagtggtgctgggaaatccaacagacagcaagccagagactggcattggagatgtactgaggccagtccctgagaaggcttcaaccccaggatgaagggtgtggggctgagaccccagcatggccaccttccaccacccatagcttctggacrggggagctgcatggcactgtgtacaggtacaagagtgagagagcatgcatgcagaagtgttcagaaggcaaggcaaatgcagtgcctgcatttagtacctagaaaatgctggctggtgtgacaggaagttctcctgtatacaagggaaaactgtacaacacccctcaagtgtgaagaagcaatcatgagcctgaatttgcaggcggtctgctgttagtttacaggatcacccaaccaaaaagcagcattggtctcaggaaactagggagaagggatgttagcctactcccattacttcctccaggctcctcaagcttggtcccgataaaaacaatagtattttcctttaatataggcagttgttgctctctcattcttatctaaaggatgaagaaaagcatcatcaaaaagtactttactctttaggttgatcaggaacatgcacatcaagtaagaagagcgagcttgccacgaaaattcagctttaagaaaaggccaggtgcagtggctcatgcctgtaatcccagcactttgggaggctgaggcgggcagatcacttgagttcaggagttccagaccagcctggccaacatattgaaaccccgtctctactaaaaaatacaaaaattagccgggtgtggcagcgcgtgcctgtaatcccagctactcaggaggctgaggcaggagaattgcttgaacccaggaggtggagcctgcagaaagccaagatcgtgccattgcactccatcctgggtgaaagagtgagactccatctcaaaaaaaaaaaaggaaaatcaaataccgcatgttctcatttacaagtgggagctaaataatgagaacccatgatcacaaagaggggaacaacacacaccagagcctacttgagggaggaggatgggaggagagagaggatcaggaaaaataactattgggcactatgctgagcacctaggtgatgaaatggtctgtatagcaacccctgtgacacgagtttgcctgtaataacaaacctacacatgtagccctaaacccaaaacaaaagattaacaaagaacagtgcttgtctcctccccagctgattgctatacctatacaaaatatagaaattttgtataggattctatacaaaatatagaaatcctggagccgaccctatcaacaaggactttgggtggcaataaaaaggtcctccctgccatgcaaggagagttgacagaaaaaaaaagactggttgtatccagccgtgtctaacaaaattagagtaggttactccctttcagcaagacaagcatggtaacgcccattctgcccctgaaattgcaagcttattaatttgtgccactacactgcttctttgcaagccaacaccatgaggaaagcaatatagaagacctacgtggacttcaaggtctagtacctcacagtaatcatgtactcctgaaaacaggggagcctcttaagctcccaagagtgggttaaaacataccttttgactgagaaataattaattctatgttgtcaggggaattctggatcatcctaacagccatgttgaatgtgaagccctccagactgatgtgattcagggctagtatctgccctcctagaaaaataaaacatctcaataatccttcaaggaaataaaaaagagtggtttcttaaaacagcatctctagtaatttaaaaagatgtacctggtttgatcgtttttgctttttctgctggtcctccaggtataatagaagatataaaaatgccagggtcagcttggcctgaatactctccctcattaatgacaaaccctgtaatccaagatgatagtccatgataagatgatacttagtgattttgctgttcagagaggttaggttatttccctcatatcacacagctaccaagtggcattagctgatagttacagtcaggtcttctgatcctcaaatagaggatcttttctactttaccatgatacttggagaaaggtggattgttccccattagtaagcacagctaaagctaggaatac

SEQ ID NO: 719621 - DNA, 2272 bp, Homo sapiens
ctgacaacacatgggatggtttgactgctcctgtcagtggaggatgtggaagaaaacacagggattgctgaaccactgcagaaaggagagcagtggtgctgggaaatccaacagacagcaagccagagactggcattggagatgtactgaggccagtccctgagaaggcttcaaccccaggatgaagggtgtggggctgagaccccagcatggccaccttccaccacccatagcttctggacaggggagctgcatggcactgtgtacaggtacaagagtgagagagcatgcatgcagaagtgttcagaaggcaaggcaaatgcagtgcctgcatttagtacctagaaaatgctggctggtgtgacaggaagttctcctgtatacaagggaaaactgtacaacacccctcaagtgtgaagaagcaatcatgagcctgaatttgcaggcggtctgctgttagtttacaggatcacccaaccaaaaagcagcattggtctcaggaaactagggagaagggatgttagcctactcccattacttcctccaggctcctcaagcttggtcccgataaaaacaatagtattttcctttaatataggcagttgttgctctctcattcttatctaaaggatgaagaaaagcatcatcaaaaagtactttactctttaggttgatcaggaacatgcacatcaagtaagaagagcgagcttgccacgaaaattcagctttaagaaaaggccaggtgcagtggctcatgcctgtaatcccagcactttgggaggctgaggcgggcagatcacttgagttcaggagttccagaccagcctggccaacatattgaaaccccgtctctactaaaaaatacaaaaattagccgggtgtggcagcgcgtgcctgtaatcccagctactcaggaggctgaggcaggagaattgcttgaacccaggaggtggagcctgcagaaagccaagatcgtgccattgcactccatcctgggtgaaagagtgagactccatctcaaaaaaaaaaaaggaaaatcaaataccgcatgttctcatttacaagtgggagctaaataatgagaacccatgatcacaaagaggggaacaacacacaccagagcctacttgagggaggaggatgggaggagagagaggatcaggaaaaataactattgggcactatgctgagcacctaggtgatgaaatggtctgtatagcaacccctgtgayacgagtttgcctgtaataacaaacctacacatgtagccctaaacccaaaacaaaagattaacaaagaacagtgcttgtctcctccccagctgattgctatacctatacaaaatatagaaattttgtataggattctatacaaaatatagaaatcctggagccgaccctatcaacaaggactttgggtggcaataaaaaggtcctccctgccatgcaaggagagttgacagaaaaaaaaagactggttgtatccagccgtgtctaacaaaattagagtaggttactccctttcagcaagacaagcatggtaacgcccattctgcccctgaaattgcaagcttattaatttgtgccactacactgcttctttgcaagccaacaccatgaggaaagcaatatagaagacctacgtggacttcaaggtctagtacctcacagtaatcatgtactcctgaaaacaggggagcctcttaagctcccaagagtgggttaaaacataccttttgactgagaaataattaattctatgttgtcaggggaattctggatcatcctaacagccatgttgaatgtgaagccctccagactgatgtgattcagggctagtatctgccctcctagaaaaataaaacatctcaataatccttcaaggaaataaaaaagagtggtttcttaaaacagcatctctagtaatttaaaaagatgtacctggtttgatcgtttttgctttttctgctggtcctccaggtataatagaagatataaaaatgccagggtcagcttggcctgaatactctccctcattaatgacaaaccctgtaatccaagatgatagtccatgataagatgatacttagtgattttgctgttcagagaggttaggttatttccctcatatcacacagctaccaagtggcattagctgatagttacagtcaggtcttctgatcctcaaatagaggatcttttctactttaccatgatacttggagaaaggtggattgttccccattagtaagcacagctaaagctaggaatac

SEQ ID NO: 719622 - DNA, 2272 bp, Homo sapiens
ctgacaacacatgggatggtttgactgctcctgtcagtggaggatgtggaagaaaacacagggattgctgaaccactgcagaaaggagagcagtggtgctgggaaatccaacagacagcaagccagagactggcattggagatgtactgaggccagtccctgagaaggcttcaaccccaggatgaagggtgtggggctgagaccccagcatggccaccttccaccacccatagcttctggacaggggagctgcatggcactgtgtacaggtacaagagtgagagagcatgcatgcagaagtgttcagaaggcaaggcaaatgcagtgcctgcatttagtacctagaaaatgctggctggtgtgacaggaagttctcctgtatacaagggaaaactgtacaacacccctcaagtgtgaagaagcaatcatgagcctgaatttgcaggcggtctgctgttagtttacaggatcacccaaccaaaaagcagcattggtctcaggaaactagggagaagggatgttagcctactcccattacttcctccaggctcctcaagcttggtcccgataaaaacaatagtattttcctttaatataggcagttgttgctctctcattcttatctaaaggatgaagaaaagcatcatcaaaaagtactttactctttaggttgatcaggaacatgcacatcaagtaagaagagcgagcttgccacgaaaattcagctttaagaaaaggccaggtgcagtggctcatgcctgtaatcccagcactttgggaggctgaggcgggcagatcacttgagttcaggagttccagaccagcctggccaacatattgaaaccccgtctctactaaaaaatacaaaaattagccgggtgtggcagcgcgtgcctgtaatcccagctactcaggaggctgaggcaggagaattgcttgaacccaggaggtggagcctgcagaaagccaagatcgtgccattgcactccatcctgggtgaaagagtgagactccatctcaaaaaaaaaaaaggaaaatcaaataccgcatgttctcatttacaagtgggagctaaataatgagaacccatgatcacaaagaggggaacaacacacaccagagcctacttgagggaggaggatgggaggagagagaggatcaggaaaaataactattgggcactatgctgagcacctaggtgatgaaatggtctgtatagcaacccctgtgacacgagtttgcctgtaataacaaacctacacatgtagccctaaacccaaaacaaaagattaacaaagaacagtgcttgtctcctccccagctgattgctatacctatacaaaatatagaaattttgtataggattctatacaaaatatagaaatcctggagccgaccctatcaacaaggactttgggtggcaataaaaaggtcctccctgccatgcaaggagagttgacagaaaaaaaaagactggttgtatccagccgtgtctaacaaaattagagtaggttactccctttcagcaagacaagcatggtaacgcccattctgcccctgaaattgcaagcttattaatttgtgccactacactgcttctttgcaagccaacaccatgaggaaagcaatatagaagacctacgtggacttcaaggtctagtacctcacagtaatcatgtactcctgaaaacaggggagcctcttaagctcccaagagtgggttaaaacataccttttgactgagaaataattaattctatgttgtcaggggaattctggatcatcctaacagccatgttgaatgtgaagccctccagactgatgtgattcagggctagtatctgccctcctagaaaaataaaacatctcaataatccttcaaggaaataaaaaagagtggtttcttaaaacagcatctctagtaatttaaaaagatgtacctggtttgatcgtttttgctttttctgctggtcctccaggtataatagaagatataaaaatgccagggtcagcttggcctgaatactctccctcattaatgacaaaccctgtaatccaagatgatagtccatgataagatgatacttagtgattttgctgttcagagaggttaggttatttccctsatatcacacagctaccaagtggcattagctgatagttacagtcaggtcttctgatcctcaaatagaggatcttttctactttaccatgatacttggagaaaggtggattgttccccattagtaagcacagctaaagctaggaatac

SEQ ID NO: 719623 - DNA, 601 bp, Homo sapiens
agagaggtattggaatcaggaaaatcaggctttttaccttcttacccctccttcaccctgcattggtggtascaccatttccccaaggcttcctcatgccaaagcttgattgctctctttcctcatgcctgtttctaatcccaaagtagtctcctgaactccgcctcccagttgtatcccaaatctggctgcttcttaacacttcagctacagcctgagtccaagccacatcatgttgacctgaatgactgctgcttgacctcctttagtccctgtgcaccagtaacccgagtggcccctctgaagaacggaggagggcatttcctgcttaaccctccgtgccagcccagtggcttcccactgcatgcaggatggtggcatcatgctcctctgatccccaaggccctccagggtccctgccacctccacaacttcctccacttctgcttcattaacgatggcccaagcacacttgtatttttgtccctcaaacatccaagtgggttcccatctcagggcctttgttcatgctgttccttctgcctggaatgcccttaccccaaatgtgggcatggctgcctccttctcagaggtgctttac

SEQ ID NO: 719624 - DNA, 601 bp, Homo sapiens
agagaggtattggaatcaggaaaatcaggctttttaccttcttacccctccttcaccctgcattggtggtaccaccatttccccaaggcttcctcatgccaaagcttgattgctctctttcctcatgcctgtttctaatcccaaagtagtctcctgaactccgcctcccagttgtatcccaaatctggctgcttcttaacacttcagctacagcctgagtccaagccacatcatgttgacctgaatgactgctgcttgacctcctttagtccctgtgcaccagtaacccgagtggcccctctgaagaacggaggagggcatttcctgcttaaccctccrtgccagcccagtggcttcccactgcatgcaggatggtggcatcatgctcctctgatccccaaggccctccagggtccctgccacctccacaacttcctccacttctgcttcattaacgatggcccaagcacacttgtatttttgtccctcaaacatccaagtgggttcccatctcagggcctttgttcatgctgttccttctgcctggaatgcccttaccccaaatgtgggcatggctgcctccttctcagaggtgctttac

SEQ ID NO: 719625 - DNA, 1045 bp, Homo sapiens
ttgtttgttttaattcttcaagcctttaaaaaagcttttcacccttgaaggtaggtgtggccaagtgactgactctgaacaagggagtgtgggcagaaatgatgtgtgctccatgtggccaaacctttaagagcctattaaacttaaggcaaggtcctcttccctagccacagtcagaaacacatttgccatggagctgccctcactctgggctccttgatgacaatgaggaacagagaaagcctgccaaytgcagtgcacatgtaacatggacaagagaagaaccttttgcgtgttaagttgctgaaacagcagtgtttgttactgtcctgaaaattagcctgtcttgcttgataacacccttaggggaaatgaaatttgaagatgtcctccttgaaagtaacttggcaatatataacaaggctttagagcatctcaaatttgcattgactgtttcccattatcattcattcattcattcatccattcagtcatacattcattagatattttacaagattgccatatctgtataaggaaacttagtaggttcaggagaaacaaatgcagcagaacagataggtgccagcacaatctcttcaagcaatttcgtttgagagattcttttataaggaagagttagaaaatataattaataaataagtaaacaaaaaatcatgcaaaaagcatattaatatattgagtagtcagatacaaggtatatatccaagtagaggagaatattaaaatcaatttttttctgtccatagaatggaatgttctgtcatttaaattataattttaatataatatttatgaatacagcaaatactagtagtataataattaatgaagaaaggaaaatagcattcaagtgtagcatagtctaaatgttataaaagtatatgcatatatttttaaatgaggtaaagttatacataaaattattaaagttgaatatcttcagatagaaaaaagacttaaatttttttctttatatcttttgtatgcaaaagtttaataataaacttgtattttttaataa

SEQ ID NO: 719626 - DNA, 1045 bp, Homo sapiens
ttgtttgttttaattcttcaagcctttaaaaaagcttttcacccttgaaggtaggtgtggccaagtgactgactctgaacaagggagtgtgggcagaaatgatgtgtgctccatgtggccaaacctttaagagcctattaaacttaaggcaaggtcctcttccctagccacagtcagaaacacatttgccatggagctgccctcactctgggctccttgatgacaatgaggaacagagaaagcctgccaactgcagtgcacatgtaacatggacaagaraagaaccttttgcgtgttaagttgctgaaacagcagtgtttgttactgtcctgaaaattagcctgtcttgcttgataacacccttaggggaaatgaaatttgaagatgtcctccttgaaagtaacttggcaatatataacaaggctttagagcatctcaaatttgcattgactgtttcccattatcattcattcattcattcatccattcagtcatacattcattagatattttacaagattgccatatctgtataaggaaacttagtaggttcaggagaaacaaatgcagcagaacagataggtgccagcacaatctcttcaagcaatttcgtttgagagattcttttataaggaagagttagaaaatataattaataaataagtaaacaaaaaatcatgcaaaaagcatattaatatattgagtagtcagatacaaggtatatatccaagtagaggagaatattaaaatcaatttttttctgtccatagaatggaatgttctgtcatttaaattataattttaatataatatttatgaatacagcaaatactagtagtataataattaatgaagaaaggaaaatagcattcaagtgtagcatagtctaaatgttataaaagtatatgcatatatttttaaatgaggtaaagttatacataaaattattaaagttgaatatcttcagatagaaaaaagacttaaatttttttctttatatcttttgtatgcaaaagtttaataataaacttgtattttttaataa

SEQ ID NO: 719627 - DNA, 1045 bp, Homo sapiens
ttgtttgttttaattcttcaagcctttaaaaaagcttttcacccttgaaggtaggtgtggccaagtgactgactctgaacaagggagtgtgggcagaaatgatgtgtgctccatgtggccaaacctttaagagcctattaaacttaaggcaaggtcctcttccctagccacagtcagaaacacatttgccatggagctgccctcactctgggctccttgatgacaatgaggaacagagaaagcctgccaactgcagtgcacatgtaacatggacaagagaagaaccttttgcgtgttaagttgctgaaacagcagtgtttgttactgtcctgaaaattagcctgtcytgcttgataacacccttaggggaaatgaaatttgaagatgtcctccttgaaagtaacttggcaatatataacaaggctttagagcatctcaaatttgcattgactgtttcccattatcattcattcattcattcatccattcagtcatacattcattagatattttacaagattgccatatctgtataaggaaacttagtaggttcaggagaaacaaatgcagcagaacagataggtgccagcacaatctcttcaagcaatttcgtttgagagattcttttataaggaagagttagaaaatataattaataaataagtaaacaaaaaatcatgcaaaaagcatattaatatattgagtagtcagatacaaggtatatatccaagtagaggagaatattaaaatcaatttttttctgtccatagaatggaatgttctgtcatttaaattataattttaatataatatttatgaatacagcaaatactagtagtataataattaatgaagaaaggaaaatagcattcaagtgtagcatagtctaaatgttataaaagtatatgcatatatttttaaatgaggtaaagttatacataaaattattaaagttgaatatcttcagatagaaaaaagacttaaatttttttctttatatcttttgtatgcaaaagtttaataataaacttgtattttttaataa

SEQ ID NO: 719628 - DNA, 627 bp, Homo sapiens
aatctaccaagaaactagaaaacaaaacaaaagaaaaagtaggggttgctattttaattttggacaaaacagactttaaaccaataataataaaaaaagacaaagatgagcattgcataatggtaaagcgttcaattcaatgagaagatttaactcttctaagtatatatgtacccaacacaggagcacccagatttatataaaacattcttgaagaatggcctataatatgctttgattccaatgtaagtgtggagtaggggcaattataaaatgataattatttcaggtatttatcatcatgaagttatatatacatgttcacatacatatatamatacacacacacacacatacatgtaactgggccctttgggatttcagcaacacagatttttttagtcactgaaatcataaaaattctgatcaggcccttgcttgatggcacaggttaactgctcactttttgcccaacattctatgttcctacaatataaatataaactgctgatgtcctgtttctttgtcaagctggaggaaataacttcagggtcacaaaaaagtctgcggaaggaatgaacgccctgaaggacattgtaaccagctgttgatgcccagaagtcttgt

SEQ ID NO: 719629 - DNA, 805 bp, Homo sapiens
tctactttcaggttatcaattcttatctaaaataatccagaaaagaagattttgcattcttttggtctgtatgctagtgctgagtacacaatatttttaaagattgaaactaaattgttttacctgtcctgaaatctaatgaacttcattgtaacaacagctttcaatatcatgagttttgcaaatttgtgttatcatgaacccttaaattgcatcttttcaatgtgttagtacatttaaataaatttataattcatttttatatataaagcatttatgtgattcagtaataaatamtttattataatggtaacttgtataattcactctcacagcttataccctttaaagttctagattagaagggaagatgatggaaactgttgccagttcatcataaacaatttcatttcatttttttccactatacatattgagataatatttcccaggtaccctttgtagttatttgtggccttgtaaactgatctctggcccatgacatgtaagcagaaattatgtgtaccatttagaagtttaaaagtttaagatgtggacacaccttccgcactatctttctcattgtttgctggatcagtggaagtccccaagaacctagactaaggtaaagacacaaaatggaagaagcttgggcccctgggtcattagcactggacttctacctgagaaggggaaattggagattttaagttaagtgtgttgggaaaacattgggaggtcttaagcagggagtgctataatccccatgataggaaatgggttgcaaggaaatgtggtagccatt

SEQ ID NO: 719630 - DNA, 2487 bp, Homo sapiens
ggaaatgcctgaatgcccaggcaaaagtttgctgcaggggcagggccctcatgaagaacctctgctagggcagtgcggaagggaaatgtggtgttggggctccttcagaaagtcactggggcactgcctagtggagctttgagaagagggccaccatcctccagaccctggaatggtagataaactgacagcttgcaccatgtgcctgggaaagctgcagacaatgccagcccgtgaaagcagccaggagggaggctgtaccccgcaaagccacaggctcacacttgacaatgctttgcaaaaacaccttcactataatgatgggacaaaataagggcactttggtaacagtttagtgagggactgatatggaaagaaaatgtttccttcattactacaaccatggtgagcacaaaccagaaatctttaaacaaaattcaatgacaataagaaagaaggaaggaaactgggcttttggagatgtggatgatccatctggagccaccattttcaaggacaacttgttaagtgacatcactgttattgaaaccagttgagtgggtgattctattatttgcagcaaaaaaaaaaaaaaaaaaaattcaaaaccatgcagcccatgtgtggagtttagcctttaacaaaaaatggagagctgctaaagtgttttagaaaaagtataacatggtcagatgtgggttaaaaaatcatgctccagggtgtggagattgggttgcagggatttaaggactggacggaggagtagggagaaatttattaaagaggaccaggtatgaaggggcagattatgaggtagatcttggatgtgttaagtgtaagctgcttttaagttttattagtggagaggacaagaagtcagtgaaatatatgggtctagaacttagaagtgaaatctaggctggagagagattatgtgtcatgagagagacagagagagagagagagagttattgaagtcatggatgtgggtagatgggcctgtggttaatccttgaggagctttcccgcttaatggcagggtagaagaaagtgtgtctccaaaggaaacagaatgaaaggcaatgtagagaatctgaacacacatagacctaaagcaagtccatgcatttccactttagaacccatgggagagagaactggacttgatttctcagcattctcctaattctgagatccttgcttctaagataattctaattgctccatattgtgwtatcaataataaaaccattgaatagttttttgactcatgccaatcgcaaataatcccttttgcctttgaactcatattgcatattatctacattcgtcttatggcatattctaccttgtaatgtgctgatgggcaaatatgtctcatttatcctactaggttaggtgttcttagaggccaggaattatgtcttatttatttctctacttctcttcccggactactctccttaattggcaaagtgtttttgtatactgttggaaatcaatacattctttggtgaatgagtgcttgataagtaagtaaaaatacttaatgaaatggctaaaaactttcttttgttgaattcttttttttttttttttgagacagagtcttgctgtgtcacccaggctggagtgcaatggcaaaaccttgcctcactgcaacctcacaggcagaggaattctccctgggtcagcctcccgagtagctgggattacaggcgcctgccaccacacccagctaatttttgtatttttagtagggatgggatttcgccatgttggccaagctggtctgaaatcctgaccttaggtgatccacccaccttggcctcccaaagtgctgggattacaggtgtgagccactgtgcctggccttttgttgaattcttgaatgtgaactagaacatctgattgaactccaaggtaaataaaaagcctaccctgaagagatctaaaggtcacagaacatgcctctgaagtcctccacctggtgaatgtccagctgtctgtttcaggttgtaaggttactaccaatcactaacttccagatttctgattaaatctaatgattaaagcacacagaagacaaaatagtccttatttaaatcaggcattcttatgtctcccagagttgatcattttcctatctcctgtagcacagatgtccctggttgacaatggtttgacttaatgattttttaagaatgagacacattcagtagaaactgtattttgagtacccatacagccattcggtttttcactttcatacagtgttcaattaatcacatgagatagtcaacattttattataaaatagcctttacattagatgattttgtccaactgtaggttaatgtaattgttctgagagtgtttaaagtaggctaggctaaactatgattaggataaatatattaaatgcacattcatcttctgatactttcaatttatgatgggcttattgggaattgaggagcgtctgta

SEQ ID NO: 719631 - DNA, 586 bp, Homo sapiens
ttttttttttgagacggagtctcgctctgtcgcccaggctggagttcggtggcgcgatctcggctcacttcaagctccgcctcctgggttcacgccattcttcttcctcagcctcccgagcagctgggactacaggcgcctgccaccacgcctggctaatttttttgtattttagtagagacggggtttcaccgtgttagccaggatggtcttgatctcctgacctcgtgatccgccagcctcrgcctcccaaagtgctgggattacaggcgtgagccacactgtgcccggcggtaaatatttctcataaaagctgtttctctgatgtagtagacatctccttccctctgtccttccctccccacttccctccctccattcctctatttctctcttctttcctcccttcctttacctgccttatgtcactttagggaatatcctcttccctgttccacgtgttttagatggggctgacaatcaagtgaatcttatctcacctgccacttggtagccacttaatgcaggctgaccaatcaaattgtcccactccctggatacagtgattggtccaaaaattctagca

SEQ ID NO: 719632 - DNA, 1520 bp, Homo sapiens
tatgtgtggtaatgtaattaatttcagttagaaagatgttttgcaataatggtgacaatatacttaaatatgcatgactaaaatagcaatgcagcgtgggaatatgttttataattgaaatgctatgctattttctttttttttttttcctgtatgaaggagaacagcacttcagttaatttggccagcttcttcacaattgaaacacaatttaaattcttgttggaatagtccgatcacttaaaatatggactatagacacattaccagttcagcctgtagaaagaacatgtatcagctccagcagttatacccatcagtgtaactgaaggagtctgaggcaaaactgtagaggataaaagctcagaattccttttytttttctgcctttctcaccccttccaatgcctctgagcacctcagggtctcagcatccttttttttttttttttttttttaacttggtgaggacctctaatgcacaaaacattagaggttcagtagagtagctttaccaggacattgcatttaaaggaggaacctggaaaaggaaggcttaaagtaaacaaatttaaaggtgatattttgctgtcagtcacaggagatgagagtgttcctcaaatgccaggatttactcctttgataagagagccctgctcatgagacatgtcttcagtcaggccacttgatggccacattcacaacttaaactcccttgcatgaagttttgcattgcactagtaaagtggaagcaatattactctgcactttagatcatttgacaggacccagaaaggcatgctcatgtagtcagccttccagcttggaagaagagagactgacaggccactgccagcttccttggccactgtactaaccaaggactctggtgtttgatgctgacagcagccacagttttttaaagtcttagagcagagttctggttcataaggcctggccattgatgctgctatccatgtgggtggatgtggtggaggagcccaaggtagtggttcaataaatattaattgatgggtattaaaacaatcgatgacccaagggcatgccacctcgtgtgccagagactttaatttgttaaatgaagtaaaccacactgagttgctcttggaagttatgaaaaatgattgtaaagggttttttttttctttttttaagctcaagcactttgagtgatagtagccaaagacaatagtcccagcagccgagtgtagaacctccccatggccctgcaagcagtgtgtatgtagtaacagttttaagtgatatcctttctggggtccagccaattgttaagagagaggaactagaataatatattgctggggattcagccctcttactgatcataaaatttcaaaggagctcaagctgtaggaaattagtttggattagtatttatcttctgattttttttctcctctggggtgaacttgcttcttgtataaagatcttaaaaaatctggccccacagactgtggggaggggggtgcagagaggat

SEQ ID NO: 719633 - DNA, 1343 bp, Homo sapiens
gtaaacatactattgaacatttgtgaagttcttacatctctttaccgatctgcataaacttttcagaaaagaaaactacaatttctgttttgcccatgagaaaatatattagaccaactaaaacaaaatattacatagtgattcataaatattgaagaaaaatttctaatcttaggaattacagaaatgataattggggggtataatccagttaatacatttgattaatatataattactgaatagtaatattaatttagagacattccctaggaataatatagaaatttatgttagtgttcttgtgatttccctacttttctctcattcatataaatctaaattttgaattttaaggatgaataatcataacacatatgtttctggtattcacccatttcatttagtcatttattcactcattcatttaatccacacccaagagactaatccagcacagataatgtgccaggcactgttctagatgttgaggatacagtggcaaaaaggtagaagaggactctgacctcacctagctcagagttgatgacactggacaattaaatcataatgagcaaaggttgtgatgggaccagtctgtgaaacatacaagtgtgtcatagagcttattagaaatacttgtgaagaagacttaacttttgaaatcacacaggaagagggtttatactgttgctggtcatttatagggcggccatttctcctgaagctagaacttggaaacatccataatatttatattagaaggaaaattaatcatttcccctaattcaggttgtcttttattttaaaggaagagagttgagatggctgcagacttgtgccatgctggcccaaacttgtgacactaacccaaaatcgaagaatttaacatgctgaaattaaaatatccctgcccaacaccaagactaaaatatccctgcccaatatatgaattgttacgtgtgtttaacaccagkcaattggcatttaaaaatgagttataaaggaatctggaaaatcctgttaaaatttaactatcagttatgtatctttttttaaaaagcttgtgactttacaattatatttaacttggagcaaatagactccttactttctcatcttaaaagaagataaatgtcttaactcttttgtgaccaagtgcagtgacaaaataccacataaataactactggctgtcaaaaaaatcaagttataccaattgcaaaatactgataaatagaaattgggtaatgatgaagggttcattgatttaatcctccaaactaattttgcataaaatttagaacttctttaaattcaaaattggggaagaaaacattaag

SEQ ID NO: 719634 - DNA, 1456 bp, Homo sapiens
tatagtcttctgcgtttcctagttcactttatgtagtaacttattggttctcagtagtggcatgatttttgttggcttgtttaatggcggacatttttaaatcaagatctataaaggaactcaagatctaaatatctaagatttttaaagagcttctctggttaaagctagaatggtggctttgaagatctggtcccttggccacctcttgatacacaatagcatttcttaggaaatattgctgaagccttgggttcagggtagcatcttaagaaaccactgctaacagcatccttagtttctacccagtaaatgcaaataggcaatctctcaccccaccctagccagttgtggtctccagacattgccaaatgtcctgtaggaggaaaatcaccccgacttgggaaccactgatttaaatcatcaatgatgtatggaagtcaattgcttacaatgacttatgaccccattcatttactcaacagaattgtggaattcccactatattgaagacatggaaaatgagaatgaaaactcagttcctactctcaaaactgtacaatcttgtaaaaatgttaagaatttaacaggtgaaaaccttatgcaaacttttttttttccaacagtttaaggtaacaataacagaccaggacacaggaataaataattaatagcaaaatcttataaatgaagaaatagtttctggaaggaggtaatcccatcaggtaagagagatcagggaatgtctgtggaaaaggtagaatttgagttgagttctgaggaatttttcatttcagtagtaatgaaaaattgagattgtactttgggtagtacaccaaattcaaaaaggagacagtgacaaaccagtttgacatgtaagtacagtgttagtgggggaatatagaaacacatagctaaaaccttggtttaggaacagattaaagatagtactagagttttctacgagaaaggaaagcacgagccctaacctccatttgaggctgcgtttgccttgcaaacaccttgctttactttgatcgtagtttggctggacagtttgaagcaacaagtggggaattaaggcgactgagatccatcctcaagcctcctcttggcacactgcttttgtagcaggtggtaacaaattttgagggccaggctaaggaatttgaatgcaagacagcaaattaatatttttgagtasaggaaagacataggcaggattttaaaattttgaatctggggccaggcgcggtggccgatgcctgtaatcccagcactttgggaggccgaggcaggcggatcacgagatcaggagatcgagaccatcctggctaacacggtgaaacccccgtctctactaaaaatacaaaaaattagccaggcgtggtagcgggcgcctgtagtcccagctactggggaggctgaggcaggagaatggcgtgaacccgggagg

SEQ ID NO: 719635 - DNA, 1200 bp, Homo sapiens
ttttgagacagagtctcactctgccacccaggctggaatgcaatggcatgatctcggctcaatgcaacctccacctcccgggttcaagcgactctcctgcctcagcctgctgagtagctgggaccacaggcgtgtgccaccacgcccagctaatttttgtwtttttagtggagacagggtttcaccatgttgcccaagctggtctcaaactcctgacctcaggtgatccacctgcctcagcctcccaaagtgctgggattacagatgtgagccactgtgcccagctcttgatgactttttgaaccatcaaattaactagctttccttacttctggagttctagttatgaaaaaaacaatcttttttttttttttggctgaagatggagtgcaatagcacaatcttggctcactgcaacctctgcctcccagcttcaagtgattctcccacctcagcttcccaagtagcagggatgacaggctcatgccaccacagccggctaaatttgcttttcttctttgagacagggtctcactctgttgcccagggtggagtgcagtggcacaatctcagctcactgcaacctccatctcccgggttcaatcaattctcctgcctcagcctcctgagtagctgggactataggcacgcgccaccacacccggctaatttttgtatttttagtagagacggagttttgctatgctggccaggctggtcttgaactcctcgcctcaagtgatccacctgcctcggcctcccaaagtgctgggattacaggtgtgagccactgctcctggcctaatttttgtatttttagtagagacggagtttcactatgttggccaggccggtctcaaactcctgacctcaactgatctacctgcctcagcctcccaaagtgctgggattacaacaaaaagtctttattatttaaggccagagttgggattttccctgcagaaaaaaaaggaaaaagaaaaaaaaatatatatatatataaaatacacacatgcatataactgtgtatacacacacacacacacacacacacacacacacacatataaccaatagaccttttttactgagtgaccttgtttcggaacccatggtgtggcctcttcaataagcatcctctggcagggttggggagtggggcacttttctccagacgtgctcttgctctctgtctccact

SEQ ID NO: 719636 - DNA, 974 bp, Homo sapiens
ttagtgcctgacatcaaatacttggccatgcttaattctcatcataaccttccattttacagacaagaaaaccgagacctagagaggttacgttacatcctcaaggtcacacagctgataataaaagcaactgattaagctaataaacacatcctttaaaataaggctcccrctaaaaaagggctggagggtggctgggagacacacgctccaaattcttctccaagtgtgacagggactcacttgagcctatggagtgctgacaggtggagagggtgtttgtgcagggcttggggaccacgccacggttccaggaaaacccccatgcacctactgaaatacatccaagagtcctctttctttgagtaaaacactcccaaggtcactgagtgtgttcccaatcagagggtcaaaaaggacgaggggacaggccagctctgtctgagatgcttatcccccaccccaccccaacacacggatccatgctccaccagggctggggcgccaccccgcacccctgcagatgcatccctagccccatggcctctgtttctgattgggccctgtttatgggaggcatgggcaggagataggagtaagttccagttggggtgtctcttccctgtcctctccctggaagtggctgtgaggctccatgaccacagctcatgcgggacagccccgtcccccacagttccagcccttgctgggctccatacaccccagttccggcccctgcttcctctattgctggccccagagtgcttaagcatcccttgttggtttcttcagccatgtccacctttctataaatagtcctgtattaaatacttcctgattgaacagaattgaatgaattctgtttttcccaggactctgatcacgataaagttagtgcgaaattggaaaaaaaagatcctagtttctaattgtctctccaaaacccagtttcagacaaaggtaaagtagaagtc

SEQ ID NO: 719637 - DNA, 562 bp, Homo sapiens
ccaggcactgttctaaactgtctacttacatatttctcacaatgtctttatgcattaggtactttycacgtgacagataggaaaactgaggcacagagaagctgagtaacctgcccaaggtcacacagctagaaagagctggttgcaggacttaaactcaggcagaggcacccctaaccaccaatatgcatccctctgcccttcccagctctctcctgagtcacatgaaagaaaccccaggcttactggtcctaggctgcagttttcctccccaaggtcgctctggggacaaacaggaagatgggaggaggcatggggcagttacataaggcggtcacttcaaaggtggcctctccggggtggatagccttggctttgggcagttagctggagcaccagccggcaagctgagggctgtccaccatctatctcctacccaatctcctcttagtccaacggcaaaacgggcagtggaggagatgaaggctggactaggggggcgaggaggcaggtcttgtaatcaaagctgggcagtggcagaaatcaggtgatgcaaataaaa

SEQ ID NO: 719638 - DNA, 562 bp, Homo sapiens
ccaggcactgttctaaactgtctacttacatatttctcacaatgtctttatgcattaggtactttccacgtgacagataggaaaactgaggcacagagaagctgagtaacctgcccaagktcacacagctagaaagagctggttgcaggacttaaactcaggcagaggcacccctaaccaccaatatgcatccctctgcccttcccagctctctcctgagtcacatgaaagaaaccccaggcttactggtcctaggctgcagttttcctccccaaggtcgctctggggacaaacaggaagatgggaggaggcatggggcagttacataaggcggtcacttcaaaggtggcctctccggggtggatagccttggctttgggcagttagctggagcaccagccggcaagctgagggctgtccaccatctatctcctacccaatctcctcttagtccaacggcaaaacgggcagtggaggagatgaaggctggactaggggggcgaggaggcaggtcttgtaatcaaagctgggcagtggcagaaatcaggtgatgcaaataaaa

SEQ ID NO: 719639 - DNA, 562 bp, Homo sapiens
ccaggcactgttctaaactgtctacttacatatttctcacaatgtctttatgcattaggtactttccacgtgacagataggaaaactgaggcacagagaagctgagtaacctgcccaaggtcacacagctagaaagagctrgttgcaggacttaaactcaggcagaggcacccctaaccaccaatatgcatccctctgcccttcccagctctctcctgagtcacatgaaagaaaccccaggcttactggtcctaggctgcagttttcctccccaaggtcgctctggggacaaacaggaagatgggaggaggcatggggcagttacataaggcggtcacttcaaaggtggcctctccggggtggatagccttggctttgggcagttagctggagcaccagccggcaagctgagggctgtccaccatctatctcctacccaatctcctcttagtccaacggcaaaacgggcagtggaggagatgaaggctggactaggggggcgaggaggcaggtcttgtaatcaaagctgggcagtggcagaaatcaggtgatgcaaataaaa

SEQ ID NO: 719640 - DNA, 842 bp, Homo sapiens
cggtcgtaggggcatttattccggtgtttcacctcccctcccgcttttcggcctcccaaacagtctgaaggcggctgctgaaaggctccaacccaccggaactctcggagtaaccgcctccgcctcccctcgcgggtgtagaccgagactcgcgcggacgggagggaggaagaatgtttgcttagccttcaaacgacttggcaggcaacaagagggaaaaggccgctctggggagagttcaaattgaaattacacggagggaagaacgtgcagatcagcgctgaagctcataaaaaaaaaaaaagcgaggtgactgagaagaacaaacacgcctccaaaaggaaaatggaaaagttcttaaaatgagctcttcaaagcctagccagggggcgcgggggaggaggagggcagtggccgccgggcaaggccgctgccccctgggcctatccgcctcggagtctggaagggcgaaattggcccaacttgcatttcctctaacccgggaggttgagcgcccctagccccctcctccgaagcgcttctcctgctggaaaccagagggagtrggaagagtggcccagagttcgaacctaagcagagccggtggtggcggggacgacgttcccagcgggaagtcgcgggcagggacaaagctaagtcctgagaagtaggccgaggctagatcattcgttcgttggacatcgggcatcgtttgggttttattcaaaccgttggaaaaccttgaagttctaggcaggggaacagcaccacgtgattggatcctccagagtagaatctagacagtccccctccaacccactcccaactccccacaactctcc

SEQ ID NO: 719641 - DNA, 842 bp, Homo sapiens
cggtcgtaggggcatttattccggtgtttcacctcccctcccgcttttcggcctcccaaacagtctgaaggcggctgctgaaaggctccaacccaccggaactctcggagtaaccgcctccgcctcccctcgcgggtgtagaccgagactcgcgcggacgggagggaggaagaatgtttgcttagccttcaaacgacttggcaggcaacaagagggaaaaggccgctctggggagagttcaaattgaaattacacggagggaagaacgtgcagatcagcgctgaagctcataaaaaaaaaaaaagcgaggtgactgagaagaacaaacacgcctccaaaaggaaaatggaaaagttcttaaaatgagctcttcaaagcctagccagggggcgcgggggaggaggagggcagtggccgccgggcaaggccgctgccccctgggcctatccgcctcggagtctggaagggcgaaattggcccaacttgcatttcctctaacccgggaggttgagcgcccctagccccctcctccgaagcgcttctcctgctggaaaccagagggagtaggaagagtggcccagagttcgaacctaagcagagccggtggtggcggggacgacgttcccagcgggaagtcgcgggcagggacaaagctaagtcctgagaagtaggccgaggctagatcattcgttcgttggacatcgggcatcgtttgggttttattcaaacygttggaaaaccttgaagttctaggcaggggaacagcaccacgtgattggatcctccagagtagaatctagacagtccccctccaacccactcccaactccccacaactctcc

SEQ ID NO: 719642 - DNA, 1025 bp, Homo sapiens
ttttattttttatttgtaaagacagagtcttgctatgttgtccagtctggtcttgaactcctgtcctcaaatgatctacccaccttggcctcccaaagtgctgggattacaggtgtgagccactgcacctgggtcctttgctctgatttttatttcttttcttcttcctttgaatttaatttgctctttttaaaatttcctgacatagaacgtagatgattgatttatgaaggggtggcctgcccctccacacctgtgggtatttctagtcgggtgggacaagagactgagaaaagaaagaagacacagagacaaagtatagagaaacaacagtgggcccaggggaccggcatcagcataccaaggacctgcaccagcaccggcctctgagttccctcagtttttattattattttcattatttcagcaaaaaggaatgtagtaggagagcagggtgataataaggagaaggtcagcaaaaaacatgtgagcaaaagaatctatatcataattaggtttaagggaaggtactatgcctrgatgtgcacgtaatccagatttatgtttctctccacccaaacatctcagcggagtaaagaataacaaggcagcattactgcaaacatatctcgcctcccaccatagggcggttttgctactatctcagaattgaacaaatgtacaatcgggttttataccgagacattcagttcccaggggcaggcaggagacagtggccttcctctatctcaactgcaagaggctttcctcttttactcatccatctcagcacagaccttttacaggtgtcgggctgggggacggtcaggtctttctcatcccacgaggccatatttcagactctcacatggggagaaaccttggacaataccctgctttcaagggcagaggtctctgcggctttctgcagtgcactgtgccctggtttattgagactagagaatggcgatgacttttaccaagtatactgcttgtaaacattttgttaacaaggcacgtcctgc

SEQ ID NO: 719643 - DNA, 1325 bp, Homo sapiens
ttcttatttcatagaggaaatatctctctgattatttttcaaattatgaagttttcaaacacatacacaaatatagtagtayagtgtaccaatcatcctattttattttttcctgatgagaagatgtacatatttagaattagccagctggactcagtttagattattcagttttgttggcaacatccagagcatgggaaccaggagccagtcaaacatatgccttcttctctccatcaggcctgatcaaggtgttgaccttggccacatcagtgtcatagagcttcttcacaagcctgtgaggagggcatgttgacctggtgcttgttggctttaagatccacagtgagcacaagtgtgttaccttctatcctcttcatggcagactcagtaggaatttgatgatagcatggtggtcaatcttgtttctcctgagggtgctcttctgaagatacgtgggctgcctccagagcctcagtgtcttgggctgctagaagatgggtgacatgcggatcttctttttttttgttgctgtgaatacctttcaccactgcctttttgaccttcaaagcctttgctttggctttagccataggagagacaggagtttccttcttcgccatcagtgccatcttgtgaaaaaggccccattgttctattttgaagcaaatcttggacattatatattatttgcaaatatttcagaatgcatctctgaatgataagtactcctttttaagtaggatagtctcacacctgcaaaatttgtaattcctttatatcaaatttataggcaaaagccaagggatggggtggggagggtatgcctgtagtcccagccattcaggaggccagaggctaaggtggaggatcacttaagccaggatttcaaggttagcctggccaatatagtgacaccctgtctctaaaaaataagtaactaatgtataggcagtgttcagatttttccgttttctcgtgaatttttaaaattcatttctttgactcatggtccagataatgtttatacaatttgaagtctgtatggtttttccatagaaaaattatgtctccatattgttttaattccaatatcccttgctgtgtgctcttttgaatatgctgttgttgctttgaagtttgttgttttctgtttcttacattgtttcctctgaattccttctttgcttttgttttactcctacacccctctgctttcttctgagttcagcttacatccttttagtagttccttcaggaactatcttgagtggttaacacacacacccatatagaacacccatataaaacaacaacaacctaga

SEQ ID NO: 719644 - DNA, 636 bp, Homo sapiens
tcaagttggagaagacccacctttgtttcctagtgagaaccgagtcagtgctcttacccaggtaaataaaaaaatcagcaatataatgttggtatatttaaaaggaggaaaaaagcataatttaatatcatgcactaactgatgagcatggaattttgagactgacagtctttaaaatctatcttaattcttacatgtaggcatttcacagagaacttcagacttttgtagtgaaaaataatgttgaaagattttatgaacttttaattgtaaagagaaagaagcattaaaataaggaggaagatcactaaggtagaaacatcagtggtaaaagaaggttgggaaggctgagcagtgttccaatcttctgaagcattttctttaatccctgaaggaatgttgctgtcatactcaggaggctggtgtaactggaagcaaaatgatgcctaaattagtagataaataataccatatcatagcctttataccattacttagtgttactcaagctgctgtaacagtaacttgtgctgtaactttaggtgaaatattgaagattaatggtaagtcatctcacaaaaatagttacaaaagctaaattcagatttaktttggagacatagagaaagcgtaaaa

SEQ ID NO: 719645 - DNA, 475 bp, Homo sapiens
gtaatgcctatacacatctaaatataatgctacgcccttattttatgcctactttatataaaaattttgctaatataaaatccaagatttttataaatataactggcacccaacactaacatcagttaaggcataatcataaatcacatagctcattaagaaatatttacaaaatactcactagatccctattgttaccatttgcaaatgagttagtgagaggcctgttttcacaratttcaatctaacgaacagaccacttatgaaacattcagacagacaattctagattttaattgtcaagttttttaagcattcttacttatttttggtaaaacaaatgttttcatgtgtatattagaagaagaatgtaagagtgaaaaaaggaactaaaaaaaagaaagagagggagaagggtagtcaggagtagtggcttagtaggatggaatcagagaaggaaatacctcagtcccgt

SEQ ID NO: 719646 - DNA, 608 bp, Homo sapiens
ccattaaaaaagtaaaggttggccaggcgcggtggctcacgcctgtaatcccagcactttgggaggccgaggcgggcggatcaccaggtcaggagatcgagaccatcccggctaaaacggtgaaaccccgtctctactaaaaatacaaaaaattagctgggcatagtggcgggcgcctgtagtcccagctacttgggaggctgaggcaggagaatggcgtgaacctgggaggcggagcttgcagtgagccgagatcctgccactgcactccagcctgggcaacagagcaagactccgtctcaaaamaaaaagtaaaggttggtgatttggactccctcaatcaagaagaggatctggcttttctagtcagattcttgcttctgctatcactgccacttccctaatgggttgagattgcacgttttgtaaatctgaactgatgactgctgagagaactaacgctttcactaaaccattccccaaagtagtaacaatgaaaaatactaatatactacttattatgagccattcttttaaatgctttatgtgattaacttgacaaaatatgaggttactttctatttttacccccatttcatcaataaaaa

SEQ ID NO: 719647 - DNA, 1220 bp, Homo sapiens
atctactctattcctgtcatctgaaaataaaagccaaatatataaagcacagaaattcttcagatctttcttggaatatttttagaccaaaagcagtttaatgataaagaacacagatgttcaatatggagatgagaaaggacaggaaagttcttggcaagattaactgaactttttacttctgtcacataaatgtgactcctctcaaatgaatcatcacttttcgattagagctaaacagtaataaagtgtcaatatgaaaatatgttgaaatttaaaaactcatatcagactaattatttgtcatataaattccacaaatcaaaagcttaatggacataaaatcactcatgtttacacgatgagttactattagcagaaccagcatagagattactttctattgattttcatcatgtcatgttttcaaagtgaaggttcacttcattatgacaatgaagtaaaattgaaaatgttcaaaatttcaagagaatcacagcatcaaccctgcatcaaatgttgtcaattaaggtttttgaggggatgaattatatttttgaggagagaattttaatggctaaatattttaggcactaaataacaaaggtaaatgagacacagtcccccttatcaaaaaaaaaaatagagtctattgagggaggcggacaagtaaacagatcattataagttgttatcataagtgccataaactagagaagcatagcatgctattgtaggacataagagtacctcctaaattttgctggtattaagatggtcagaacaagctcttaggaggaggcagttttcaaatttgattcttaaatgacaaagagttgttcagattcaaggggtggaaagaggataaaagcagtcctagaagaggaagctatggaggaggaagaaagaaagcaagattggtgatttcaaagatggagagaattttagtgtaacttgagtgtaaagtgaaaagataggaatgtrggcaaagatggaaacgggtgttatatggcgtgcttggacttgttcctggaaggtgtttacaagccattgaatgatttaaagatgtatgtcttatttatgttgaaaagaaacacatcaattatttgagttgctttttttaaatcattaatcctgttaagagatgttgctgaatttaataaagattacctaatgtcaaggaaaagagtgctacattaggggaaaaaagaccatagatc

SEQ ID NO: 719648 - DNA, 572 bp, Homo sapiens
tcaagctactcagaatagaaagcaacttcaccttctgcagcgacttgtgttatattgtcatcttcagccatcatcatcacagtaaaaatcactgatatttccaaagaaggttcatttcttttgacttgaatgagctctgtgatgtcacaatgtcctatatgtgcttggtggatggatagtaaaattaattgatatcttctacatgttacacatttatcatcatcattctggaaaaatagaaataatttttcattaaacatgcactttcattaactagctcattgctgctgaatgtgtttaatgaaaagatgtcaaataaataaaaattttaatttttacaaaataatgtatttgggagyggcagtagcaaaagcattcagatgctctgagtcattttattctgcctctatttcctgcactccaagtctgtgctttcccacatttgccactaaccttgctgattgtagcatgatgatacaatgtatctttcaggcttcagcaagtattgtggcaaaatttgctagcaaatcaacagatggcaggggcagctgatttaaaaatgttctcattag

SEQ ID NO: 719649 - DNA, 1126 bp, Homo sapiens
cttataaatggattaatgtcctttggagagggtaagtgagttctcacgccactctcttggttcccctcttgccatgtgatctctgtacccctgatcccctttccttttctgccatgagtggaagcagccagaggcccccaccagatacagctgcccaaccttgaactttccagtcaccagaatcatgagacatataaacctcttttctttatagattccctagcctcaggtattctgttatagcaatgctaaacagaccaaggcactccctcaccttcaccttgggtccctccagctgaggtcttaccatagctctgtgtactactatgaaacctatctgtctatctatctatccatctgtctatctattgttctattgttcctggctcaaaataccaatagcccttgttgtaacattggggcacgttaggcctcagaaaacagaacctctctctctttgaccttctcctgccctccttccatctgctcccttatctctccaaggtaggatttttccctggcttttctttcttggagctggcagtaacaaaattctctgacccactttctaattgtgagtcataaaacccccatttcagaaggagtcctgccccaggccctgggggaaggaatgctgcacagggagaccgagaagaatctgaacagacaggccttgctgggctttcccactcagcttattagtattacatcatactccattcaatcatggtggccaaacatgcctatcyaatgacatctccatagaaggcccaagaggacagggttcaggagcttcaggagaggcaaacacatggaggttcctgagtaggaaatgtctgaggggccatctcagcttcagaactcttctagggtcagctaaggtttggcctggcgtatcctgtcccccgctctggccggtgcttccattccctaaatctcttcactgcatgcatccccctcccactaccttcatgccatccttcatgcagcactacagggcattctttctaggtaatggggctggctgtggcctgggggcatcctttgtcctgcatttgctcatggtcagcactcttgtttgcacacaagagtagagtagccagccccacttgggacagggacttgg

SEQ ID NO: 719650 - DNA, 401 bp, Homo sapiens
taaatcagtaacacctcccttgaaagcaatttagcaatatcattttttaactaaaattttcatacctttgaccccaaattttatttctaggagattaacataaagaaatcatctaaaattagacaaagatgtatatatataaatgttctctttagcatcatgtatagtaagaaataatgaggaattaaaattaaagatacgttattatatcggaatggtgagcaaatatatatgttagagtgaaatacagccattacaagttttgttttacattttgcctaatattataatataaaatcattgaayatataaaaatgcatatttttaaaaagactggaaaaatatgttaaaacggtaataattgcttgagattatggccatacaggtgggaaagttctata

SEQ ID NO: 719651 - DNA, 649 bp, Homo sapiens
taaatgcagtttaagtacacaaataagtttagttttcatttgcttctttgttaagctacttacagtaaaaaatcatttaattaacaaatgctatgttcacgaaattttaccaaaccaccctgtacgtgtaaatttttattttatttttaattgacatatagtaattgtacatgtttwtggggtacatagtgatatttccataatataatgtatagtgatcagattggggtaattagcatatccatcatctcaaacattgatcatttctgtatgttgggaacattcaatattctccttcgaactatttgaaattatataatataatcattaagtacagtcatcctgtaatgctataaaacactataacttatttgtcctatctagctgtaattttgtatcttaacaaatctctccctctctcaccctttcccctacccttcccagcctctagtatcctctgttctacttttcacttctatgagatcaacattttttttttagcttacatatgtgagtgagaatatgtagtgttttactttctgttcctagcttatttcacttagcataatgacctccagttccatccatggtgctgtgaatgacaggattttattcttttttattgctgaatagtattccattgtgtatg

SEQ ID NO: 719652 - DNA, 953 bp, Homo sapiens
tggggttgttttgatgaatttaaccgtattgatctaccagttctctcggttgcagcccagcaaatttccattattctgacatgtaaaaaggagcacaaaaagtcttttatctttactgatggagataatgtgactatgaaccctgaatttgggcttttcttaaccatggtaaggagctgctagaaaagctactgaatttcagccttcttatcacaattttcatgcatctccctggtcatatgtcatctgttttcctgaatggaaattgggattgtaactttacctccttttgaaaaccttttggtgttaagcaaagatcatatgaatagctcatgacttagcctgtccaggtaaaacgagattgagatacgtaaatgagttccctggttgtcattccagatttgttgtgtgtacataatgaatcttttaatatgatgctgatgtgtgcttgattgcatcattcatccttgggctttattttctgtttagaatcctggctatgccggacggcaggaactccctgaaaacttgaagattaatttccgctcagtggccatgatggtgcctgaccgtcagattatcataagggtgaagttggctagttgtggcttcattgacaacgttgttttggccaggaagtttttcacgctctacaaactgtgtgaggagcagctttctaagcaggtgtgtcatcctggaggtcttatgcacttaggcatgtttcatttttctattcagcaraatgttctcattttgagaaattctagactgggcttgttgacaaaggattttattgacactgagtagaaaggtgtattactacaaaaataattttatatgcatagttttttaagaagtacatttaaataaattaatatttacagcatagaaatgaagtgaatattatctgcactggtttaagagccaaagacttatggatattaacattggct

SEQ ID NO: 719653 - DNA, 806 bp, Homo sapiens
aacctaatagaatgctgaataaataaggctgaataggtgattcttttgggccaggttgaatattcagattaagagaaactgcgaatgaaatcccaatcacatagtaatttcccacctattgctttctgaaactcaagtagctatatggtctaattaggctgtttgggggattatcacattttatttctgcaatgaatggcatcatttggggtttaatatttattgaggcttttatgaaacagagaggtttccatatgtctctagagcaaaacatttgtgtttgccatctgctactcaagagtagttttgtagaaaaagaacgcaaattgcttgcttctttaattactttggggctaggctatactatagttgggactgtggaaaagccagtggaattaactgctgagagaataccattgtttacttagccaccaacttaaataattttttgcaagtaaactgcataaaaagagattaaagcctaaaattatttttgttcttttaactcaaggcaaagaccaagtgaagagatgtgtgagatttttttcgagctggcaaaaaggagaccctatccaggagactaggctttaaggtcagtatagaaagtatcagatctctttttcaagatctgacgccaactgaatctgtgacttayacttagtacttaaaaaaaaaaaaaaaaaatcagaggatctccttgagcccagtatcaaaaaaagtaatttacttttcatcaccaggagctaattacttgggctctggactccatactgtttgtttctgctttccctcttctcagtggcttc

SEQ ID NO: 719654 - DNA, 806 bp, Homo sapiens
aacctaatagaatgctgaataaataaggctgaataggtgattcttttgggccaggttgaatattcagattaagagaaactgcgaatgaaatcccaatcacatagtaatttcccacctattgctttctgaaactcaagtagctatatggtctaattaggctgtttgggggattatcacattttatttctgcaatgaatggcatcatttggggtttaatatttattgaggcttttatgaaacagagaggtttccatatgtctctagagcaaaacatttgtgtttgccatctgctactcaagagtagttttgtagaaaaagaacgcaaattgcttgcttctttaattactttggggctaggctatactatagttgggactgtggaaaagccagtggaattaactgctgagagaataccattgtttacttagccaccaacttaaataattttttgcaagtaaactgcataaaaagagattaaagcctaaaattatttttgttcttttaactcaaggcaaagaccaagtgaagagatgtgtgagatttttttcgagctggcaaaaaggagaccctatccaggagactaggctttaaggtcagtatagaaagtatcagatctctttttcaagatctgacgccaactgaatctgtgacttacacttagtacttaaaaaaaaaaaaaaaaaatcagaggatctccttgagcccagtatcaaaaaaaktaatttacttttcatcaccaggagctaattacttgggctctggactccatactgtttgtttctgctttccctcttctcagtggcttc

SEQ ID NO: 719655 - DNA, 1448 bp, Homo sapiens
gactacatacattcagatttttccaataatgactttgtcaatgccttttcttttttgagacagggtctcgctctgttgcccgcccaggttggagtgcagcggtgtgatcacggctcaccgcagcctcgacttcctaggttcaattgatcctaggctcatttcagcctccaaagtagctgggaccacaggcgtgtgccaccacacccagctaattttttatattttttttgtagagatggggttttgccatgttgcccaggctgatgttaaactccttggctcaagtgatcctcctgcctcggcctccctaagtgctgggattacaggcatgagccactatacttagccaatgcctttttttgaaatataaaataacaaaattccgtcgctgtgtctcattcttttgggtgctatgcttttgtctatgcacgcagtacaaaccctcgtaggataatccagctctaatgagtggggagctgacctcctgcttccttttaatcccagatctgaggccaagggatgtttgctcagctagtggaggtggcagtgactcctccacctggagcagcaatggtgtgcaccattgttagggaggcgagtaggctaaaaactcacgtagtcacttctctaaggttaatttctggagtgcccgctatcctcattcctgggctctcagtcaagaatgtaattgaagccccaggacaatggagtgtgaaaggaaagatgttccctggtgtcagatgccctggccagccagaaccaaaagcatggagtagacgcttggcttttattcctggtgttggctgggtccctgtgtcctgccctattcctgaaatcctctttaggcaaaagccaaagctaactaggaagctccagcttgggcctcctctggcatcgccaggaccagctgtgacagaacagcttgcttccttctgccaacccccttgtttaaaggttaaacatacaaaggcaggagccgcaagcccaacagagggtactgcaaagcagcccctcagatgctaacgatttcaccagacgaccaggatattattattgtctgaactcaacttctaagtgccctaggaaaccttttagtggctgagagtacgatcaccaaggaggtgagctaggttttcacagtgtcattgagaagtccccaggaaacctaaccccagtggcaaaccccagtgtgccctggggagacacaggacctgggcacctcttctggatgccactgggcaggcacttcctggagagctgatgagggtcagtcattggggtctactcgaggcccctcctcccacactggagaggggctgttcttactgctcaccaatgcyggactttagtcctgacgggcggtgaagtgtgcttccatcagatttcaggggaagatccagctgggctatcaggctaactcgccactggccctgacccatcccgatgaa

SEQ ID NO: 719656 - DNA, 1425 bp, Homo sapiens
ttttctcttttagaaattggacacttcaataaaatttgtaattacgtccatctgtgtgattattgcattgatgtccatatctcctgccagattgtaaactccgcgagtgcacatatcagatccattatggttctcatcatatccctagctcctagcgcagtgcggggcacgtataagtgctcgaaagctcccacgtggtgatggagctaagcttgcccccttccatgtgtgactacccaactttctgtctcctcctcttcccggcctctctcagactcctctgtgtgcatcccaccccacggtcagttcatttcctctttttatctagtaccctttcatgaattgtcatatattttttaacccatattttttttcaggtatttaggctcaaaacctggaagtcatctttgactctttccttttccttagttttttgtttttttgtttttttttggagaaggaatcttgctctgtcaccaggctggagtgcagtggcgtgatctcggctcactgcaatctccgcctcctgggttcaagcgattcccttgcctcagcctctcgagtagctgggactacaggtgcgtgccaccacacccggcaaattttcttttttggtattttagtagagacggggtttcaccatgttggccaggatggtctcgatctcctgacttcatgatctgcccacctcggccttccaaagtgctgggattacaggcgtgagccaccgcgcctggccccttttcctcagttcttatgtacaatttgttgccaagtcctttccattctttcttctgccaccctaatttaggccctcaatacctctctcctggactttgccatgtccttctaagtgacccgagcacttccagtctcatttgggcagcgtccttcccgaattccattctgtacacttcaagcaaattagttttagagcatagctctgattatcatattaatcccttatccctcccttaaaagtcttattttttactttgtccactggaatacatcatcgttggcctatcattccaaactccctacagtgtggcttcagctatatctctctctgttttttacaggaatcctaaactctaacccagggaccctcaacatctgtgctgggtggactgtggccacattttcagctggccagtgtaagggttttagaggcccttacatgagaagaaatacaatttttaagtctctgagwtgatgtgcttcttacatttttggaattaaaatgcctctttacttataaaatgctggtagtaatagatggtcattatctcactgtcatttgtgaaagaaaaaacgattgtaatagaattcttgctattttttttctctaagggaggtaagttttctccctaagcaaactttatggaatgcacaatgcttggctttcaccttcttttattctca

SEQ ID NO: 719657 - DNA, 1420 bp, Homo sapiens
gggtcctgtttaccacacaaggagctggatgctataaaggaaccagtgctggagaagcctcatggtgacgtttccagggaaagacaattgaaaccatgtaatatggtttggctgtgtccccacccgaatctcatctcgaattgcaatccgaattgtaacctccatgtgttgggggaaggaactggtgggaggtgatcggatcacsgggcagtttcccccatgctgttctcgtgatagtgagttttcacgagagctgatggtttcataagtgacagtttccacactctctcgcctcatgtaagaggtgcctgcttcctcttccaccatggttataagtttcctgaggtctccccagccatgcggaactctgagtcaattaaacctcttttccttataaattacccagtcttgggcatttctttatagcactgtgaaaatggactaatacaccatgctaggtgttctcctgcatggaagggctagtgatccataaatggaggattaaggagaattaactgggtcccttgcttaggcctaagtgagacgatcttagaggtgcctgttgtgttactgggggctggtgttagtgtcagtggtaaggaaatggatacctaaggaataccgcccagctgcactctcaaaaactcacaagctcaaaaatgcccattctggaccaaagtagctaacagagtcagctccaggtttcaattttggaggaaacaggaaatccattgaattggaaatattgtcagactgaacaattaggggcaagctgggactatcagaaatttactgaagagaagagggaaacttggagttgagtcagaatacctgattcagatcctgtttctcttagtcaccagctatgtgacatatgaaaaattgcttgacttctctgaacctgttacctcatctgtaaaagagggatgacaagacccactttacttatttttcattaggaactcaggaataatccaaataaatgagatagtgtgggtgattacaactgtgaggcatcgttactgcatcattgccctgagcccccttgcctggcacaaatgagggtctgcactggacatgaaaggtggggtggcttgcagaacatagtcaggggagcatgaagggaggtgaaggagtcgagctaggacttctgcagcacagatgtgggtgaaaaatcccctatccttgggtgtcggtagcagaaatgtactcagaggctgctctgggatgtgctggtaacagggcctggactgagaccccgtggttgtgtcagtgtcgactttaggtgactcttcccccttacctgaggatgctgctgcctaggatctctctctgtggacagacgtagctgaggtcactgagagttagtgccatgccagctggtcccaggaacagagcaccaaatccgattcaggaagga

SEQ ID NO: 719658 - DNA, 845 bp, Homo sapiens
gaagttgaatgcaagtgtactgtcattcatagtgtttatatcaaaataccaggaatcttcacttttgctaccttgatatagcattgggctatcatgttacaacattgaaatacattgatttattaaaaaatacttttataaraaatgttttatagtgctttctttcagattataactgttgtgtatttgtgttgggcggggtggggaggtatatttttaaaacccaagcatcccgtgtgctcggcaggaacatgacggccagcccctccatcctttcttcctctcacatgcacatgtacctttattcacctgcattgatcttgagcgcagatctgtgggcccagtgccttagctgtcagatagcatagccacacctgctcacagggaggggtgccagccctgacttctggggaatggaggcagaggggcaagctagaacggactcctcccccagagtgcagggaacagacctgcagaggaatagccccgacttatgcacacactgtcccttgtcttgaagcagcaaagcaagcaggagcctgagagaatgagctcatttcctacggacctgttctccaatgcttggcacctccaacctgccccttcccctttctcctccactggcctttttgcacactgtggagcaatattttcctctactaattcaaaaatttctcttgaattaactattgttaaataaatgaataccagccttttgtgacctgtcaatgcctgtccactctaagcaagaatgatctatgtacaacttacttgttctggcctccagaacaagaaacaaagggagctcttcccccaggctaacacaggttcctaatagactataa

SEQ ID NO: 719659 - DNA, 619 bp, Homo sapiens
tcaggctacttgagacccttgtggattcagacaacaaggcagcacataatgttaattttgggccttgcaccacacccttacatcactgtaggctagatttatcttttattcatgttcctcaagaaaaggtttattttttgcatgaaggtaggaaatcctgactatgactatgcatgttcatcttcttttatgtttccagtacttattctgttcttattgctttccttatttatttttaggttcattttttcttattggctactcccaaagaaggtcagctccacaagaaaaggggaactctttgccatcttatttgttgctgtgttcccagtgtctatgatggtttctggcacataatattaatagatgctcaatgaattctgtcaaatacagcaaataagcatagttataaattatagacctgaaggtatttttaagtggctgttgagtcttttctcaacagattaatayaccaaacatgtatcaaaaaattttcctgtgacaccttctgttcttgaaatacagtttctaccattaaataacttaaagtcttaaggaggagacaaattaataaaaatacaattataatacttgatgacaatagctatgagaaaaatga

SEQ ID NO: 719660 - DNA, 589 bp, Homo sapiens
aaaaaaaattaaaaagaaagaaagaaaaaaacctgggttttgaaaaaagcaaatattataagaacaaaggcatgaaagatggattttattttagtacaggctattgttcaatcataatgactttcttttgtcacataaacacacatggcagataaaacatgctgagagagcctcyctctctcttaaaaatgtctatgtaacagcaaaatgtaaaactaaagttgagataatcatctgaaagtttccttctatgaacatgctataaaggataaaattaggagcagagtactaattattcagaatattgtcggtatcagtgctttccaatggaacattttgtgacagtgaaaatattttgtatctgtgttgtccaataccatagtcaccaacctcatatggctattagcacttgaaatgaggctgatgtgactgaagaacttaattttaaattttatgtaattttaattaatttaaatttaactagtcacatgtgcatactggttattatattgacagtctaagtatattgaaatttaacctgaaatccagattcaatatcattatttaactataatttcctattatctgc

SEQ ID NO: 719661 - DNA, 649 bp, Homo sapiens
aagttaatgtacatacatcttagcatctgttttctttgcctccattgcctttccccctccccctccagtatctactgagttccattttcacatctcatttaattgaccttttgcctttccatcttcccaactgaggtagactctctcattcccttcgctggtggcagcgaatgtggcttttagagaaaaagaatgaaaaacaaatcaaattaatattttcaaaatatctctgtataaccatttgttaaagttgacaccccartgtatttattgattccgtttagttgttagttttgaattaaccccaaacatgtgaactaatactttcttttaatttctatatggttaaatttcccccacttttagaagttttggtatttatgtttttctctgaaccataactagtattgtttagtttttttcctaagtattttgagcccaagaaccagaagagtctaagagtctggcagaaattttctttgtttaacatgtatataattcttgcttttctaatcttttcttctctataatttttattttccataagtgtaagtatttattcatcccataattcaaacatttctgaatagagatttatttatacatttccaagatctataaaaagtataaaaatggaactgaatcataa

SEQ ID NO: 719662 - DNA, 649 bp, Homo sapiens
aagttaatgtacatacatcttagcatctgttttctttgcctccattgcctttccccctccccctccagtatctactgagttccattttcacatctcatttaattgaccttttgcctttccatcttcccaactgaggtagactctctcattcccttcgctggtggcagcgaatgtggcttttagagaaaaagaatgaaaaacaaatcaaattaatattttcaaaatatctctgtataaccatttgttaaagttgacaccccaatgtatttattgattccgtttagttgttagttttkaattaaccccaaacatgtgaactaatactttcttttaatttctatatggttaaatttcccccacttttagaagttttggtatttatgtttttctctgaaccataactagtattgtttagtttttttcctaagtattttgagcccaagaaccagaagagtctaagagtctggcagaaattttctttgtttaacatgtatataattcttgcttttctaatcttttcttctctataatttttattttccataagtgtaagtatttattcatcccataattcaaacatttctgaatagagatttatttatacatttccaagatctataaaaagtataaaaatggaactgaatcataa

SEQ ID NO: 719663 - DNA, 1929 bp, Homo sapiens
ggcaacacagtgagacctccgtttctaaaaaaaaaaaaaaaaaaaaaaaaattaggcatagcggcacttgcctgttgaactagctactggggagactgaggcagaaggatcattcctgagcccaggagctcaaggttacagtgagctatgatcacactaccactccagtctgggcaacagagtgagatcccgtctctaaaaaaaataataataatataacataataattaataaaatattgtttgatttgtaattgagacattaatcattataaacacaagccatgtgatcagctttttggcacagtgtggagaaaatatattcaatcctgcaaaggagaaatattctcactatacttaggggttaatagaccttgttttataataactagttctactgtaagcagctgtataacgttgaacaatttgcctaatgtaagcctactttttctcagttgtaaaataaagttaataatagtaatctcgtgcaattgttaagatgattaaaagagacaatacaggtaacattcttgacataatactgaacaaactatgttctcaatgcatatttatgctgattatggaatactgaatgttcatactaaaaggaacaactctttgaatatatactgcttttctaatattaataggtaggaattaggaaggtcaacttcatgatttacctgagactggggaatttcctaaggtgcaagattttcattgctgaaacctgggaagtcttttgaaaactaggattagtttgccactgaaattcaaggtttctcaaccaaggcactattgattttggggttggataattatttgttattggaggctatgctgtgctttgtactatgtttagcagtatccctggcctccacccactcgatgccagtagtaccccacccctgttgtacaaccaaaaatatttccagatattgccaaatctccctcgagggcaaaattggccccagttgaaaacctctgctctagtacaggaagaaaacagataaataataagtgcaaagtggattttgtagaagactccacagatactgcttcatttgtaattataaatagctgactgcttagtagaaactcttcatatattctaattggtatgaaaattatccagcagtgtaattaaagcagtgcaacctgtggtcattttgttaataattttaaaacattgtcattgtttccaggaatgcagagaaaaatcaaactcctacccagccacttattacactctgtattaattgtatatttacttacctgcatttaatactaaattatatcaccagaaccaagttctgttccccctatgaaatagaaatacattaaatattcattaaatgaataaatacaaatactaaaatgtatataacctagggataattgggcatactatcagccaatcttaccatctctgtcttttagttgggatatttataccatttacatttaatgtaataatttatatagttacattcaagtctatcatcttgctatttgttttctatctatcctatcattattcattccttttttcttcatcatctgtcttcttttgggttaaattaatatgttttttattctatttaatctcctttactactccattccttgttttgttatatargtggttatttcaggatttatagtatacatatttagcttatctctatcttcaagtaatagtatgccaatgcaatttctttcttccaatctttttactttttactttttcatatgttataaatcccatattgcattgttgcaattttatttaaacagttgctttcatctaacatcaattttcttttccctgaaaagcttcctttagcctttcttacagtgtaagtatgctgataatgaattctctcaacttttgtatgtcttaaaaagtattgatttcatctttattttt

SEQ ID NO: 719664 - DNA, 1929 bp, Homo sapiens
ggcaacacagtgagacctccgtttctaaaaaaaaaaaaaaaaaaaaaaaaattaggcatagcggcacttgcctgttgaactagctactggggagactgaggcagaaggatcattcctgagcccaggagctcaaggttacagtgagctatgatcacactaccactccagtctgggcaacagagtgagatcccgtctctaaaaaaaataataataatataacataataattaataaaatattgtttgatttgtaattgagacattaatcattataaacacaagccatgtgatcagctttttggcacagtgtggagaaaatatattcaatcctgcaaaggagaaatattctcactatacttaggggttaatagaccttgttttataataactagttctactgtaagcagctgtataacgttgaacaatttgcctaatgtaagcctactttttctcagttgtaaaataaagttaataatagtaatctcgtgcaattgttaagatgattaaaagagacaatacaggtaacattcttgacataatactgaacaaactatgttctcaatgcatatttatgctgattatggaatactgaatgttcatactaaaaggaacaactctttgaatatatactgcttttctaatattaataggtaggaattaggaaggtcaacttcatgatttacctgagactggggaatttcctaaggtgcaagattttcattgctgaaacctgggaagtcttttgaaaactaggattagtttgccactgaaattcaaggtttctcaaccaaggcactattgattttggggttggataattatttgttattggaggctatgctgtgctttgtactatgtttagcagtatccctggcctccacccactcgatgccagtagtaccccacccctgttgtacaaccaaaaatatttccagatattgccaaatctccctcgagggcaaaattggccccagttgaaaacctctgctctagtacaggaagaaaacagataaataataagtgcaaagtggattttgtagaagactccacagatactgcttcatttgtaattataaatagctgactgcttagtagaaactcttcatatattctaattggtatgaaaattatccagcagtgtaattaaagcagtgcaacctgtggtcattttgttaataattttaaaacattgtcattgtttccaggaatgcagagaaaaatcaaactcctacccagccacttattacactctgtattaattgtatatttacttacctgcatttaatactaaattatatcaccagaaccaagttctgttccccctatgaaatagaaatacattaaatattcattaaatgaataaatacaaatactaaaatgtatataacctagggataattgggcatactatcagccaatcttaccatctctgtcttttagttgggatatttataccatttacatttaatgtaataatttatatagttacattcaagtctatcatcttgctatttgttttctatctatcctatcattattcattccttttttcttcatcatctgtcttcttttgggttaaattaatatgttttttattctatttaatctcctttactactccattccttgttttgttatataggtggttatttcaggatttatagtatacatatttagcttatctctatcttcaagtaatagtatgccaatgcaatttctttcttccaatctttttactttttactttttcatatgttataaatcccatattgcattgttgcaattttatttaaacagttgctttcatctaacatcaattttcttttccctgaaaagcttcctttagcctttcttacagtgtaagtatgctgataatgaattctctcaacttttgtaygtcttaaaaagtattgatttcatctttattttt

SEQ ID NO: 719665 - DNA, 1242 bp, Homo sapiens
tgacttcaaagataccgggtccactgtgcggcaagtgataaaaatgtacacagcatgtgttggataaattaataaactctccagagcctcagagtcctctggcccagcagcaccgtaatgaaatgttattctgaagtggaggaggtgggaaggagaaggggagcagtatttaatatatgcaaattaactagtatgcaaattgccactaagttaaaaataacggactgcgagagaaacctattttttaagcagcttgtttattcattagcctaatttccattatcaatccttctgttttcttttttattaagtactcacatttggggaagtttgcttcctacaatttgttttgctccaaaatccataacactggtaagaacaatcaccatacattagcttttcttggtctcattcttgattttgctcctagctttcaatccctttttctctttctttcttcctgcccctttccttttgccgttttctcctatcactttcacttgccttgtttctctggcaccttttgtttcactgctgaatgcgactccatgaagcatcaggcaggggcgaagagaagcctcctgtcctatgaggtctgactccagggacctgttcttccagccactcgccctcataggtggactcggatgcaaaaggcaccaaaatccagctcccctgcacctcagggcgtgtgctaccattatccctctcccagcaacagaaaagccagaacaatgcacgccctgattcgggtctgtatatggcctgctctgtgtagagacagaccttacacaatgttaaagacaaattggcagccaaaatccccgtcttttgtctcaagaagcatctaccttgctatgagagagctctggtgcccccgagaggccgagaacggtaccgattgctgggccggttatggggaaggcaggaggctggagtacagcgtacacaaagccctgggcagcagcgtgtccagaggggagatcctgaaagaaggrgtgcccttgagcagctggggaggggactcaagagaacatgctttgccaaagctgcacatagcttgcaaggctagtttttgttttaaccgttgtcatttttcacagggtttgtaatcacatagttattacgaagcatcaaaattattttttaacaagaggttcttggtacatggtgcttagctgtagctgtgcaaagctgtttgtgccattccagctcctaagggatgtgcatcttagacacaca

SEQ ID NO: 719666 - DNA, 864 bp, Homo sapiens
gaggagacgggctcagggaggttaagttactccctcaaggtcacacagctggagtgtagaaaacacatgatctcaattctaggttcagttttgttttgctttgttttgtttccaccccagcagatattttaaaggtaggaaatgcaaaattctgagcactctcttggggattggaggagtgggtggggacagagaatgggttatcttatttgcctatcctgcctgtgggtgtgattctgcaaccaaagccaattctggcttcttctctagacggtcttggtctctttttagcgagtgggcttgactgtagctaagtaattctgctttttcatgtcttagactgtcccactcagtcctccagtagccgatgagtgcgtgctgcttgcatgggcccaagactctagcaatctctataggtagtttctgtaaaaccaggcagatagatcatccctgggcaccctctctttatctcattaaccctggtggtaccaggaggcacctgacattctaatagtttggtgccagcaagtttctgttatccttcagttgtaattgttaacttgaatggaatgcaaaacttctggtttggagcagagttgggtcttaactgtgaataacttgaaggatatggaaaatgggaagtacctttggttattgtggaggatggtttatgagcactttttgagttgcattttctctgataaataggaatatgtggtcaatgtggagatgctactgcgtctacatattcgccggtgaactccaccctttattaactcttggcctttgacagtttttcagctcagcaagccaagacttgtttgrggattagaacaatgagcttatcgttatgccacctttaaa

SEQ ID NO: 719667 - DNA, 644 bp, Homo sapiens
acaaacctgcatgttgtgcacatgtaccctaaaacttaaagtataataataataaaatgttaaaaaaaaaaagaattctgtgttcaccccagcaggaaagtgaaggaacttagttgcaaccatagtggtggttcagtattccaactattcaggtcaaccaaaaaaaaatatatggaatatggaaaaatatagaacccaagaaatatgggctgtgagttcaatcccatctggagagcatggatttagcaactagaacgggatagagagcttctccctgtggctccaggaaaattatactagtgacgagcagcccrgaccgcatacattcagtgtcagaactctgtccagcaagcagccccaggcaacgcctggcaaccccaggggatacagaatgcgaatgcttttccctcaagaaagtgtattccagacctaggaaggtttgaaactaaatatataggcaacaaagtaaatccaacatgtagtattaatacatttgtgccaaatttaagataatctatatttggtattataatgtgtaagaaaattcagcatactaaaagatttgaaattagcctgtgatagcaaattaaaatacaaaatgaagtacttgattttagactcgtgctttctttttcagttgaaat

SEQ ID NO: 719668 - DNA, 1170 bp, Homo sapiens
taaataaataaaatttaaaattccctgacctgagaaagtacaaagataaaggtgaaattaattaacttagtaataaaaacaaattgttctaactctgaaagtagacaatatatatgattccgatatcattaaacacagctttaggaatagtccattaaattcatgattctactaggttctccaaggacaaaatctaaactcaggaaatacatgttaacatcaatagatctttccatttctatttcttttatatcttgaacttaattatttttctattgtttaagaacatttgaaagctccaaagtgttttgaagtatctaataagaaaattaagttacatcaccataaaacatttctccccattttattcttttttcctttgggatattctcccactagtaattatcaattatcacaagttgaagacctgattttcctcatttgtagttcatatcatataaaaatatgcaatgcccatgaatataactaatgacttcagttatacagaaccagagcatgttcccaattcacttatatttcgctcagttttcctcaagaagacaacaaaccatattttgtattgaagtcaatttgcatttaacctaaccaatagcattacttctttggaagaaatctgatttttccttttttggtttgtctttaacttcctaattattcatcttaacaacagatccttttttttcccaatgttttaaattgatgattttttatttaattgaaaataaaattataaatgttgatagtacatataatgtttgatctatgactacactgtgagatgactaaatcaagctagttaacatacacatcacctcattttttttttttttttttggaaatggaatcttgctctgtcatccaggctggagtgcagtggtgcaatctcagctcactgcaactgctgtctcccgggttcaagcaattctcctgcctcagcctccagagtagmtgggattacaggtgcccgccaccacacctggctaatttttgtatttttagtagagacggggtttcactaggttggccaggctggtctcgatctcctgacctcaagtgatccatctgcctcagcctcccaaagcactaggattacaggcataagccaccatgcctgtccttcatcacctcatatacttgtgttttaatgat

SEQ ID NO: 719669 - DNA, 1289 bp, Homo sapiens
tttacaaagaatatttactgcacacttataggtttcctgttattttgaaatgatcatgcttctttttcttttgagtatgttaatataatggcttaccttgatatgttttctaatatttcactatttatgggatttttcaggtttcctatttttttttctgctaagttttggtaagttaaatcttggggtaaattatccattatatttttggcacaaagtgcatctttgtgctcagtttttttttataaatgtaaatactctttataaaacactgtcacaagaacaaataagcataaacataaggccccagaaatggaggataattagagaacattttyctttgtgttaagaaaaaaataaagatatcttttctaagctttcttctttttaatagtaatattcttacattcatatacttctctttggatgacaaaatggcttgacacgctctcttggtttttgttggttcatttgttaaaccacacatttggagaagttattatttttgtcatattatagatgaggaaactgaacttaagtgatccttttatagaaatgaatgataaaaaggccttcaaaataaaactatgtgatgggaacatgatgatgtttttattaccttttattagttatcttttatttattaaccacaagatgaattccaataatgttggcaatttatagctgctcttaaagatcagtggagtatatgtcttattacattaatgaacttttatagaaaatttaggaccaattcacgacttcataccaatggcatttagtaacaaagccatttactactagtagctatttgctataccacgcaatgcaatatgaacattgaggctgaataaagtctatagtagttactataatgcctaaagaaaaaagatgtaagaaactatactactgcctccaaagggtttcatataaaaaaggtacttttaaataactctttgatacatgaatagaaagaaacatagatttgcaggtagatgtattttaataaattctttttgccactcatctttctaatgaatgttacaccgttgaaattttataagtctgcatctgcatctagatctttctctctctctctcgctatatatgtatatatatcactaggatatggaaaataattcaaattttacccacattgcattgagaggtatatttctttataactctagtctccatattatatcacaaccaaatatgtctgaaaagaagagtcccaaatcaaactcacaaacaaacgaagcggagtgagccaaaaggaaagtgtttta

SEQ ID NO: 719670 - DNA, 621 bp, Homo sapiens
tatcttcctaaaatcttaattcttcctattcttggtcttaaaatagttatctactttcttaatgagcctactttattgttccaagctagtaacaccaactgataactttgaactgaaacaaataattcacttaggtctaaattggtttcccagtcccagtggattcagcaaaaacactgaggcttagaaatgtacaccagtggccaagcatcttcacacaatgtcatttgtaccagggtttgtccaaatatagagaaccacacagtcaaagaaaccatggattttacccaagtyatctatttgaacaaatttgtttgtgtctcctgttcttttattatccccatgtatgcttttaatcagctagatgtagagtagtacacagtctttgcttccagcttttaaagacgtgtgaaaatccaagaatcagtggtgatccattatctagcaatattactgagcaaatatgagctcactgcccacaacagatagaaaccaatactctagcaatggcttttgtgaaaagaaagtctttattttgccaggctggccagcaagggcacaggtgatgcaactcaaatctgtcttactaatttggggtctggggaaagttttaaggggcca

SEQ ID NO: 719671 - DNA, 985 bp, Homo sapiens
caaaaaacagtcatttgggaggaaaaatggggtcagctgctttcacttagagccaaggttccaggcttggggatggagtttagccaggagcccagccattgtgtatcaatatcatcataaaaaaaaaatgatgcaagacccatttgggttttttttcatcaataaaaaggtagtaaatactgaggtaattatacttttttttgttctatagatattttatgatttctgtctaatgatatccattttttaaaaaaaaaattactctccccaccaccttttaaaaacatgattgttaacatgcccatgttgtatatcatgtatcacatgatatcatgtatcacatctatcacatgatatggatatcatgtatcacatctatcacatgatatgtatatcatgtatcacagctgatgctgtattggaccatatctgtgtcagggctcggtctgtgtcagggctcaggacatgataatccaacatatgacaccttgggcaattgagaaagccacagaagccagaagttcactstgactttcccctggctttctggtgtgaagcatggtcataaaggaattacctgacctccctcacccaaacgtagattataagaccctcattccagaggcttcctgctccatacctagaggtgattaagtgttgttcagaagggccaagaagaatctgaacaaacaagatttgctgagttcctcccagtttactaccattaaatcatacccctttctttgttcaatcacatttctcaatgactgtccattcttcattgaccctaagcataaaaatacagttttccctgggtctctgggtcttcatttctgaagggtcccatgccatctaaaactttgttaaataaatttgttatgcttttctcttgttaatcagtcttgtcttatggggtgtcacccatgacacttgcaatgggtaaggaaaagatattaatttttctcccattcacctgcttagacaa

SEQ ID NO: 719672 - DNA, 1321 bp, Homo sapiens
tccagttgccaagcatccatagggaaggaattaaagctggagtgtatttctgggcacctctcctgctaagcactttggttgatggagggcagcgggtggctttgaggtcatcaggatggacactcagtaacagccctttgccttttttttttttttttaacttcttttttgcttccagggtgacattatctgggtctagggactgaaacagtttgggaaatgttgtcttctgaaaatggaagatggatttttagtatctttgggggtttggtgtacttcttaaaatatgagtttagaacttgctgtatgcccagtaatattcagggtactggggatacagagatgagcacaacagaccaagctccaagcttttgaagcttacattgaatggaaaagacaggtaataagcaagtaaacacatgcaatagaataaaatattagcactttctgaaaaaaagcaaagcaggtaaggaaagaaagagtggggcagggactgatcagggaagtcttccctgaggaaaaaacatttgtgttgggattaagtgaagggaggtgtattagtccattctcacactgctataaagaaatacctgggactgggtactttaaaaagaaaagaggtttaattgactcacagttctgcattgctgggaaagcctcaggaaacttacaatcatggtggaaggtgaaggggaagaaaggcatcttcttcacaaggcgacaggaaggagaagtgccgagcaaaggggaaaggccccttagaaaaccatcagatctcaagagaactcactgtcacaagaacagcatggggtaactggccccatgattcagttacctcccatcaggttcctcccacaacacatggggattagggaactacaattcaaaatgagatttggatggggatgcagccaaaccattatcaggaggggtgcccagcrttgtaagaagggccttctgtgcagagggaacagccagtgcagaattcattcttcaagtggctatgttccttttatttattttatattttgcacttcctaagaatcattccatggaatcaatccattccatcccttccataaagtacaagcaaagttaaacgagctgaagtaggtgaatcactagaacggtgtctggcatatcattcatgttcaaaaaaaatgtgagctgcttcctttcaatgtgcaactcaagaaaatgacttgccatccattcttacatacagagggtggctaccatttgccactgaaacaccatattctataacttcaggccatcaatgggaagcatcttccttttgcttccctctctcctttctctc

SEQ ID NO: 719673 - DNA, 755 bp, Homo sapiens
gatgataatacttttgaaaacatagttgacttgttataattaagccagtgtttacatctgctttaccaaatacttcccatggtttttatctcagaaaatagactcaaaagtgaacacacacacacacacacacacacatatataccacacatatgtacaacctgcatcgtctaataagctcagtggttccatatactatatctttggccaaatccggggctttctgattagcacctctagttttttttttttttttcttcccactcctgctataaccattctcagcattttcttccagttttttccttctagaactactgccaggtgaactacaaattattttcttgatttgcagcccatgyaccaatgagaaaatgcctatggtgtcttttgattttatggttcattgcttaggccttgtcataaaaaccatggcgtctcttaaaagaaaatataaaacaaaaacaactttctcttggccagagtttatcaaacctatgcccataatggcatagaaatataggaaatgagacaatcctactcccccaatccccgttttctgtttatttgtttgattcctgccaaagcaaagtgaccttgagggggcaccggctcagtgtttgctttttctggcgctacccacacccctccttcttcatctcctactgctccccattcagctcctcaacaatcggcaatcactctgcccttctgctccaaatttatgaccgggagcaagccataaacagagaagg

SEQ ID NO: 719674 - DNA, 755 bp, Homo sapiens
gatgataatacttttgaaaacatagttgacttgttataattaagccagtgtttacatctgctttaccaaatacttcccatggtttttatctcagaaaatagactcaaaagtgaacacacacacacacacacacacacatatataccacacatatgtacaacctgcatcgtctaataagctcagtggttccatatactatatctttggccaaatccggggctttctgattagcacctctagttttttttttttttttcttcccactcctgctataaccattctcagcattttcttccagttttttccttctagaactactgccaggtgaactacaaattattttcttgatttgcagcccatgcaccaatgagaaaatgcctatggtgtcttttgattttatggttcattgcttaggccttgtcataaaaaccatgrcgtctcttaaaagaaaatataaaacaaaaacaactttctcttggccagagtttatcaaacctatgcccataatggcatagaaatataggaaatgagacaatcctactcccccaatccccgttttctgtttatttgtttgattcctgccaaagcaaagtgaccttgagggggcaccggctcagtgtttgctttttctggcgctacccacacccctccttcttcatctcctactgctccccattcagctcctcaacaatcggcaatcactctgcccttctgctccaaatttatgaccgggagcaagccataaacagagaagg

SEQ ID NO: 719675 - DNA, 755 bp, Homo sapiens
gatgataatacttttgaaaacatagttgacttgttataattaagccagtgtttacatctgctttaccaaatacttcccatggtttttatctcagaaaatagactcaaaagtgaacacacacacacacacacacacacatatataccacacatatgtacaacctgcatcgtctaataagctcagtggttccatatactatatctttggccaaatccggggctttctgattagcacctctagttttttttttttttttcttcccactcctgctataaccattctcagcattttcttccagttttttccttctagaactactgccaggtgaactacaaattattttcttgatttgcagcccatgcaccaatgagaaaatgcctatggtgtcttttgattttatggttcattgcttaggccttgtcataaaaaccatggcgtctctwaaaagaaaatataaaacaaaaacaactttctcttggccagagtttatcaaacctatgcccataatggcatagaaatataggaaatgagacaatcctactcccccaatccccgttttctgtttatttgtttgattcctgccaaagcaaagtgaccttgagggggcaccggctcagtgtttgctttttctggcgctacccacacccctccttcttcatctcctactgctccccattcagctcctcaacaatcggcaatcactctgcccttctgctccaaatttatgaccgggagcaagccataaacagagaagg

SEQ ID NO: 719676 - DNA, 755 bp, Homo sapiens
gatgataatacttttgaaaacatagttgacttgttataattaagccagtgtttacatctgctttaccaaatacttcccatggtttttatctcagaaaatagactcaaaagtgaacacacacacacacacacacacacatatataccacacatatgtacaacctgcatcgtctaataagctcagtggttccatatactatatctttggccaaatccggggctttctgattagcacctctagttttttttttttttttcttcccactcctgctataaccattctcagcattttcttccagttttttccttctagaactactgccaggtgaactacaaattattttcttgatttgcagcccatgcaccaatgagaaaatgcctatggtgtcttttgattttatggttcattgcttaggccttgtcataaaaaccatggcgtctcttaaaagaaaatataaaacaaaaacaacttyctcttggccagagtttatcaaacctatgcccataatggcatagaaatataggaaatgagacaatcctactcccccaatccccgttttctgtttatttgtttgattcctgccaaagcaaagtgaccttgagggggcaccggctcagtgtttgctttttctggcgctacccacacccctccttcttcatctcctactgctccccattcagctcctcaacaatcggcaatcactctgcccttctgctccaaatttatgaccgggagcaagccataaacagagaagg

SEQ ID NO: 719677 - DNA, 755 bp, Homo sapiens
gatgataatacttttgaaaacatagttgacttgttataattaagccagtgtttacatctgctttaccaaatacttcccatggtttttatctcagaaaatagactcaaaagtgaacacacacacacacacacacacacatatataccacacatatgtacaacctgcatcgtctaataagctcagtggttccatatactatatctttggccaaatccggggctttctgattagcacctctagttttttttttttttttcttcccactcctgctataaccattctcagcattttcttccagttttttccttctagaactactgccaggtgaactacaaattattttcttgatttgcagcccatgcaccaatgagaaaatgcctatggtgtcttttgattttatggttcattgcttaggccttgtcataaaaaccatggcgtctcttaaaagaaaatataaaacaaaaacaactttctcttggccagagtttatcaaacctatgcccataatggcatagaaatataggaaatgagacaatcctactcccccaatccccgttttctgtttatttgtttgattcctgccaaarcaaagtgaccttgagggggcaccggctcagtgtttgctttttctggcgctacccacacccctccttcttcatctcctactgctccccattcagctcctcaacaatcggcaatcactctgcccttctgctccaaatttatgaccgggagcaagccataaacagagaagg

SEQ ID NO: 719678 - DNA, 755 bp, Homo sapiens
gatgataatacttttgaaaacatagttgacttgttataattaagccagtgtttacatctgctttaccaaatacttcccatggtttttatctcagaaaatagactcaaaagtgaacacacacacacacacacacacacatatataccacacatatgtacaacctgcatcgtctaataagctcagtggttccatatactatatctttggccaaatccggggctttctgattagcacctctagttttttttttttttttcttcccactcctgctataaccattctcagcattttcttccagttttttccttctagaactactgccaggtgaactacaaattattttcttgatttgcagcccatgcaccaatgagaaaatgcctatggtgtcttttgattttatggttcattgcttaggccttgtcataaaaaccatggcgtctcttaaaagaaaatataaaacaaaaacaactttctcttggccagagtttatcaaacctatgcccataatggcatagaaatataggaaatgagacaatcctactcccccaatccccgttttctgtttatttgtttgattcctgccaaagcaaagtgaccttgagggggcaccggctcagtgtttgctttttctggcgytacccacacccctccttcttcatctcctactgctccccattcagctcctcaacaatcggcaatcactctgcccttctgctccaaatttatgaccgggagcaagccataaacagagaagg

SEQ ID NO: 719679 - DNA, 587 bp, Homo sapiens
tcctatctcctattcttcttctttgtcaatctctgtagcctccacctttgctcaaattggctcagtgatatgattttaatactaagcccacacccagttggtatgaagacattaagtaattaattaattcaataactatttrctgatctgaacaaagtggacaaaaaaccctgtctctgtggaattttcttccaggcatgaggggcttgggaatgggtaacaagtaagtaaattatgtaacttgtttgacagtgctaagtgctacaaagagaaactaggtagataaaagaaatagggacttgggaggttgaaattttataaaaaaaaaaaaaggtcagagaaaataccacttttctgatgagttaaaaagctatgacctgctaatttttatgtatttattctgtgtccattaaaacttccagaaactttctcttgaagtgacatttgagtctcaagatctggccctggtgattatattgtgacacactgtgatcattacaaaaatttttatcatcatgtataactgtgatgctattttgcttgcagcccagacaatgtgatggatttattaaaacattctgataatc

SEQ ID NO: 719680 - DNA, 666 bp, Homo sapiens
atgcttgtgtgccttcaaatttatgacattttcctctcaccccttagtggtgaagaaactgaaatattgaccccatccccaaaaattaataagttaagtgtaagtggtacctgtggtccatttgaaagggaatatctgaatggaatgggaggacagccacctattctcagcaggcagaaagggtacttgtcaacaggtaatatgggaaagctaagaaagattaagactttatttttccctatagtctgcctttctgtgttcccaattctttacactgctgtgtaatgttatggaatatgattctcaattaggaaacttgaacgaagacaaaaaaaatggtaagagactatcttctaaatatatccttagttcttcaggcagcaatttaatttcagttaaaagaaagaacaaaggcatgtcaatgttttggactgaggctarccgaggactttcactggcactctttttagagctagaccattggggaagttgcagtgttacataatgctatgcttctcattgccatagagaagcagcagctgctttgagactttagaaaatcagcagcgacttgaactctgtgttgcttgtgtccagaaaattccaggcactttgtcaatttttttcttcattttcaaattatccttttgaggaaaatataaagga

SEQ ID NO: 719681 - DNA, 601 bp, Homo sapiens
ttgaagaaagacatggttgataaagggatttggacattataatacctgtagaactaggtgccttgtctttaagataaaattaggcaatgagaagttgcttatgtgatcatcttctttgataagatctattattttcacaagttttcaagtatttacwtgtttcttcgatacattataaggtgctgctgacagaaaagattcaaaaattgtattagtatagcaagatagatttgaaaattaacaaaaatttgcagtcaatgttgtaataggaatgtacttgaataaacataaattatgagagaaaataagaatggtttctcatgctggaaaggtgaggtaagcagtgaggagtcaaataactcagatggacattatttgacaaacaatacaaatccaagaagaaacaaaagagaatatttccaaaaagtgaggacaatttggtcaaatagcaatggtataacagaatatggagatatcttacgttccaaccaagactgctgcctaatttgtggcattagtagaaaataaatatgcaggatcttttttttcaaaaattatttaaaatttatgatggcagtaatagagtgttaagtgaaatatg

SEQ ID NO: 719682 - DNA, 601 bp, Homo sapiens
ttgaagaaagacatggttgataaagggatttggacattataatacctgtagaactaggtgccttgtctttaagataaaattaggcaatgagaagttgcttatgtgatcatcttctttgataagatctattattttcacaagttttcaagtatttacatgtttcttcgatacattataaggtgctgctgacagaaaagattcaaaaattgtattagtatagcaagatagatttgaaaattaacaaaaatttgcagtcaatgttgtaataggaatgtacttgaataaacataaattatgagagaaaataagaatggtttctcatgctggaaaggtgaggtaagcagtgaggagtcaaataactcagatggacattayttgacaaacaatacaaatccaagaagaaacaaaagagaatatttccaaaaagtgaggacaatttggtcaaatagcaatggtataacagaatatggagatatcttacgttccaaccaagactgctgcctaatttgtggcattagtagaaaataaatatgcaggatcttttttttcaaaaattatttaaaatttatgatggcagtaatagagtgttaagtgaaatatg

SEQ ID NO: 719683 - DNA, 1818 bp, Homo sapiens
ccaatcctatatctaaatttatggttcactaaaggggaatgtgcacatcgcatatgaaatatttgaaatgcttattaattaacatatcacagcctgtgcaaataacacattacattccttgctatttcttcaatgacatttggagtattggtggacagagctacaaatatttttgtctggtctcgcggagacattctatcatggtttaagtacgatggatgatttacacaataaaaccacaaaaccagtaaggaaatgaataggctgacacacatgtgggcactcgtagcatattgagaaatttagcaaagtgattcatggttaagagtttgaaatcaaactgcctgggttcaaattgtagctcttccacctactagctgtgtgccttaagcaagtttgcttacctttctgtgcttcatatttctcctctgcagaatgaagataacaataccacctaagtcatgggcttcttataaaagtgaaattaactaatacatgtaaagtgcttagaaccatgtgtgacacatagtaattactcaaggaatgtcaattcttgttggtgttatcattaacatcattactatgtggtagacacaggaggctcacttggttcaggtcccctgtcctcctggagcctacaggaggaaaaagacagataagtaggtagggaggaagtagccaagggaggaaagaacaagtgcacagaaattgaaatggggatcagggaaggtttcttagaagaggcagaatttaagctgaggctgacgggatacaaagaacttagccagtgtasctagagccagaggtggaggtgggagtgttgtaggagttgggcacaaggtctggaggcctcagtaggatgctacctgtgagttcctactgtgagtaccagtgttgggtgttgtcagggcctcctgggcccacgggagctcctgtgggggcagttgccacctatttctcccttcctcatcgggtcttccctgtattctttgtccacctttttttctttcccttctttgttcctaaagccttggccctgacagcaatctcaggggggacaggttaatggcctctagtctagatacagtcccttgggggtaggaggtgtgcacgggctagattgtcatccttctggtctggggactctatgatcccagatcttaaacaccagactcatctttctctgcgatatcgtttccagtagagcagttctgaaccatcagtcacatggaggctgtgctggtctctctcccatgcatccagcatcctggcaccacttgtcccagaacatgaataaaaactaacttatgtgagtcctgaaactctggcctcagcttgcaagaagagggtgtgttagagaattttaggagcattatagacagcactagcctttctctggtcatcctgacaaagacctcaactctcctgcttttttgtttctgctctaggtttgatctggctttggccattcacttgggtaggggctgtctggagtgctggaagcacatgggctagaatcttgtccgttgtataagttgaacaaatcttagcaggcttagtgtcaactctcagagcactcctttttctcatttggaaaacgggaaaataatactgccttcacacaatgggatgaatccaaagccccgtggccagcgcccagcatagtcagtggtggtggtctgcatctcgtcatgtcctccaggctctgtacatctcatctgccctcccttctcaccctctcttctcttacccactagcagagcccttgcagctaagctgagctacacttttcctgctttctgattaggtggcagctgt

SEQ ID NO: 719684 - DNA, 1818 bp, Homo sapiens
ccaatcctatatctaaatttatggttcactaaaggggaatgtgcacatcgcatatgaaatatttgaaatgcttattaattaacatatcacagcctgtgcaaataacacattacattccttgctatttcttcaatgacatttggagtattggtggacagagctacaaatatttttgtctggtctcgcggagacattctatcatggtttaagtacgatggatgatttacacaataaaaccacaaaaccagtaaggaaatgaataggctgacacacatgtgggcactcgtagcatattgagaaatttagcaaagtgattcatggttaagagtttgaaatcaaactgcctgggttcaaattgtagctcttccacctactagctgtgtgccttaagcaagtttgcttacctttctgtgcttcatatttctcctctgcagaatgaagataacaataccacctaagtcatgggcttcttataaaagtgaaattaactaatacatgtaaagtgcttagaaccatgtgtgacacatagtaattactcaaggaatgtcaattcttgttggtgttatcattaacatcattactatgtggtagacacaggaggctcacttggttcaggtcccctgtcctcctggagcctacaggaggaaaaagacagataagtaggtagggaggaagtagccaagggaggaaagaacaagtgcacagaaattgaaatggggatcagggaaggtttcttagaagaggcagaatttaagctgaggctgacgggatacaaagaacttagccagtgtagctagagccagaggtggaggtgggagtgttgtaggagttgggcacaaggtctggaggcctcagtaggatgctacctgtgagttcctactgtgagtaccagtgttgggtgttgtcagggcctcctgggcccacgggagctcctgtgggggcagttgccacctatttctcccttcctcatcgggtcttccctgtattctttgtccacctttttttctttcccttctttgttcctaaagccttggccctracagcaatctcaggggggacaggttaatggcctctagtctagatacagtcccttgggggtaggaggtgtgcacgggctagattgtcatccttctggtctggggactctatgatcccagatcttaaacaccagactcatctttctctgcgatatcgtttccagtagagcagttctgaaccatcagtcacatggaggctgtgctggtctctctcccatgcatccagcatcctggcaccacttgtcccagaacatgaataaaaactaacttatgtgagtcctgaaactctggcctcagcttgcaagaagagggtgtgttagagaattttaggagcattatagacagcactagcctttctctggtcatcctgacaaagacctcaactctcctgcttttttgtttctgctctaggtttgatctggctttggccattcacttgggtaggggctgtctggagtgctggaagcacatgggctagaatcttgtccgttgtataagttgaacaaatcttagcaggcttagtgtcaactctcagagcactcctttttctcatttggaaaacgggaaaataatactgccttcacacaatgggatgaatccaaagccccgtggccagcgcccagcatagtcagtggtggtggtctgcatctcgtcatgtcctccaggctctgtacatctcatctgccctcccttctcaccctctcttctcttacccactagcagagcccttgcagctaagctgagctacacttttcctgctttctgattaggtggcagctgt

SEQ ID NO: 719685 - DNA, 574 bp, Homo sapiens
caaggtattcaaggtatcagtagctactgactatgtcctggccagctgtgaaaagaaaggggtgaatttaacaagtattctaaaattgtccttgacatagtaatcacagattatctatcttctgtctggtaatatatatatatatatgtttttgttkttgttgttgttgttttgtttttttgtgacggagtttcgctctttttacccaggctggagttcaatggcatgatctcggctcactgcaacctctgcctccgggttcaagtgattctcctgcctcagcctcctgagtagctgggattacaggtgtgtgccaccacgcccggctaatttcctatatttttagtagagacgggttttcaccacgtcggccaggctggtttcgaactcctgacttcaggtgatccacccacctcggcctcccaaagtgctgggattacaggcgtgagccaccactcccagcctctgtctggtaatttaaatgctttggagactccaagattcacccatgtccaaaataaattctatatcagtcatagtactagcatttagaagttgagtgttttatcctcta

SEQ ID NO: 719686 - DNA, 574 bp, Homo sapiens
caaggtattcaaggtatcagtagctactgactatgtcctggccagctgtgaaaagaaaggggtgaatttaacaagtattctaaaattgtccttgacatagtaatcacagattatctatcttctgtctggtaatatatatatatatatgtttttgtttttgttgttgttgttttgtttttttgtgacggagtttcgctctttttacccaggctggagttcaatggcatgatctcggctcactgcaacctctgcctccgggttcaagygattctcctgcctcagcctcctgagtagctgggattacaggtgtgtgccaccacgcccggctaatttcctatatttttagtagagacgggttttcaccacgtcggccaggctggtttcgaactcctgacttcaggtgatccacccacctcggcctcccaaagtgctgggattacaggcgtgagccaccactcccagcctctgtctggtaatttaaatgctttggagactccaagattcacccatgtccaaaataaattctatatcagtcatagtactagcatttagaagttgagtgttttatcctcta

SEQ ID NO: 719687 - DNA, 574 bp, Homo sapiens
caaggtattcaaggtatcagtagctactgactatgtcctggccagctgtgaaaagaaaggggtgaatttaacaagtattctaaaattgtccttgacatagtaatcacagattatctatcttctgtctggtaatatatatatatatatgtttttgtttttgttgttgttgttttgtttttttgtgacggagtttcgctctttttacccaggctggagttcaatggcatgatctcggctcactgcaacctctgcctccgggttcaagtgattctcctgcctcagcctcctgagtagctgggattacaggtgtgygccaccacgcccggctaatttcctatatttttagtagagacgggttttcaccacgtcggccaggctggtttcgaactcctgacttcaggtgatccacccacctcggcctcccaaagtgctgggattacaggcgtgagccaccactcccagcctctgtctggtaatttaaatgctttggagactccaagattcacccatgtccaaaataaattctatatcagtcatagtactagcatttagaagttgagtgttttatcctcta

SEQ ID NO: 719688 - DNA, 574 bp, Homo sapiens
caaggtattcaaggtatcagtagctactgactatgtcctggccagctgtgaaaagaaaggggtgaatttaacaagtattctaaaattgtccttgacatagtaatcacagattatctatcttctgtctggtaatatatatatatatatgtttttgtttttgttgttgttgttttgtttttttgtgacggagtttcgctctttttacccaggctggagttcaatggcatgatctcggctcactgcaacctctgcctccgggttcaagtgattctcctgcctcagcctcctgagtagctgggattacaggtgtgtgccaccacgccckgctaatttcctatatttttagtagagacgggttttcaccacgtcggccaggctggtttcgaactcctgacttcaggtgatccacccacctcggcctcccaaagtgctgggattacaggcgtgagccaccactcccagcctctgtctggtaatttaaatgctttggagactccaagattcacccatgtccaaaataaattctatatcagtcatagtactagcatttagaagttgagtgttttatcctcta

SEQ ID NO: 719689 - DNA, 1736 bp, Homo sapiens
cgacagccgcagctcgacccagctgtgtacccgcgggtcccggactcaccgcccgcccggcctggcgcggcgccttcacctcggaaacgctgggtggacttcgctgtaaaccgtaacttcccatccagacggcagccgcgccgccgcgcctcggcccgctcctggcgccacaggtcgcccgtcccgcgttcccaaaagcaccgcgttcactcagaagctcacgctgcctcgcgacgctcacctacccctcccaatatcgccgctgtctcaaccgccgcccagcccatagcctgcggccagctggatcctcagggtcccgctcggcgcgtcaggagagcccaaggcgcaggcgcagcggggccttaaaggtacatggccgcctctgcggcacagcgggttcgcgcgggccaggaaaaggagtaaccgagcggatagacagagtgcagcagagaccgggaaatccctctctcccctccgcctctcttttaaagcaccagcccttgaccctacaaatcgctgatttcccgggccacttgaactgcccctgccaggttaaaggggcagaagacacaccccctcgggggcccggagcgaccccgcgcttaggactgcaggcctggtgctgcagcaccgcccccgagtctgacttccaggcccgggcatggggtgcagacgcgcagacgtgggaaggcaacccccagctcccccgagaggtggccttaggtcactcgcaaaaacaataacccacatgtcagtgggacttgtagtgattttctaatttaaattaataacagattttgcagatgggcttccactgaaataagcctttgagaaaaagaaaaactttttcaacaagattaggaaataccaagaaataggaagtaaagccatgccgtccacccagctaacagctttgaaaacttgaaattttatctaaggcaaatgcttgcataactttaggtagtgccattattattattgttattattattattattattattatttgaaacggagtcttgcactgtcgcatgcagtgatgccatctcggctcactgcaacctccgcctcttgggttcaagtgattctcctgtctcagcctcccgagtagctgggaccacaggccctcgccaccacgctcggctaatttttgtatttttagtagagacggggcttcaccatgttagccaggctggtctcgaactcgtgacctcaggtgatccaccaggcttaccctctcaaagtgctgggattacaagcatgagccacccactgggcaaggcctgcctggaaataatcgtgagaaataaactcacccgtccaaacccaaagaatggactccaagacccggaaaacagcagaagtgcgacttattattaatgacagtcttgcaagatcgggtgtctggtaggcaggcacacccagtaggcttacaacaagcaatttatcccctagtgtggaagtgcctccccyggttcctcataggctgagtactatggggtcacagtattcccggatgtcgcctattggatcttgggttgggacttttaggttgttgtttttttttttagggttgtctccctgtattttgttgcagcccataatgcattgcaatcatggtcagctcgggggcttttcaagtattagacttatgacctgggcagtcaggcaagctgataagaatagatgtagcgaactattttgcaggctagtaaatgtccattctagactaaact

SEQ ID NO: 719690 - DNA, 2111 bp, Homo sapiens
gcataaatccacaaggtagtgaataaaacagcttactttcaaggcggcagaatggcattgaccactaactactcaacagaaatgatgaaagacggatgccagaagaatgagatcaccaaagtgctaataaaaaataattgccaacctagaatttctaggrcccactttttaagagtaggatgaaatgcagacattcttgggcaaacaaaaaaagagagtttatctgcagcatatcctcagaaaaggatgtaattaaatcagagaaaaagatgaggatcaagaaggtaggaaacatggaaaaatcatgacaagtagtttttgccattaagaaaaagatgaaactaattaattccacaaaacaagtcaagaataactcgtgaattagagggagcagaaatggagttgccatcttcaaaggcactcgttttcaggagatgtatacaatttttggaaaaacttgtatttgaaaagttaagtatgcattttgcaattttcagagagtgaaagaatagcaacaaaatacttataaactaggaaaggaaaaatcttgaataagaaaataatctataccaaaaaagccacatttaagtactatgtttattttgttaaattaatttaaattttaaaaatttatcttcactctatgcaataatatttgtgaaattttgactctggtgtgtaaattaacttgtttactgcattgaatcctttgtcatttttgtaatactttgattatctccatctaaatattcaaacatcacctcttaacataaccagtggtacactttccatgatttagatatggtggtctgactagcgttgaaacttgagagaagctagcctcaataacaggacccagggataaccatctagttctccagcgaagggccttaagccctctgggggtccacattgttggttactcactaatcaaagatgtgcccggcccctagttttctcctccctgactcaagttcatgtcattcaactctctgcctggttcacggactcatggtattctgccctactcctgctgcttggctatccaccagttaccaaaagctgaagttgatgcaaccacgtgaaatttctacaagaccctcccctctttgggctcccatcacattgtcactactgccagatgtcatcagcgtgagagaatcagtggtggtccacaggagcatcttgttgtccctccctaaatgataccagcaccactttcctcccaaaatcaatgctcccaaccacaataccccccttggcttcacttgtgttcccagcaagccatcaaaactagcaccaaggctctctctaggaggctataaatatgtatgttttccttttttctgtctttaaatggtgagttaacacaaacagacctacgtacaccagaccccaaggtatcaatctggatcccttcacaggatcctttgacattttccattcacagaaccaagaaaaaaaaagcaaactctgaagcccagcccttccctcctctattccggagcaggcagctgatgggacgcaaatggggctgctgagcttcagggtggaaatggaagccagtgccttgtgctccttgtgatgtgaaacgtgttgcagctgcgcagagaaacaagagttttcactggacacagtgcaaggagcaagcaggatgcctttcatggacagaagctgcatctgtctatacttcagccattcaatcaacaaacatttcatgatcatcagttactgctatgaaaggtagatgctgagggtaaaacaaggaacaagatgagaatgccccactcccatatggcacatgtaaaagcataaaagtctatctgaatcatttttgaaacagaaggcccatgacattgcctgctgagtccacattggctcttgtttgtggataccagcacatattaaaattatctgaaatattcagttgtgagccccctcccctgatatggttaggcttcgtgtccccacccagatctcatcttgaactgtaatccccataatccccataatccctatttgtcaaaggagagaccaggtggaggtaattgaatcatggggatggtttcccccatgctgttctcatgatagtgagtgagttctcccaagat

SEQ ID NO: 719691 - DNA, 2111 bp, Homo sapiens
gcataaatccacaaggtagtgaataaaacagcttactttcaaggcggcagaatggcattgaccactaactactcaacagaaatgatgaaagacggatgccagaagaatgagatcaccaaagtgctaataaaaaataattgccaacctagaatttctaggacccactttttaagagtaggatgaaatgcagacattcttgggcaaacaaaaaaagagagtttatctgcagcatatcctcagaaaaggatgtaattaaatcagagaaaaagatgaggatcaagaaggtaggaaacatggaaaawtcatgacaagtagtttttgccattaagaaaaagatgaaactaattaattccacaaaacaagtcaagaataactcgtgaattagagggagcagaaatggagttgccatcttcaaaggcactcgttttcaggagatgtatacaatttttggaaaaacttgtatttgaaaagttaagtatgcattttgcaattttcagagagtgaaagaatagcaacaaaatacttataaactaggaaaggaaaaatcttgaataagaaaataatctataccaaaaaagccacatttaagtactatgtttattttgttaaattaatttaaattttaaaaatttatcttcactctatgcaataatatttgtgaaattttgactctggtgtgtaaattaacttgtttactgcattgaatcctttgtcatttttgtaatactttgattatctccatctaaatattcaaacatcacctcttaacataaccagtggtacactttccatgatttagatatggtggtctgactagcgttgaaacttgagagaagctagcctcaataacaggacccagggataaccatctagttctccagcgaagggccttaagccctctgggggtccacattgttggttactcactaatcaaagatgtgcccggcccctagttttctcctccctgactcaagttcatgtcattcaactctctgcctggttcacggactcatggtattctgccctactcctgctgcttggctatccaccagttaccaaaagctgaagttgatgcaaccacgtgaaatttctacaagaccctcccctctttgggctcccatcacattgtcactactgccagatgtcatcagcgtgagagaatcagtggtggtccacaggagcatcttgttgtccctccctaaatgataccagcaccactttcctcccaaaatcaatgctcccaaccacaataccccccttggcttcacttgtgttcccagcaagccatcaaaactagcaccaaggctctctctaggaggctataaatatgtatgttttccttttttctgtctttaaatggtgagttaacacaaacagacctacgtacaccagaccccaaggtatcaatctggatcccttcacaggatcctttgacattttccattcacagaaccaagaaaaaaaaagcaaactctgaagcccagcccttccctcctctattccggagcaggcagctgatgggacgcaaatggggctgctgagcttcagggtggaaatggaagccagtgccttgtgctccttgtgatgtgaaacgtgttgcagctgcgcagagaaacaagagttttcactggacacagtgcaaggagcaagcaggatgcctttcatggacagaagctgcatctgtctatacttcagccattcaatcaacaaacatttcatgatcatcagttactgctatgaaaggtagatgctgagggtaaaacaaggaacaagatgagaatgccccactcccatatggcacatgtaaaagcataaaagtctatctgaatcatttttgaaacagaaggcccatgacattgcctgctgagtccacattggctcttgtttgtggataccagcacatattaaaattatctgaaatattcagttgtgagccccctcccctgatatggttaggcttcgtgtccccacccagatctcatcttgaactgtaatccccataatccccataatccctatttgtcaaaggagagaccaggtggaggtaattgaatcatggggatggtttcccccatgctgttctcatgatagtgagtgagttctcccaagat

SEQ ID NO: 719692 - DNA, 914 bp, Homo sapiens
gaaaaaccttaaggtacatctgatctaatttcccactttaaagtgagaaaatcaaacattgcctagggatctcatttttccccaggctaatttgggttttcatatttccatctcaaagtggactttctttggctaactttaaggtttttttttttttacatatatacaacttttattttttatttctttttttattttttatttttttattttattattattatactttaagttttagggtacatgtgcataatgtgcagcacagcatggcacatgtatacatatgtaactttaagttttaaatgtaaatgcctgaaaagtaactcaggatctagccttttcattagttttgatcatgtatgaaagcaagtatttmtttcccccaaatgaaaccccagggcttccagtatttgtagtgatagtgtgaatccattaggtctatttttaattatatctgtcttattggtttttttttccacatttcctaactcacttgtgatattgcttcatataattcaactttttgtgtgctgggttcccatctgccccacaaaggcctctgtgcaaatctgatatcctgtttgaatgacattgttttgcttttaccctattgcttcgtatctgtcccaatgttaagtcagttctcaacattaaggcattaaaaattagcttttctcaaatgctcagcatcactaatcattagggaaatgcaaattacaaccataatgaatatcatctcacacctgttggagtggcatttatcaaaaaggtgaatgatatgttagagataatgcagaggaaacggaacacagacattgtgaataggtatgtaaattagtacagctggtgtggaaaacagtatggagtttcctcaaaaacctaaaaatagaatctaccctatgatccagtaatcc

SEQ ID NO: 719693 - DNA, 914 bp, Homo sapiens
gaaaaaccttaaggtacatctgatctaatttcccactttaaagtgagaaaatcaaacattgcctagggatctcatttttccccaggctaatttgggttttcatatttccatctcaaagtggactttctttggctaactttaaggtttttttttttttacatatatacaacttttattttttatttctttttttattttttatttttttattttattattattatactttaagttttagggtacatgtgcataatgtgcagcacagcatggcacatgtatacatatgtaactttaagttttaaatgtaaatgcctgaaaagtaactcaggatctagccttttcattagttttgatcatgtatgaaagcaagtatttctttcccccaaatgaaaccccagggcttccagtatttgtagtgatagtgtgaatccattaggtctatttttaattatatctgtcttattggtttttttttccacatttcctaactcacttgtgatattgcttcatataattcaactttttgtgtgctgggttcccatctgccccacaaaggcctctgtgcaaatctgatatcytgtttgaatgacattgttttgcttttaccctattgcttcgtatctgtcccaatgttaagtcagttctcaacattaaggcattaaaaattagcttttctcaaatgctcagcatcactaatcattagggaaatgcaaattacaaccataatgaatatcatctcacacctgttggagtggcatttatcaaaaaggtgaatgatatgttagagataatgcagaggaaacggaacacagacattgtgaataggtatgtaaattagtacagctggtgtggaaaacagtatggagtttcctcaaaaacctaaaaatagaatctaccctatgatccagtaatcc

SEQ ID NO: 719694 - DNA, 647 bp, Homo sapiens
cagggatatttacacttacggtaatgagcaacaagaaaggtatatattgagaaggggtgatagattcaagtcattaaacctgctgcagaagtcagtcttcaagtggtgcccwcaagaaccccagagactttgggcactgtcctatctttgtaatctcatttccttcctctccaatgaaagcctctaattatcatttgaactccaggatgaactcttggtgttattttcaagtatctccatcatctgaatttgcccagttatgtaataccaattcctattgcttctcaaattaatattaaaactaaccaggcctgcctcattccttttccgcaaccactccgagtttacctggagtctgtctatagtgttcatactctgttctctcatcaagccctcttctctggtctttacctgaggatatcctttgcactttccaactcaagccccagctcctctgaaccttgttctttaaaacttcaatgctaacaataatcagtactttctatgagctcatctttgtattgcatttcagcatattaattgcctcagattatttctaaactattttattttatctggggcatcttgtctctccatccttatggaatagtatttaatggcacctggtaaatttttaaagctcccca

SEQ ID NO: 719695 - DNA, 1144 bp, Homo sapiens
gaaagcatttcttactatgattcagaaagatagggttttatatttcatgagaataatgaaagactctaaatagtagtgaaaaccttcttaagtacaacagtatagcttttatgcttttcttaccaaatggtactctcaaaatgtaaaatatctaccagattaaaaaacaatacagacagctgactactatgcagtcatataaaatactgcttccagtggcttaactgattttctttggatataccagaatgtatacctaagaaaaggagaagaatatattcacactataagagagttatagatacagcctaaagcagatcatagtaaacttggaatttcgctgaagtttgttttatcttaaaaattcatagaaattttatactttatgataaatacatgcttgtattaatattttatatctcttcactttgaaaaccattaaagctgtagaaagttgcatgagtttattgtgtgactgtcactactgctaggcatatgtaatttgaaaatcaattacattttacttttaagttctgtccaatccattttagtctttatcaccttcggcaccacaaattaatcttttaaaaccagttgttgcttctttggcacttgttctacacgttggcacattgttgcactttgaaagtaaatctaaatttcaaacaaaatcaatgttgtattaccatttattctacttagccttttattttaaagtattatcatttcttctcatttagttattttaaaaatattatatatttaagataaaataattaacatgctacagaaatggatgaagtaaaaattatragctggccacacctcaatactttttctaggaggtgacactgatatatagactcacagattcaaattatattttaaaggtattagagaagcttgcttcttaaaagaacttgatggggaatccttttataaattgcataattaagtcttattactaaaagccagctgtcttttttgaaatatagcctatctataatttatatcttaatattactatgatatatctgaaagagaggttaactttgtcagggcagtacaattcaaacacatttcttttgcatttctttgaaataagtttctgggattatttctataaaagttcatatctggttgg

SEQ ID NO: 719696 - DNA, 584 bp, Homo sapiens
ttcttttccttttggaaagcatgaatgaaagacacagaaagattaaggaaaaatttaagatgcaaacagaaggcactacaagccattgggwagatagcagtgtaggacaaaacaaaggtatccagaagcaaaggcagatgacacttggatcaacattatggtggtagcacttgggtaaggagtgaggagaggtctttctgggagttttctgggtttagaggtttgctagaatgactatattaatctgaatgatgtttcaaagttttatgacatctggatgtgtggcttcaaaggctgtttcttaatcttcttttctgcagtaatacaccttgaattaagttagtaggagtgtgactgtttttgcagcctggaatgtgcaagcatgtatttattatttatattgaattgtgttcttcatggtacattatctctggagacatgattaagcttcatgtttttcatatgaatgtccatactagtgtcaaattattcaaactataaacttggggatgatagcgccaatgtcagttaatttgaaacacgcagtagaatggtataattgtattattatagaattactaaat

SEQ ID NO: 719697 - DNA, 2424 bp, Homo sapiens
tgattaccttctttaacatcttctagcaaatcaaattcattccttactcaagctatttactctacctagaatattcttcctcccttctttggctggctggcctcttattattattcagatttcatattaaatgtcaggcctcagtcttccctgaccatctgtgctaaaataggtcttctcttttattctcctcttcagcaatattattgtttcctttatgagcttatgtcagaatttataattatttaacttttaatttagttgcttttgtctccctgttatgagactttttgcctcaagagggcagggtctagatttgtcttcctcagtaatgaaatcttagcaaccatcacagtgcctggcacagagtaggcaccaaatatttcttgagtggatgaatgaatgataggcatgttctgtccgcttgtgtattgaggggctttcaaaaaaggtagttacagaaatgatttcttaaacgaatatatccacatcaaacaggtatgaaaacgtcaggggttttataaaatctagtagcatgtcagttccacatggacagcgactgtggatttgaaactcattgcctcccagcgtagtgcctgttatattttaggcactgatatatttttgttgactgactgaataaattaattctgatatgaagtcacagactgcatagctatacaaggaggaattttactccaagataacatttaggataagttagaaagaaacatagtgattacaggtgatttaagacccaggcactacaatagcaatacaatatgtgtgtattttctgttatttttttttcctaaaagggacctgttggcttacctggagaagttgggatgactggaagcattggcgaaaaggtaattttttaagaattattttgttttataggaagaaatctaggctaaattcaaaaggcagactttcatatgatcttttatgttaattagaaatcacttataactttagcacattacctatactgaatatcttaaatatattgaaatatagctaacagcatgtaggtttctaatttttaaagggcagagtacccttttgattataaagatgtgatctgaagagaaaagatggaacagtctagatttctgactagaaaatattatgtaaatcgacttcatgagagcaagccttctatgagaggcttgaaagaaagcagtttttgaaaaagaagaataagttaccattttacctttctctctccccatcttgtgcttgagcttgttcctatttccattcttactattttcttgaactaaaatatcctctctccttccctctgtttcttcaaaaccaaactgttggactcagctgaattcccatctcctctatgaagtccacagactcctctcatccttcctaatttcttcacttcttggacttagaatagtaccacatagtcaaaatttacttactctctggttgtttcatctctgttaatatcatgtctgcagtgtctgcagttactgagggtagaatctaagtttagttttttaaatatctcttctaactctcatgtactacattctcaattacttaaatactacatacttaatatatrcttattgattttttactaacaatgtaacaaaatgagtgcagttaaaaaattttgcattataatttttttcacccaattagttatttctgtgctgagttaaatcttctgtactaaaatgttgatactcttgagaattttaatgtgaatcagtttagtctttttaagctgctatgacagatttgattatcatgatcttccagacttatttcttatggcacttaattgtggtaggcagactataaaataaaattttcttaaatggttacacagatttgttacattttaatatgctttgatactttcactattctcatattttgtatgtctcataaaatagtaagcatttcttacaaaactttaacatatgatgtgtgctcacttttaagtcttgtttatccataatttctattttcttcattttaataaggactttaatatttttctccaaaaaacatcttaagataattctattttattaaaagtctaataattttaagataaagcgccaaatttgtaaatttaaaaattattggaaataaaaatgatgtatgcatgtaagacatgattctggatgacagtttttctttctaggcttagctcagtcatgactaattaatatgcctctatgttactcttttttctttgttctcttaaaagggagaacgtggaagtccaggcccactaggtccgcagggagaaaaaggtgttatggtaagagctcagtgatttgaaaaatatgtttccaaagaatgcaataaaagcaagtcgttccagagatggaattgcctgggctggaatttaactgagtaaaaaatgttaaatttcccatagaa

SEQ ID NO: 719698 - DNA, 2424 bp, Homo sapiens
tgattaccttctttaacatcttctagcaaatcaaattcattccttactcaagctatttactctacctagaatattcttcctcccttctttggctggctggcctcttattattattcagatttcatattaaatgtcaggcctcagtcttccctgaccatctgtgctaaaataggtcttctcttttattctcctcttcagcaatattattgtttcctttatgagcttatgtcagaatttataattatttaacttttaatttagttgcttttgtctccctgttatgagactttttgcctcaagagggcagggtctagatttgtcttcctcagtaatgaaatcttagcaaccatcacagtgcctggcacagagtaggcaccaaatatttcttgagtggatgaatgaatgataggcatgttctgtccgcttgtgtattgaggggctttcaaaaaaggtagttacagaaatgatttcttaaacgaatatatccacatcaaacaggtatgaaaacgtcaggggttttataaaatctagtagcatgtcagttccacatggacagcgactgtggatttgaaactcattgcctcccagcgtagtgcctgttatattttaggcactgatatatttttgttgactgactgaataaattaattctgatatgaagtcacagactgcatagctatacaaggaggaattttactccaagataacatttaggataagttagaaagaaacatagtgattacaggtgatttaagacccaggcactacaatagcaatacaatatgtgtgtattttctgttatttttttttcctaaaagggacctgttggcttacctggagaagttgggatgactggaagcattggcgaaaaggtaattttttaagaattattttgttttataggaagaaatctaggctaaattcaaaaggcagactttcatatgatcttttatgttaattagaaatcacttataactttagcacattacctatactgaatatcttaaatatattgaaatatagctaacagcatgtaggtttctaatttttaaagggcagagtacccttttgattataaagatgtgatctgaagagaaaagatggaacagtctagatttctgactagaaaatattatgtaaatcgacttcatgagagcaagccttctatgagaggcttgaaagaaagcagtttttgaaaaagaagaataagttaccattttacctttctctctccccatcttgtgcttgagcttgttcctatttccattcttactattttcttgaactaaaatatcctctctccttccctctgtttcttcaaaaccaaactgttggactcagctgaattcccatctcctctatgaagtccacagactcctctcatccttcctaatttcttcacttcttggacttagaatagtaccacatagtcaaaatttacttactctctggttgtttcatctctgttaatatcatgtctgcagtgtctgcagttactgagggtagaatctaagtttagttttttaaatatctcttctaactctcatgtactacattctcaattacttaaatactacatacttaatatatacttattgattttttactaacaatgtaacaaaatgagtgcagttaaaaaattttgcattataatttttttcacccaattagttatttctgtgctgagttaaatcttctgtactaaaatgttgatactcttgagaattttaatgtgaatcagtttagtctttttaagctgctatgacagatttgattatcatgatcttccagacttatttcttatggcacttaattgtggtaggcagactataaaataaaattttcttaaatggttacacagatttgttacattttaatatgctttgatactttcactattctcatattttgtatgtctcataaaatagtaagcatttcttacaaaactttaacatatgatgtgtgctcacttttaagtcttgtttatccataatttctattttcttcattttaataaggactttaatatttttctccaaaaaacatcttaagataattctattttattaaaagtctaataattttaagataaagcgccaaatttgtaaatttaaaaattattggaaataaaaatgatgtatgcatgtaagacatgattctggatgacagtttttctttctaggcttagctcagtcatgactaattaatatgcctctatgttactcttttttctttgttctcttaaaagggagaacgtggaagtccaggcccactaggtccscagggagaaaaaggtgttatggtaagagctcagtgatttgaaaaatatgtttccaaagaatgcaataaaagcaagtcgttccagagatggaattgcctgggctggaatttaactgagtaaaaaatgttaaatttcccatagaa

SEQ ID NO: 719699 - DNA, 2213 bp, Homo sapiens
  misc_feature 2201: n = A,T,C or G
tgcatttatctactttcgaggttgttgctgccagaagagtttactgcgaaatgtaaaagcattgccatccaataaaataactagatatacacttaaaccatataaaaaaggtcaactcactgtagcaagagcatccgaggtactctccattgctctgaggcaggcctatccaacttctgttttctgtacatatttcatgtgcactatgcttgtaattttccaatttcccactgacttgaccacacggctgcctggcagcattttgcacatcttgcagataggagcacaactggctgactttccaggtggttggccgaggcagctgcttccaatctttctccaccaccatctgagtcctgaaggagttttctgtctgcagcttctcttgtccaagcttaatttgttttatcagtgaatgtgagtgttctgcttcctgcccctgaaaggaaagttttagttacattgtgtctggaaaaggtcaggaaaggagagatgggtttattcctgattatcttctgatttagccacatattattctatcttttcactgcatggatgtctcacacactaacaggtgaaagtggagatacaacaaattcaccctggattgttttaatgcaactgttaataagcttaaatgtacagttggtacacagtttaataataggtaatacatgttaatgcaacttgttgattaaaatgaaagggaaattctagttagatgcttcatgtggacaggatacaggacaacgaacataaactgggactgtcctaaatctgggaaggtgacagatgtcacctaaagagaaattttacataaaaattgatattgtattccttttttgcttctcagctcctttttttttgccaaagtagaaatatttttttccatgaaaaataactataatatacctacttgcgctaacactactagattatgcctacatttaacttcactcaggttaagttgatagaagagaaatacggggagagcaaatgtgcactgcaaggcaagtgctcttaaataaagagctgcatattcttacatatacatgtacacacgtatagcacatacatactgtaatgtcaacagaatgaacttctgtatatgaaaaagtttgatctggacctggggcacgatgtgaataaaagcctgttcatctgagtgtggaagggtgaggtctgcattgccccatgcacattgctatgctcagggccttatgttaatagatggtaacgggtcagcacagcaaggctcatctatccctctgcctgttagtgtaaataaaattttattgaaacacagccaaacttattcatttatgcattgtctaggctgctttcacactgcagtgatagggctaaatagttgcagcagagatagtatgtcctgcaaagccaaaagtattttctacctggtgcttcacagaaaagatattatgtacccagggactataacttttgcagactgaccttgaacatgacctaatttaattgtcccttttcagttcccagagtactgccacgcgtaagacatttctgtccatggagctcccatactacaagattttcttcctttgaccctttttgaaacaccacccagacatggacaggagacaaccatctacttctttttaacccagttggggagtggagttaagaataataatggatggaaacagtggctggcacttactgattaccaacattgtaccatgcactgtacctcacagctaccctttgctacccttaggtggtaggttatacccactttatggttgaagaagctgaagctggagaggtgaagtgtttggctctgagtcataaagcagatgtggtggaggaagcatttaaatctacccaggtcattccacttatcctgtgctgtattcatttatgactgcagaagccccagttgttttgaggctgtgcctgcagtaaagcgtcagcatgatgcttcctgctgtttctatcytcctgcctccattggtgaactcccagtaactaaatatcagtgattgaaaataggaagcaatttgtaatctggattgttcctagacattgaatgggtctagttaactctctcatcttccagggaattgtccgttttaatatcttttggggaatgtataaaatagatacttacgttcagtattctttctcgagatgacaccaaccgcagaaagaatttttacctgccngtagaagtgtgt

SEQ ID NO: 719700 - DNA, 669 bp, Homo sapiens
ggagccagataatttctagagccaaccagcagcccccaaaaatgtgtaattatggccacaaacttatggccctttctcctttcagcttttggctttgtcactctgaaaaattatccactgggaataccaagctctgaatttgttttttaaaaacattatttattattttatttttttactttttgattttttgtagagatgggggtctcacaatgctgcccaggctgatctggaactcctggcctcaagtggtcctcctgcctcarcctcccaaagtgttgggattacccatgggagctgccatgcctggccttatttccttattttatgctgagaatatagccttgaaaagcttgcctctcatcagatctttggagagatcttttccagcaagttcaccttttcctcttgtcgtctgtcttacagaataatcatcccagcagactgcaaggatttttatgcccggagaagcactgtcttcaacaagggacatggaaaaatttcagtttatgtttgaagagaacatggattcatttgaagagggatgttggaggaggaggaggctgatgcggggaaacaccgcctctgtggtccgcgtttgagaggttacagggccatctgctcagcctccacccagtgccactgggttctcctggatgggggccttca

SEQ ID NO: 719701 - DNA, 609 bp, Homo sapiens
tgaatgtttaacaatcatctggtatgggttggcatcaatcagttccaaaataccactggttccaggtattaatgagtaactcataaaataagttttcaaataggatccaagctccttataaccactgagaaattatacaaattctatgggaaatacatctatgaattcatgatgaaacattaaagacattatacggtagaaatctacattgaaatcatgcttcattttcaaagctatagttttacatcttcactctgagatatgctaccaatagacatcgctgatgaygtattttctttatgaaactaaataaaagggtgttgtataatagctatcgtattattctcactcttgatctcctttctacaccatccaattttcctatattatctaccttagttgatggtgccactctcctgatccaagttggacaaaatggacccaaaatgtccatactcaagatgggcatttggaaggtcctatctaaccaactgtaggtttttccttcattttcatcttatcgcaccaccaccatctctcttgttagatatctcttgaatgcttcaggttttctggcctcaccccataccctgagcttttggaaagacc

SEQ ID NO: 719702 - DNA, 609 bp, Homo sapiens
tgaatgtttaacaatcatctggtatgggttggcatcaatcagttccaaaataccactggttccaggtattaatgagtaactcataaaataagttttcaaataggatccaagctccttataaccactgagaaattatacaaattctatgggaaatacatctatgaattcatgatgaaacattaaagacattatacggtagaaatctacattgaaatcatgcttcattttcaaagctatagttttacatcttcactctgagatatgctaccaatagacatcgctgatgacgtattttctttatgaaactaaataaaagggtgttgtataatagctatcgtattattctcactcttgatctcctttctacaccatccaaktttcctatattatctaccttagttgatggtgccactctcctgatccaagttggacaaaatggacccaaaatgtccatactcaagatgggcatttggaaggtcctatctaaccaactgtaggtttttccttcattttcatcttatcgcaccaccaccatctctcttgttagatatctcttgaatgcttcaggttttctggcctcaccccataccctgagcttttggaaagacc

SEQ ID NO: 719703 - DNA, 2030 bp, Homo sapiens
ctattatactatgtattatatactattatactatgtatatactattatactatgactatatagtatattattctcttatawgcatattccttaatttatgtactcagtccactgtaatgtgaatatttaggttgtttactcatttttgctcttataaaaatgttttaatgcatcttttttctttctttattgtgtgagtaaacctatatgatatagtcttagaagtagaaattcttggtgtgtgtgtgtgtatatatatatatatatttcttttttataattttgccgaatactggaaactatcttccacacaacttttgacatgttatacccatcagcactgcatgagagtggctgttgctgtacaatatcacctatggtatcttattaaaactttggatctttaccagtctagtaatgaataatagttatcttggtatccttgtctttgtattattatgagtgaacgtggacattgtttcattcatttaagagacatatttatttctctaatgtaaattaagtgcttatatatttttgtcaattgcataatgtgttattagacttttgaaactgatttgtagatactctttatgtttgaaatgggagataaactctttatgacatggttgtgtttttcttccagtttgtcatatattttgactttgcttggtgaattttgcccaggcagaaatgtttgatgtgtgtgctgttacatttatctattttttaattttatgacttctgagttttttaatcatagaaaggcctttctcttttgagattaggataaattttccaaagatgtcttctagtacttttataaaaatttcctccttttagaaacatgtgcaaaaacaaacccctaattatcctaaaggtggccaaggtaaaaatatcaaaaggatgaggcccatttggcttagaaacaattaaaaaccaacactcatgagtggctctaagaggtttctccttgattctgctttcagaggttatctgctgtgaactgggtcttgtctcacccctactttcctcatccactgctcttgaaatggaaggcatctgaagttgacaaagatgttatacaggataattgaggataatgtctccctcttgcccatgaatataactaaaatgagaacttaatattagtttgtgcagtgctgtagaaagcaattggaggcacatacactgtggaatagatctgatatcattaattttaaagttaaatgccttctcagtgagctacctgtgcaagtaaattaaatcaaacatttaatgttagctgtgcaggttacttcatttatgaaggttaaatagctgaatttcaatgtaattttttagccttgcaatggtggagatctggaaaacaatttctgatgtatggacccttctaaattgcttaaggaaattgtcaatgcatagtaattacttattttctcaccttttcaatgtcataataaaataactgcaggtggcaagtagcataaattaactgcttatttgattagttaaaaaacaaaaaataataatccttctttgtaactatgagaacaacatagctgataaaagaaattctaaatactggttgcctaaagaatataaaaagattatttttttccctaaaatataaagatttttcatagttaagaatatttttattttaatcagcatcaaacatttatattgtttaagattgtatagccattattaaatgtagaatacactgcaagactgtaggcttgctattttaattacagcagacttatacctttctaacactttcacactcaataaaatgtagagatccttttctggcaaagattttctggctcaatacgaaaaataaaatgtcattacagtctgccagagcagcccacctgtatggtctgtctcagtgaaatgccaatggattaataaggatgcttgtatagtaagggtaatttaggtgatacttacctgacaagggacctctctttaccataggacacttgttggactcttccagatggaaaggaacaaagatatgc

SEQ ID NO: 719704 - DNA, 627 bp, Homo sapiens
cattcattttcaaagctccattatgaattgtttcaatacatgaatgtatgaagatcttaattttatatatcttaccatgaccaaaatctcttctctgttaagattctcttcatgcttgttactactataaccgctcttagaactctctagtctctggatttctgccattttctcccatcatctaacctcctccaggcactttacctttcttattcagtctcactcaatggaaagacaagtgtatgatctttttcccactaagtagccttgatttccttgaacccctatctttccgctgtaccagtagcatctagtaatccaacccaaaatcagagacataatcctatttcttgagacctctaagtaggtggttgaaggctaacagctcaacccatacattcatgygatttcgtactgctcaattttatgaacttagcactgtgcatattttttccccatgactttggttagctttctttctctggcccttctatatttgtttatgatattttatatacatgtaatcatgcaatatgtgatcttttgtgagtggcttctttcatttaacatgatgttttcaaggttcatccttgttgtcgggtgtattggtaaatgatgcaattgctg

SEQ ID NO: 719705 - DNA, 590 bp, Homo sapiens
tctgacatgggatgatgcagcaactaaagcccttgccagatgcccgcactttgatattggaattctcagcctccggaaccatgaacaacacctttctctttattataaatttcccagtctctgatatcttcttacagtagcacaaaacaaaggcaccatgcttcatcattctactgagtaagcaaaattctggctagagttgttaaattcctaattcaataacaatctctctctctctcggtcttacacacacacacacacacamacacatacacatacacacacgcagacacacatgattttcttaacattcaagatctattcaactgttagaaaacactcttcaaacatttttctgttaaatataatttgtaactatacttggttgactgtatattggttttcaaaaatagtgtatggaataaacaaaaattaaacagttttctcctatactcattaaccctccaaacacttagagatggctactcttcctgtccccagaacagagcatgcaaccctttcaaatattaattatttgttgtgctgacccatttcaattaaactatatatatatatttaaaacaattata

SEQ ID NO: 719706 - DNA, 2535 bp, Homo sapiens
aaatgctgtttcttcagtcactgaaaatcatctccttaatcatgttgcttggggaaaaatacatttgcttttcccgtctaattttccaaatgacatgctgattttacatggctctgttgatgcataagtaattgataattcagaagaatgtataatacaatgttcttgaatatcttaacattttgtctcagttgggtaatcatctacttctttcttcttacaggtccctattataaattaaataaatgaatattttgaatgattctttaatcatatacatatagactattgatgagtaaaatatatattttgataaatcttccactctactatccaatataaaatttaaaaacaatgtcttctktaatataaaacactgtataatataaaaatattaatcaaacttagagtttaagaatgtggaatctccaagctaaacccctttctcagtttttggttaatcagggataaagtgaagattaatatgatgaagattgctgatatggaaagagtggaaaataattattcagactggattttttaaagaggcttcttgctttaataatagtgggagatgaagaggaatgatgtgatttttattttttcacctgctttttagtttttgtaagcagaggcatctttactaaaccatctggcttttataattactaatcagaggcaagatgctgtaagcttcttatcagtcagagttcatcattcctcactgattgctccaaatagccaggaaaatggagaatcacagttcatatacatgtagccaagaaaaacaaaaattaaactctgttctattctggagaacttgtcctgtgaaaacactacgtgcatcccctttggccaggaacaccacagtggttctgttcacacagctaatgggagctgctccagaatttctgtctcttccactcatgggaacctgaagtagttgaaggcaccatgcaagatgacaagaagtggctgcctcattgtatacattcaaattttggaggaagaacatatgatagaaaaagcttaggtcacatgatataggtgtgattgataaagcatcaaggaatgctgggaaagtgagatttggtttcttcaacatttgcaatggaagacaaggtccaccttacaaaaaggggaatttggaaaatgtaaattcagatgctcactagacaaaagaaatggcaagtatccactatggaacggtctaaaagaattaaaagcaccattgaccaaagctaatagttagttaatgataacagctacaaacttaaaggtaatttaaaaattccaattacacctaattttgtttttttaagcccattgaaatattttttaatgaaatactgttcagattttcaggaacttcttgaaaattgtaatgcatttggtatgcaagtggaaaaaaatctgtgatccaaagggaagtatctgtgaatttatagacaatagtccccctccaaatggtgattgtttttttcttcttgcaggcacatctgtgattttatgtttgtagtttgaagaattttgtttttagcttagcttgttttttttatctgttagttcttcaagacaatcgtaagtatacattgattgtaagactatatagtaggcttccctatgttgaactggttatatttaatcattccatttaatcaggacactatctgaaatctgaaatttcgactatgcttatgcagatttgtgtatataaattccgacttcccccagcactttggaaggccgaggcaggcggatcacgaggtaaagagattgagaccatcctggccaacaacccatctctactaaaaatacaacaattagctgggcatggtggcgcacacatgtagtcccagctactcaggaggctgaggcaggagaatcttttgaactcgggaggtggaagttgcagtgagccaagatcgcgccactgcactccagcctggcgacagagtgagactccgtctttaataaataaataaataaataaataaataaataaataaataaataaatataaattcctacttccttatatattgtaaaattatttctttttgcagatatctaagttagcctaatgtatttcacttagtctgttggataatggttatttttctttggttctttaatggcactgctaattatctaaaaaattaccagaaagtaacctaagaagatgcaagtctagcacctatcgtggaaagtcagtcaagtacaaaagagaaaattttatggttattttaaaatgagcagaatcaagcttctatggatttcttaagcacttcaatttcttttgcagtttctcatattgattttatgtgagtataattattctaaagtaacagcagatataccgctatttaaaacaatataaatattaaatactttatgcaagaaaatactcaagaattagtaaaaaggaggcaatattacccaatagagatgtagaagacataagctctaaaaattcacccactaatatattctaggaagatctatggctaattttccccaatgtataattacatt

SEQ ID NO: 719707 - DNA, 598 bp, Homo sapiens
tcaatctaactatgtttattcttctacatcttggctttcattcaaactgctatgcagctcaatgaagaagtgttaaagaaatatggaagaataattggacttgataggaaactactctgatgagacatcacaaatgtctaatttgcatttctattattttccaattgtttttatcagaaacatttgcaagaatataggaaaattggctcagaaaaatcatttgttcttgctgttgcttcactaagtgctttcatgcatcatgatatatttggtagcttgggggaggatttattgtgtcgccaatgggatattaccacttctgaagagttaaaagacaaaaagcagaaatgaatgcaaatgtctagcacacagttacatgcaagcacgtgcacactcacaacacacacacacacacacacacacagtaatctagaagagagagaaaaaagagtggaaattcaaatttttggtaaaattcttttttctcatttagcaaaatgtttgtttaaagccaytagtattagtacaatagcagcatagtttgataatgtattgtgttcttaagtacacgtgaagatatttaagtatttcctgattg

SEQ ID NO: 719708 - DNA, 598 bp, Homo sapiens
tcaatctaactatgtttattcttctacatcttggctttcattcaaactgctatgcagctcaatgaagaagtgttaaagaaatatggaagaataattggacttgataggaaactactctgatgagacatcacaaatgtctaatttgcatttctattattttccaattgtttttatcagaaacatttgcaagaatataggaaaattggctcagaaaaatcatttgttcttgctgttgcttcactaagtgctttcatgcatcatgatatatttggtagcttgggggaggatttattgtgtcgccaatgggatattaccacttctgaagagttaaaagacaaaaagcagaaatgaatgcaaatgtctagcacacagttacatgcaagcacgtgcacactcacaacacacacacacacacacacacacagtaatctagaagagagagaaaaaagagtggaaattcaaatttttggtaaaattcttttttctcatttagcaaaatgtttgtttaaagccattagtattagtacaatagcagcatagtttgataatgtattgtgttcttaagtacacrtgaagatatttaagtatttcctgattg

SEQ ID NO: 719709 - DNA, 2087 bp, Homo sapiens
tgttgaaagtggtgtttttctgtactattttcaatttttagctgattttactggttactcgatactacctggctaatataattacagatatgtatattttaatatgtagatmtaaacctatctatgtatctgtatatatgaatataaattctataaacatttaatgaacgattattatttagcatgtactccatttaaatgacaaaatgcaggaaactgaagatggagttttgtttatataaaacatttacatattgacatttgctaagatgagtgatatgtcctttgacagaattcattatctggtgaagcaacatcttccacactcagtctagttagttcaggctgctataacaaaaataccattgaatatgtagcttatcgacaatttctcacagttctggagggaagaagtccaacatcaaggcacctgcagattccatgtctgataagggcctgctacccatttatagatggtgccttctccccatcctcacatggtagaaggggcaatggaatgtctggggtccccgttatgagggcactaatctcattcatgagggatacaccctaatgacctaatcacttcccaaaggcatcaccttctaatatcatcaccttgggagttaggatttcaacatatgaatttgggggaggggatacaaacatgtaatctgtaataccagtttaatcccagcttccactattaaccatctatataaatttaggggactttgtaatctttgtgtttcagtttttcatctgaaatgtgagaacagcaaactggatgctggagtttttgatgggtttaaatatatgaaatacacacacacatttgcagtcgaccaacagatgcttatgtaaatgctccactcctcaaaacattttaacatgccatacaaatagtgaatgagatggtgggaggctgggagaggcaatttataatcgactcacaatctgttgaccagcacctttaaaattgacaacaaaaagaaataattatcagcaaatgcactgtttaattgtcaagaagaacactttatcagtcattgaaatgaagctaatggcacagtgggtaaaaagtaaaaacaaggctatctgaagacatgcccagagcagccacacagccatgcactatgagagaatagtctgagaggcttcttttcttccccaaataaagtcctcccagttgagctccatggaaatgcattctggagttgacggctgctcaatggtttcctgggccatacaaaaagccatgggacagcagcaaattctgacgagcaaggtgctctctgcagcccaggaacaggctgaagcaggctgccagctgagtcagtcagcccagggacagctccataaccagccctgcgatcaccctgtgccttgcacctaggggcctcctgccggctcttcatgacgctttagactgctttaaaatgtcttatcaccaaaacatttgaacaccttggaaaatactgtcctctatggaggagaaaaagagaactttgaaagaccagcccagaaggaaagtgaatgactatctgcctgccatgaaacattctggcttgaacttgccactctgaaataaagctccagctccagcacactctgttaatgaggacatgttagtatcaggcacataaacacagtcaggtgcatctccagagggggatctcagatacttactgctagttgctgattacagcaacatcagtttctgtgccacatccagagatttttctgcacactttttatcaaggcttcaaacatgatcccagttgtctgggaaatactatcagccacttaagtttccccttaatttaggaaaggaagatgtattttcaccataacagcaaaagcttataacacttgtcttttagaattaagagtcaacaacccagggggatccacagaccacccaagtggattgtgacgttgtcctggccttctcgtgggggtcaggccatctcatcaggcaaggacgacccaatgccttctcggtggaacagttttgattgaaaagatagttaaaaaaaaaaagtgatactgctgtaaaaagagacacaacatcacatccaaacaca

SEQ ID NO: 719710 - DNA, 657 bp, Homo sapiens
aaagccagtaaccttgagactcttccttgtgagtgaaaagcaagccacactcattggtcagttttctgttactcaaacctgaacagattcctaaataatacacaaacaaaagcactttatttatgcacatcagtgattcagtgataacagctacaacaattcatttcctgtgtataactatttcttagtccgttaaagacttccacaaaatgtatctaattagacccagtaacatcttgttaccaggtgagtgtgtcttccccacttcagagataagaaaacacacttggagaggtgaaggggtaagtgcaaggcactcacagccagatcttctccagggcttctatggaaccaccttcagcctgcaaggtggtgcagatggtgcagttcttcaggcagctggagaagggcagcttcgggaggccagaggggttcctccacacagcagcccagcacaytcatagttctacggagctgggtctacttacagagaaggtgcaggtgggacaacagggatgctaaggtgggcaagggcctacctgaagaaccagtggagcctcactgaaaatttcaccactgtcatgaacagaactgtgtccctgaaaattcctatgttgacgtcctagccaccaacatgactgcatttggagatagagc

SEQ ID NO: 719711 - DNA, 1624 bp, Homo sapiens
ctttgttagaaaatcaggccaggtatgacggctcatgcctgtaatcccagcactttgggaggctgagatgggtggatcacttgaggcgaggagtttgggaccagcctggccaacgtggtaaaatcctgtctctactaaaaatacaaaaattggctgggcatggtggggtaaatctataatcccagctactcaggagactgtggcaggagaattgcttgaacttggaggggcgggggttagaggttgcagtgagccgaggtcacaccactgcactccagcctgggtgacagaacaagattccatctcaaaaaaaaaaccacataaaatcaaattatggtgaggctttgttccttttgtgtggtcctatcctgtccatggtgtttgcattgtcaaggaggcttcctattttgtggcttcctggttaatctctgtgatggcatcattttggttttttcttttccactttccatcctgaattctgtcagcttgggccctactttcctccatctcactcgctcctctgagtcttcctcctatgcttaaattctgctttagagatcagcagtttctttttgagtatggaaatttatttttttgaactcttgagctggtcactgaatcattcaattcttcctcagacatttgcttatgtctttttttttacatttttgttagtattttcttttttaatttttaaaaacttttaatggacacataactgtgtttatttctggagtgcaatgtaatgtttcaatagatgtttacatcgtgtaatgtttaaactgggtaattagcatacgcatcaaacatttaccatttctttgtggtgggaacacacaagatcctctcttctcatagtatattgtacagtaggataactatagtcaatgacaagtaattatacaaactctttcttttttatgttcaggtttttctgcatgcttgttcttttgcaggccttagtcatctttgagatcagctactcatggaaggacagtatggagaaaacgggtgaartaaggtgagagagtgtatggttctgattcaaatttgcctggaatattttatcaccaatctgtacttttttctgtcctgggaacccatctccctgagcttttggccttcaagggtagcactggctaatacaaagcatttattgtccctgtcctctgggcagggatgtgtcacagctgcctcccgcatctccctctcccgctttaccccaggcaggtccctaagccaggggccagaagatgtacactatgactggaggagggcatggtcccttcttcattgctgtgcctctgagtgtccatgcattgaactggctctatccaagcagagaaaagtgctcatgctcatttccttttgcatttgatgcccctggtccattgtacatgctccataaacatctgttaaatgagtacatgatcatgtcaactaatgaagcagataaaaccaaagagaccaacagaaaggtgaacacaggcagcaggcaaagcaaactatggggcagtagcggaagcgcccacaggtcaagactagagacatgaagacaccctccctctccttggaggacaggggtggcactagacctgggacagggtctgcttaggcactgtat

SEQ ID NO: 719712 - DNA, 649 bp, Homo sapiens
atgcccaccagcctcagggtggccattccctcttggggacctccccctttcagttctgaagaaagatcctatctccaacacaacccagggagacagaaaacatccaaaatgattctggcacaggctgtgtggaatgggagctcagaatctaagcagactcacagagaaggaaaaggctgttccttacacctgagtcttttacctgagacccagacacacttaacctaagagttggaaacacttccaaacaagcctcaaagccactgctcagggctcaaagtgaacacgacaatctctgctgccgtggtagcctcttcttgcccttctcttygtctttctcatgcccacctgttccttgtctggggcattcacccttcctctgggttaagggactttggggcattccaaacatacctcaagaggcatgaggctggtggctgtacagtctcatcaccaccatctgctgcttgctcgagtccaagcatctgtgtcccacagttcctgtttcttgttcaaacttgcccaggtttatgccttaaatcaaaaccttcaagaaggcaacagctggctctttaagtctgtaaacactcttagtcaatgattttaaacgttctgttcatcaatgccaaatcaataccaaatcaatgaa

SEQ ID NO: 719713 - DNA, 649 bp, Homo sapiens
atgcccaccagcctcagggtggccattccctcttggggacctccccctttcagttctgaagaaagatcctatctccaacacaacccagggagacagaaaacatccaaaatgattctggcacaggctgtgtggaatgggagctcagaatctaagcagactcacagagaaggaaaaggctgttccttacacctgagtcttttacctgagacccagacacacttaacctaagagttggaaacacttccaaacaagcctcaaagccactgctcagggctcaaagtgaacacgacaatctctgctgccgtggtagcctcttcttgcccttctctttgtctttctcatgcccacctgttccttgtctggggcaytcacccttcctctgggttaagggactttggggcattccaaacatacctcaagaggcatgaggctggtggctgtacagtctcatcaccaccatctgctgcttgctcgagtccaagcatctgtgtcccacagttcctgtttcttgttcaaacttgcccaggtttatgccttaaatcaaaaccttcaagaaggcaacagctggctctttaagtctgtaaacactcttagtcaatgattttaaacgttctgttcatcaatgccaaatcaataccaaatcaatgaa

SEQ ID NO: 719714 - DNA, 2346 bp, Homo sapiens
gaccagccccggcaggaactctgcctgactcctcactccagcacccccttcttccaaggcaggggacacggtgggcgtggtacggcgggaggacgggactctccacttctttgtcaatgggatgactcagggccctgctgcctggaacgtgcccccgggcgtctatgctgtcgtcgatctctatggccaggcggcccaggccaccattgtggacgacgtgggtgagggccgggctgggctggggctgggggttagggtggccttgggaggtctgagagacacctagagacctgatgggtgatgtccacttttacagaggtggctccagttcctgaaccactccctgaggggaacaaccaggtgtctccaagctctccgtcctcaggggccgggggctctgacctgcgcttccatcagctgcacggcagtaacgcagtcatcactaacgggggccgcaccgccctccgccacaactgtcgcagcgagtttaatgacgccatcgtcatctccaaccggtcagtctctcaactttcatgtccccaccttcctcctgcccagcctcagccatgcaagtagagcctctctgatcgccagtctcctggcagggccctgcgggatggagagctgtttgaaattgtcattcagaagatggtggaccgctggtcaggctccattgaggctggtgagggccgtctgtgtgtgttgggggctgttggatgtctgtgccttggggatcggccttgacttacccctgcctcctcccaggagtgactgctattcggcctgaagacctggaattccccaacaccatgacagacattgactatgacacatggatgctgaggttgggcttcctgctttggggaccagcttggggctgagtggagctggctgggatcagggaagcaaggtttgggcctatggtggctgtgggtagtgacagacctaggggatctacctgtcccctccccttgaattctgggaagtcctgcccaggcccayaggggctcagtcctccttcatcttaggcagttcttgctttttcctaaggggatcccagggacagaggagataggattgggccttacacccagatcaagacaccagcccaagacattggagggttctgacagacagggagtgggcaggggccaatgtgaagttgaagttggcaggctgactcaccccttctgccatccccccagtggtacagccatcatgcaagacggtaacacgatgcgcaacaattatgggtgtgacctggatgcgctgggcacaggtgcacgcattggcatgatgcgaactgccaagggcgacctgcactacttcatcaacggccaggaccaaggcgctgcctgctcgggcctgcctccgggtaaaggtgactatgtggctttcagcctgccaccctcagcccagaccacctggctgtcaggcttctgaccttccctctcctccccagaggtgtatgcggtagtcgatctctatggccagtgtgtccaagtgtccatcaccaatgccaccggccccatggacaacagcctggcgaccagcaacactgccaccgagaagtccttcccactgcactccccaggtgcggcagcagggcgggggctggacgggctctgcttgcctgctgtgcacctgaggagtagggtttccaggttagagaggttctgcaaagacggttggctggggtagctgccggctccagggaagggacagcccacggtggcaagcagccagtgagggggaggttacacctggtacttagagcctggacacttccctgccaccaaggggccaggacaccataagctgagcatgccaggtttggaaatgggccttgctgtggtgaaaagaggtatcagggccgggcgcagtagctcacgcctgtaatcccagcactttgggagttcaaggcaggtggatctctcgagcacaagagtttgagaccagcctgggaaacatggcgaaaccccgtctgtaccaaaaatacaaaatgtaggcaggtgtggtggcatgcacctgtggtcccagctacttgagaggctgaggtgggaggatagctggatcccaggaagtcgaggctgcagtgagccacgactgtgcccctgcactccagcctgagtgacagagcgagactctgcctcaacaaaatacaataaagaggtgtcaggaggccctgaggtgtaatggcagatggcagatggggcgttggcatccccatttcgtttcatctgaaagctttgctctgtgttctgcctgaagctcgctgccccaatcctaccccttctactggtgccatctcttcacagtggctggcgtggctcaccgattccacag

SEQ ID NO: 719715 - DNA, 2346 bp, Homo sapiens
gaccagccccggcaggaactctgcctgactcctcactccagcacccccttcttccaaggcaggggacacggtgggcgtggtacggcgggaggacgggactctccacttctttgtcaatgggatgactcagggccctgctgcctggaacgtgcccccgggcgtctatgctgtcgtcgatctctatggccaggcggcccaggccaccattgtggacgacgtgggtgagggccgggctgggctggggctgggggttagggtggccttgggaggtctgagagacacctagagacctgatgggtgatgtccacttttacagaggtggctccagttcctgaaccactccctgaggggaacaaccaggtgtctccaagctctccgtcctcaggggccgggggctctgacctgcgcttccatcagctgcacggcagtaacgcagtcatcactaacgggggccgcaccgccctccgccacaactgtcgcagcgagtttaatgacgccatcgtcatctccaaccggtcagtctctcaactttcatgtccccaccttcctcctgcccagcctcagccatgcaagtagagcctctctgatcgccagtctcctggcagggccctgcgggatggagagctgtttgaaattgtcattcagaagatggtggaccgctggtcaggctccattgaggctggtgagggccgtctgtgtgtgttgggggctgttggatgtctgtgccttggggatcggccttgacttacccctgcctcctcccaggagtgactgctattcggcctgaagacctggaattccccaacaccatgacagacattgactatgacacatggatgctgaggttgggcttcctgctttggggaccagcttggggctgagtggagctggctgggatcagggaagcaaggtttgggcctatggtggctgtgggtagtgacagacctaggggatctacctgtcccctccccttgaattctgggaagtcctgcccaggcccacaggggctcagtcctccttcatcttaggcagttcttgctttttcctaaggggatcccagggacagaggagataggattgggccttacacccagatcaagacaccagcccaagacattggagggttctgacagacagggagtgggcaggggccaatgtgaagttgaagttggcaggctgactcaccccttctgccatccccccagtggtacagccatcatgcaagacggtaacacgatgcgcaacaattatgggtgtgacctggatgcgctgggcacaggtgcacgcattggcatgatgcgaactgccaagggcgacctgcactacttcatcaacggccaggaccaaggcgctgcctgctcgggcctgcctccgggtaaaggtgactatgtggctttcagcctgccaccctcagcccagaccacctggctgtcaggcttctgaccttccctctcctccccagaggtgtatgcggtagtcgatctctatggccagtgtgtccaagtgtccatcaccaatgccaccggccccatggacaacagcctggcgaccagcaacactgccaccgagaagtccttcccactgcactccccaggtgcggcagcagggcgggggctggacgggctctgcttgcctgctgtgcacctgaggagtagggtttccaggttagagaggttctgcaaagacggttggctggggtagctgccggctccagggaagggacagcccacggtggcaagcagccagtgagggggaggttacacctggtacttagagcctggacacttccctgccaccaaggggccaggacaccataagctgagcatgccaggtttggaaatgggccttgctgtggtgaaaagaggtatcagggccgggcgcagtagctcacgcctgtaatcccagcactttgggagttcaaggcaggtggatctctcgagcacaagagtttgagaccagcctgggaaacatggcgaaaccccgtctgtaccaaaaatacaaaatgtaggcaggtgtggtggcatgcacctgtggtcccagctacttgagaggctgaggtgggaggatagctggatcccaggaagtcgaggctgcagtgagccacgactgtgcccctgcactccagcctgagtgacagagcgagactctgcctcaacaaaatacaataaagaggtgtcaggaggccctgaggtgtaatggcagatggcagatggggcgttggcrtccccatttcgtttcatctgaaagctttgctctgtgttctgcctgaagctcgctgccccaatcctaccccttctactggtgccatctcttcacagtggctggcgtggctcaccgattccacag

SEQ ID NO: 719716 - DNA, 1017 bp, Homo sapiens
ggagccgagactgtgctacggtaatccagcctgggcaacacagtgagactgtctcaaaaaaataaagaagtaaaaaataaaatccatcctgtatcagtcaggaaagagctcattctagcaggatcaatgcagagaattcaccagaggaactagttccaaaggtatggcaagagctaaaccttccaagaggggcccatggggcaacccagagacagacaagagcaggaaactccaaacccttcggcgggcaggacagagggtgtgggtgagggttccagtgctgtgggctgggccagcctggtaggaatgagaatccatatgctgggagctggggccccagagaagcagctgctgcggaaaccccaggaggcagagtgagggagagacgctgacctccccttcttcccgccctgcactgtctcccatgggtcacacgtgkctgcagccagtcgcctggggaggcccctgccatgctggggtttgcaaagcaggcccagggcctgggaaggatgggggctctagcacgcaggtggctatgctgtctggctactgggcagacactgcccataactgacctttttgatgagttctgagagaaagcaccgggcatacttgactgacggcgggtgcgtcacacacacaggatgcttcacagtctacagcaaaggacagaacattggttgctcgagagcccgtcttaagtctcctatgagcttcaagccaacacaacagagggcaaactccaggctaccccatctctcagcaaagatgtatgtagatggacacagcattctggccccatgcatctgaagtttgtctgaagatataacccgtttcctaaaaatgcttccactgcagtggcacaggctgtggcagcatttctaatgcccattctgagcgggaacacagggcacgtgggcccaaaccacctccctcccaggggagccagtgtgaaccagggcttgcagtaaggacagtcgccaactgtctggctctatggaagaggcgggaaggccc

SEQ ID NO: 719717 - DNA, 1017 bp, Homo sapiens
ggagccgagactgtgctacggtaatccagcctgggcaacacagtgagactgtctcaaaaaaataaagaagtaaaaaataaaatccatcctgtatcagtcaggaaagagctcattctagcaggatcaatgcagagaattcaccagaggaactagttccaaaggtatggcaagagctaaaccttccaagaggggcccatggggcaacccagagacagacaagagcaggaaactccaaacccttcggcgggcaggacagagggtgtgggtgagggttccagtgctgtgggctgggccagcctggtaggaatgagaatccatatgctgggagctggggccccagagaagcagctgctgcggaaaccccaggaggcagagtgagggagagacgctgacctccccttcttcccgccctgcactgtctcccatgggtcacacgtggctgcagccagtcgcctggggaggcccctgccatgctggggtttgcaaagcaggcccagggcctgggaaggatgggggctctagcacgcaggtggctatgctgtctggctactgggcagacactgcccataactgacctttttgatgagttctgagagaaagcaccgggcatacttgactgacggcgggtgcgtcacacacacaggatgcttcacagtctacagcaaaggacagaacrttggttgctcgagagcccgtcttaagtctcctatgagcttcaagccaacacaacagagggcaaactccaggctaccccatctctcagcaaagatgtatgtagatggacacagcattctggccccatgcatctgaagtttgtctgaagatataacccgtttcctaaaaatgcttccactgcagtggcacaggctgtggcagcatttctaatgcccattctgagcgggaacacagggcacgtgggcccaaaccacctccctcccaggggagccagtgtgaaccagggcttgcagtaaggacagtcgccaactgtctggctctatggaagaggcgggaaggccc

SEQ ID NO: 719718 - DNA, 641 bp, Homo sapiens
tacatttgaatattaactataggatatttgaatattaacacagaggtatatttgaatattaactatattattctttctaaatctacccaatagtaaatgactatttacacatgactatattgttttaatgtgtggaagaaaggtctagaaaaaaatattaaattataaaattattttttgatgtcttcagttaaaaattatagatgaatatcccagctagyggataaggagcatagcctaagcttccagttcctgcaaaagtttaaatctctgatccttgtctgttgttatctaatatgttcatttcagaagcatctagtgcaatgaacagagtaaggaggtagaggccatgtattatattgaggctgagggaatgtgaaagtttcaaaactattgattgtggcattaaagaggttagtaaaataagtatgctaccactagtgaagaaacattattgaggttgtatagaattaagctttggctcaattatcctaaaaactgggctaaaatactattagattgtagcaccatttaatttagtgctgaccctcctttacagtagagcagatgaaactccatgagagtttacaatatttgaactgtatgcaagtaacccaagaagtaataaataattcaattaa

SEQ ID NO: 719719 - DNA, 553 bp, Homo sapiens
tgattttatttggtttactcagtcgagttgcaaacccaagtacgtatagaagctagacaagtagcataaatgagaggagcctgagcataacatagtagggagtgatggggactgtgatacactgaagtatattggtcccagctaaagggaacaaccyctactcagctcctaatcatgactgccatgcaggaatgcaggccagggttgccgggtcttatttttaagagaagctagataatacacagatgattacgtgaaccctttgtttttaatgttttcaatattggtaagtgatttagaaatgtgtaatatcttacctaaattcgtcagtccttgattacctgtgtgtcactggaagctccttgagatgagagtttgtcccttcatctttgctcctccatggcagcagttctgggattggcccactatcgactgagggatgcttgagctctctcatctactagaagataacggtctcatactgtcagatctgtcaagtagtgggtgttttaaggacggtgaccttgtggcaaatgtggcaacacagtttaga

SEQ ID NO: 719720 - DNA, 657 bp, Homo sapiens
agtagaagagatacttgcttttctaaggctccctgggtcctctcttgaccccttctaatgaacagaatgacattcacaatctgccagtttgctggaaatggctgtttataatgttggatccagcatcttggccaacggtctcccaatttcatccttgagttccttcaaaactcttgggtggctgccacctggtcttactgattaaactacatttattttgtcagtttggcttagatgagttggggttttgcctattattggattttatattttctgcctatttgtgcagaaccctgagggtgtagatatctctctaatgcccttcccaggtaaagaattcactcatcttggcagccagcctgtttcagtatggaacgccaacctttgcttctctgccagtcatcacagaggacttcagatttgctaaaaaataaccagaaagaaaaatatgaaattctgcctttgtgtccttttgtcatctttaatttgataaagaccagcagttgaaaaatatcccagagagaggattctatttacacactaaatgttttccatctcagcttgaaacaaaactgattagggtcccacaacacaaagattacataaattaaaatctaagaaaggaagagacataagattaarggaataaaacaagcc

SEQ ID NO: 719721 - DNA, 1452 bp, Homo sapiens
tggcagtcacatccccttttgatcatattttttccaaggttcttattcttccatttttatcatcagtaactagtgaagaaaaaaaggaaagcttaattggaatccaggagaagcctgcatgtttcttcagagcaagaatctagaatttcttttagaaagccaatgctcgtgtactcattgtcctcattcccatgacttccactgccaccactccagactttgacttgcgaatttaggaatctcttggtatctttgcttaattctttctgagctcaagtatttctttcaccagatagttttatgagttgataacatttgagttcaataggctttgaaaggccagagtgggaactcaatcgctacttgcaacaccactcctatggagaaatgtgttatgaatgcacagaaataaatgtgaagcaataggaatatgtctccctacctggtctccacagtcagtccctactctggaaggccctggacacccagcagcagtaagggggaacacagcagttcatttgctcactattccttcatacgccttccttgttagttcaattttcttttcctgaattatatccttcagtagttcctttagttaggttttttgatgctaagttcttttacttttattttgtctgaaaatgtgttttgtttttgcaagggaatttgttagtaaaagaatttagctggttatagaatttaagttaattttgttttctcttaacactttgatgatattattccactgtcttctagtacattaactttctttttagtcttatctaatatatttaatatattatctatattctttctgtctttgatgttctgtagtttcactaagctctctctatgtgtggatttatcttatttattctgccaggaacctggttgtgcttcttaaatattaggacttatgtttttgtttttgtttttttaatcaatgctgaaaaaattattagctgctctatctttgaatattacccctcctccattctctttattctttcttactaaaactcctagtagatatgttttattttcttataccttcaatgtcgcttgatgttttctattttacattttctttctttttttttttattatgctttaagttccagggtacatgtgcacaacgtgtaggtttgttacataggtawacatgtgccatgttggcttgctacacccatcatttacattaggtatttctcctaatgctatccctcccccctctccccaccccccaacctgccccagtgtgtgatgttccccaccatgtgtacatgtgttctcattgttcaattcccacctatgagtgagaacatgcagtttttggctttctgtccatgtgatagcttgctgagaatgacggtttccagcttcatccatgtccctgcaaaggacatgaattcatccttttttatggctgtatagtattccatggtgtat

SEQ ID NO: 719722 - DNA, 1521 bp, Homo sapiens
tgttttttttgttttgttttgttttgttttgagacagagtctcgctctgtcgcccaggctggagtgcagtcacgcactctccactcaatgaaacctccacctgctgagctcaggctatcctccttccacctcagcctcctgagtagctggggctaacagcatgtgccaccatacccagctaatttttgtgttttctgtagtgatggggtttcaccatgttgcccagggtggtactgacctggactcaagcaagcctccctccttggcctcccaaagtgctgggaatacagatgtgagccactgcacccggcctcctcaattcatttttaactaaacagttttgccaatgaaacctttttcatcagcattcttatttcacaccatattaagtagattttcaacaagataattctctcaactctttgaagcataattaagcagatatggacagaaatgcattaaagtgacaaatgtattcaacaaccatgatttaaataaataacctttaaaaaataaaagtacatagactattttaagatactgcatttttactaaagcttgaaatacaactaagtctaaaattcataaaattaacttttatttcccacatcttaaattactcaaaatagtatgtttcattatcattatctgtttgtcagtcacaactacatccacattttgctatgcccagaagcatcactactgacagagatgtgtaagtgacattacaggcaactcaggaaaatccagttactagcttcctttaagagtgggcccaataagtatggaatttttgctgcccaggattgagctgacaatttggaaaaatttgttatctaaattctcagactttaaaactaataacttagttttttaaaaaacatacaaaaggtatctgcagaaataaatcttctcttaggtttctggtttcatgacaatgcttacaagtgtaggacagacatcatatactactacataacatggctgcaaaaaagccacccattggccaagcgcagtggctcatgtctgtaatcccagcactttgggaagctgaggcaggcrgatcatttgagctcaggagtttgagactagcctagccaacctggcaaaaccctgtctctactaaaaatacaaaaattagctgggcttgttggtgcatgtctgtaatcccagctactccggaggctgagacactagaatcacttgaacctaggagtcagaggttgcagtgagccgagacagcgtcactgcactctagcttgggtgacaagagtgaggatctgtctcaaaaaaaaaaaaaaaaaaaaaaccctaagaaaataaaaaagtggatgtactaaacatatttgatacttaaaattttttctttaagaaaatgtgatgatagagtgattacttgaacattttcaatcatcagtatcttacggctactctaaatcaaatgagttcccactgcaagatacttacatcatggtaaaaaacaaattttgttcttcaatatgatctttggatttgtatgat

SEQ ID NO: 719723 - DNA, 1060 bp, Homo sapiens
gttcacgccattctcctgcctcagtctcccaagtagctgggactacaggcgcccgccaccatgcccggctaattttttgtatttttagtagagacggggattcaccgtgttagccaggatggtctcgatctcctgacctcgtgatctgcccgcctcggcctcccaaagtgctgggattacaggcgtgagccaccgcgcccagccgccagaagatatttttaacatgccaagaagacaaaggttaaatatccagaatatttcaaagatgtcctatacgcactacaaaacactgctgaagagagcttggtgcatttgaagaacaacaaagtgtttgttgtggttgtagcagagtggggtgtgtgtgtgtgtgtgtgtgtgtgtgtgtgtgtgtgtgtgtgtgttactcccgtctttacatgataaattcctttgacttagaatgccctttcaccattttgttcctggagttagaaactacctcatgaaaattagcatgaccttcctttatgcttctctggtttgtattatattctctattgacaaattttaaaatattataattcattgagagtaccattttgcctccccctactccctactccaaatatgagtttttcctgtttgattaaacagccattgagcatctgtcacagatccagctctgttctaggtactttagaataaagatgaatgcttggttgtttccaggctatgctgtaaattctaaggaagggggttaaggacaggattcttggaggcagtatgatgtgatcccagagacaggagataggaaaaagataagcacatgttctagrtgtgtttaaattctcatcaaataggaggcgacgccattctctgatgaggaaggagatatgaaatcagacacccaaagaggctttccagaggacatcctaacttttgatagatgtttccaccatctgggtggtgtcctcttctccatccctctgttttctcagaagcagctgctggggtcccagagggatgcacacagtggctataggtgctcacagatccacagtgaaacactcttatctaaccc

SEQ ID NO: 719724 - DNA, 1707 bp, Homo sapiens
aagggatcctttccttcagatccaattactggaagagtatagatatatcataacaagtctgttataaaatcaagaaaatagaaataactagaaacacttagatggaaacccagttttggattagctcaagggagctacattttaccaaagcagtttctgcttttaatctttgtagtggttgcaaaattcctactttcttctgctttgaccttcttgatgctaaactttccttttcggatacatgtagtagagagggaaattagggcagaaatgatcatcttgcataatgtcacaaaggaagagtatgaatagcaacaacgctcagtattataaaactgtcattggtcatttatttttataatcctaattaatttccatggggawttttttatgttatcaagaaagaaaagcaaaggttaaaccttgggaaagtatgctaataatttagctacaggaaagctgagaaggaagcacacctaagaccgtaaaactctaggctcaggatctactgattttaattttgtgataattcccgtaggatttgactgaattgtttttacatcaacaatttgcttaagcaaacccattcatggttgacaaaggttcagggttgtttactagcagggtcctttatatacataattgacaaacactaatcataaaggactatgtgtctgtttgttgtaggagattttctaaagatctttgccagcagacttttgctagttcagatccagttgctgtgtgtatttgagaatagcagctgcttttccttcaagatattttgtttatttattatttcatcaaataaacatttgactacttacaagtaaatttattaatttagagttttctaattagcaaaatattataaaatttaccgagtttaggcgaatgtaagtcactaggtaaattcgctgtagggtattaaaaataacgttacctgggtttttgtactgaatgcacaacttattagttgggtgacggtgggcaagtcacctaagtagcctcttccttagtttgcttagttgtaaaatgaggatgttatctacctgcttgccatcttaggattttggcaaggataaaaagaaataatttggccttgcatgatagctcatgcctataatcccagcacttttggagactgaggtgggaggactgcctgagcccaggagtttgaggccagcctgcacaacatagcaagatcccatctctacaaaaataaataaataaataaataaataaaaaattatccaggcatggtggcatgtgcctgtagtcacagttacttgggaggctgaggtgggaggattacttgagcccaggagtttgaggttgtggtgatccatgacggtcccactgcactccagcctgggggacagagcaaaaccctgtctcaaaaagaaataatttttgtaaaaattttttttctgaattgtaaaatgttacataattgtgaatacattggcattggcctttggcagctaaattggatgatataatggtgtatttctcatctaacttctactattttcagcttgtttgtaggacattagaaattgaaactgtcagcaaaattatccatttgcatttccaaaatagcacctggaaaaatctcttatgcccaggttgaccatagtgaggcactgaggctcctggaactgtcttgctggagacatcacagcttgtgggtggtcaagtgaaaca

SEQ ID NO: 719725 - DNA, 1707 bp, Homo sapiens
aagggatcctttccttcagatccaattactggaagagtatagatatatcataacaagtctgttataaaatcaagaaaatagaaataactagaaacacttagatggaaacccagttttggattagctcaagggagctacattttaccaaagcagtttctgcttttaatctttgtagtggttgcaaaattcctactttcttctgctttgaccttcttgatgctaaactttccttttcggatacatgtagtagagagggaaattagggcagaaatgatcatcttgcataatgtcacaaaggaagagtatgaatagcaacaacgctcagtattataaaactgtcattggtcatttatttttataatcctaattaatttccatggggatttttttatgttatcwagaaagaaaagcaaaggttaaaccttgggaaagtatgctaataatttagctacaggaaagctgagaaggaagcacacctaagaccgtaaaactctaggctcaggatctactgattttaattttgtgataattcccgtaggatttgactgaattgtttttacatcaacaatttgcttaagcaaacccattcatggttgacaaaggttcagggttgtttactagcagggtcctttatatacataattgacaaacactaatcataaaggactatgtgtctgtttgttgtaggagattttctaaagatctttgccagcagacttttgctagttcagatccagttgctgtgtgtatttgagaatagcagctgcttttccttcaagatattttgtttatttattatttcatcaaataaacatttgactacttacaagtaaatttattaatttagagttttctaattagcaaaatattataaaatttaccgagtttaggcgaatgtaagtcactaggtaaattcgctgtagggtattaaaaataacgttacctgggtttttgtactgaatgcacaacttattagttgggtgacggtgggcaagtcacctaagtagcctcttccttagtttgcttagttgtaaaatgaggatgttatctacctgcttgccatcttaggattttggcaaggataaaaagaaataatttggccttgcatgatagctcatgcctataatcccagcacttttggagactgaggtgggaggactgcctgagcccaggagtttgaggccagcctgcacaacatagcaagatcccatctctacaaaaataaataaataaataaataaataaaaaattatccaggcatggtggcatgtgcctgtagtcacagttacttgggaggctgaggtgggaggattacttgagcccaggagtttgaggttgtggtgatccatgacggtcccactgcactccagcctgggggacagagcaaaaccctgtctcaaaaagaaataatttttgtaaaaattttttttctgaattgtaaaatgttacataattgtgaatacattggcattggcctttggcagctaaattggatgatataatggtgtatttctcatctaacttctactattttcagcttgtttgtaggacattagaaattgaaactgtcagcaaaattatccatttgcatttccaaaatagcacctggaaaaatctcttatgcccaggttgaccatagtgaggcactgaggctcctggaactgtcttgctggagacatcacagcttgtgggtggtcaagtgaaaca

SEQ ID NO: 719726 - DNA, 389 bp, Homo sapiens
tctgccatcttgtcttacttctgtgagacatgatttatgttagtaagaccctatgaaatgtttctgtctgagaaactgaatgtaccaagttctttctttggcctataagtttccttggcctttgggagcaggtttgcatagacctgctcactgcagaacactcagcrttagggagtaggtcctggaggcccatggtttatttttagtgagaaccttgtgtcaacctttcatctggatgtcttccctctccacatggtccctcttgggtcttcaggagatggcatggggtatgggacaacagctttgtataataaaaacaaatattgcctggaaattccctctgctcctttccctcggggacctgtggtccaggctcctgagcttccagg

SEQ ID NO: 719727 - DNA, 389 bp, Homo sapiens
tctgccatcttgtcttacttctgtgagacatgatttatgttagtaagaccctatgaaatgtttctgtctgagaaactgaatgtaccaagttctttctttggcctataagtttccttggcctttgggagcaggtttgcatagacctgctcactgcagaacactcagcattagggagtaggtcctggaggcccatggtttatttttagtgagaaccttgtgtcaacctttcatctggatgtcttccctctccacatggtccctcttgggtcttcaggagatggcatggggtatgggacaacagctttgtataataaaaacaaatattgcctggaaattcyctctgctcctttccctcggggacctgtggtccaggctcctgagcttccagg

SEQ ID NO: 719728 - DNA, 909 bp, Homo sapiens
tggaaagcaggcagggtaggaattatcttaggccaggtaaggagcctgaattttcttttaaacaaaacagaaagttctgtgtggaagtgtgacatgacccaatttgttttatgcaaagatcacttctgctgttctgttgattgaaaaatgagcaaatgagaacactaagagtcaaattagccgaaaatgctaagactagggtgatagtgggataggactgatttgtgagaagttttgcaagcagagtcaacaggaccttttggttctgaaaaagagggcattcaaagatgactgcttgtttcctgtcttgatcacctgaaagatggctgagtcactcacttaagcaatactagggaaggaataggtyggggaaggaggagtgctagatgacaacttatgagtcatacatgtgaggcttgcaaggcccactaaaattttgggtagagattggacacagattccagagatgaggaagaggtcagcactggcaatacggacttcggacttcgtagttaatggcatagaaatcacctacgataatagaggaatacagagatcatttccaagccctgaagcatgtctgtaggttttcagatttacttactgaatatattcaatgaatgtcttcctgttgcctgaaactttattacaatattattttctgatttactatagcagggaaacttttccaattgccacacattcaccaacaccgtatcttcttagttttctaacctcaacacttggaagttgtttttatttaataacgtatggatgttcttttgacatgaagtcttttggttctttctttttactactggctcaacattttcactcattattcctatttctactttggttgggctcttacttttaagtctgtactacaatagtactacaaatagctac

SEQ ID NO: 719729 - DNA, 909 bp, Homo sapiens
tggaaagcaggcagggtaggaattatcttaggccaggtaaggagcctgaattttcttttaaacaaaacagaaagttctgtgtggaagtgtgacatgacccaatttgttttatgcaaagatcacttctgctgttctgttgattgaaaaatgagcaaatgagaacactaagagtcaaattagccgaaaatgctaagactagggtgatagtgggataggactgatttgtgagaagttttgcaagcagagtcaacaggaccttttggttctgaaaaagagggcattcaaagatgactgcttgtttcctgtcttgatcacctgaaagatggctgagtcactcacttaagcaatactagggaaggaataggtcggggaaggaggagtgctagatgacaacttatgagtcatacatgtgaggcttgcaaggcccactaaaattttgggtagagattggacacagattccagagatgaggaagaggtcagcactggcaatacggacttcggacttcgtagttaatggcatagaaatcacctacgataatagaggaatacagagatcatttccaagccctgaagcatgtctgtaggttttcagatttacttactgaatatattcaatgaatgtcttcctgttgcctgaaactttattacaatattattttctgatttactatagcagggaaacttttccaattgccacacattcaccaacaccgtatcttcttagttttctaacctcaacacttggaagttgtttttatttaataacgtatggatgttcttttgacatgaagtcttttggttctttcttyttactactggctcaacattttcactcattattcctatttctactttggttgggctcttacttttaagtctgtactacaatagtactacaaatagctac

SEQ ID NO: 719730 - DNA, 611 bp, Homo sapiens
gttagtttatttagaatactgatgttttatcctgtcaggcgtatcttttcaattatattaagactttgcaatgaggttaagaagtaatttttgaaaaatatttactctacttttgagtctttaattagtgacagtcaccaacaaatgttaagcaaattttggaaaaattaattgcacctatagaaactcttagcaaattacttcttccgtttattacatagtatatattaataaaacatctaaatatgtttaatatactagtaataagtacctgagacatagtaagatcttgatttttatgataataaactttaggaggtggaaggcagcatcttcaaagtatatgtctccagtacactcttgcagtgtgacatgtatggctccatttagttaggagttaactgagcagattatcacatgtgagctattgcaattatttacagttagtactrtacatttttactgctggcaagttagtagttttgtgttttccttttattttcatatcaaacagtccacacagttaatacatggtattatgcctattaccaactcaagttcatgaataatcatcaatatttgcctattttttcatattttatactgctgtt

SEQ ID NO: 719731 - DNA, 1013 bp, Homo sapiens
aggaggcccacctgcagaacagcccatcatgaccatgtcatcatggctggcctaaaggggtccaaggccaggcagaccttggcttaccccttcaaatgctgaattcctgagactttcccttaacttgggcaaagaaaagacacttcctgcatctgcatagattcctgggactagaggctaggaagtcaggactgccaggtacagttgtccaggttgygcacctgctgtaaacagcgcccctggagtagtgtgggtggggaaggtgctaagaccaaactaatcccgaggtggcctgacatcatggagagctcctgggctcccagctcagcacctcttagctgtgccaccccaatgctacttaaccttaacaagcttctgtccttcgcctgaaaaatgagcaccgaggcacctcccctgcacagccgctgaagaaagtagatccactaatatctgaaaagtgcctgggaccacgcctagcacagagcaggagcttagcaaacaacagatctcatcgctgtggtcccggaatctccaggcctcatttacacacagagctgcctcagcccctgccagagccctgcagcacgctgggcttctctgccagcctcaccctccactgctaagccccagagtctggtcgagccgctccacgcccagcgctgcccacagcacagccgccactgcctgcatcgccccctttcctcgtgacccagaatcagccttgtttaatccagaaaccatctctccaactctccgagaacccagactagggacagacatcaggacaaaggcgactctcgcctctcacccccgagctggtttgcggagaaagtccttgagaaacagtgctgggcaaggagcggagcttcggtgaaccgcagagctcctgatcagcaccatggagagcgtcgtcgcctgcaccccggcagcctcagcgcgcacaggagggtgggtgtttgtgtcgcctgatgctgcttcttgggggtcattgggaaatgaactccaaggcctct

SEQ ID NO: 719732 - DNA, 633 bp, Homo sapiens
tgcctgccctggaacaggcagaaagcatcccacgtgcaagaaaaagtaggccagctagacttaaaatcagaactaccgctcaycaaaagatagtgtaacatttggggtgctataattttaacatgtcccccaaaaggcatgtgttggaaatttaatccccaacaaaccagggctgggaggtggagcctcatgagaggtggtgaggccatgagggtggagtgaatggatgaatgccattgtctcgggaatgggcctcttctacaaggacgagttcagcccccctttctcttgctcaccctctctttgccctttcgctagggagtgacgtaacaagaaggccctcacaagatgctggcaccttgatcttggactccccatcctccagaaccatgcatgagccaataaattctattcactataaatgacccagtctgtggtattcagttacagcagcagaaaacagactcagacaggagcaaccagggaaaggggacacaaatctccccgctttactcttcataactgcaatatgaatctacaattacctcaaaatacaaagcttaattttaaagacagcatgcggtatataataagagctacataaaatgctagtaaaattgcttaaataataat

SEQ ID NO: 719733 - DNA, 2701 bp, Homo sapiens
aaccctacaaattaggttcagtggatactgctcgggtgatgggtgcaccgtaatctcacagatcaccactaaagagcttcctcatgtaaccaaataccacctgttccccaaaaacctatgaaaaaaaagaaagaaagaaattaaattaatttgcaagaaaaaaataarctcctcctgacttgattcatttgctcatgagagataaagagtgtgcatcccctaagtgctgctggagtatttagtcatgtgcttttccataagcagggacccagtgggcagtagtttttattcaagaaatgttggttaagggtcttctgtgtgccaggctgtgtttaggagctggaagtgcagagatggataagatgttgtattatcctttcagccaggattaaagtttacatttttactccaaatgagagtttctcaaccttggcactgctgacattgtgggctggataattcgtggggcagggggctgtccctgtccctgtcatgatgctttgctgtggaaatcgatgggctcccccgatccctgctgtctttgaggggtagtgtctgggaagccctccgaacccgcagtgtgagtctgagccagagggtaggaactgcatgaagtctctgcattgtttgcctggctgaagatatcctgttaaaggcttattaaaacagttctttggaagggactcattctgttcctgctcagctcctctctggccttgctgcccagcgttgtctgaggagcccatgtcatgcaggtgccaggtcatgtggccgtgccatggggggtgcccggctgcggcctcttcatccaggcacatcggcagaggcccaattccacttccatcactgcgggtgaaaaatggaaactgggccccgaggcaaaatggtgtccgtgtttttgaagatgaaggcattaagacaggagcatttaaatgatttattaatctgtttatgctgtcaaggaggaaacttgaccagtgcagataagtgagctgcgaggcaggggtgacagagagcccgtctccctctgtctccagtgaccttgccctgcaggcgatttgatgggcttgacttaaccttttaatagtgcagtttcagttgatgtagagaatgttcctttccaaatgtatggcagtggcgctcgttaagtttccctagactgaaggatgtgtgtacaggtattcctcagctgggtgctgcctggctgagtgaggcgggaattgggtggtcaggcaccggtgacctggtcgaatatgactttgctggggtgacccgaggggtgcagccatgtggctctgttgctcgcagttttgtgcctgcctcatctgtcgtttatgaagccttcgaggctcgagcttcttgaaagctgacttgtgttttccaggttcgttataaattctttagcttggggctgttcccacactggagggtcaataaatgatttttggaaaagaacatatgtccttatcaatcagtaattgtactggtacaaccatctgaacttttcaaacatgctgcacttggagcggctgactcttctgattaaagatggattctttagattctaaggttggatcagctgagacaagcagctctggggctctgttgctgttgttgttgtttttggcctcagagtgattatttttagtggtaaacagaagggagaggcatagccataaacttgtatttgggacatgcccgtagcggcaggttccacccggttcaggtagagtaatttcagggtgacctctaggctggcagattgttgttgctgggtatcagagttgaaaatgtttattgccaatagaaaaagtgagtagtgttcgtaagactgataagcacaggtataaatagaaaaggtgagttaatgaccaactcgactttgcagtggggctttttaaaagcggttctggagtcttggaaacaaacataattctctcttagtccaaccacctgtcagctgtaagtggtcattatttcatcatattgcaataaaagataatagaataacgatttatatctcatggctgatgttttaatgcatctctctgttatcctgggctgacagtctgtgattacagtaaacgttttctcggtgacaccatggtaatgactcgttaataggaggattattccaagtttaagtcatagagcggaagaccagcctcggctctccttacctctttgtgccttatgggggcggtctctgtgctcagctggtgacctgtgctttgccccccagctggggtgttggggtatgggctcatcaccactcctgatgcctggggatgcgcattccctgttgattagcaaactcagtcagtgtcttcatctctgtctactgtgctacggcattccttctttctttctttttattagacaaagttgcactctgctgcccaggctggagtgcggtggcgtgatctcggcttactgcaacctctgcttcccaggctcaagtgatcctcctgtctcagcctcctaagtagctgggaccacaggtgtgcaccaccatgcctggctaatttttgtatttttcatagggatggtgtttggctatgttgccaggtgatcttgaactcctgagctcaagtgatcctcctgccttgacctcccaaaagtgctgggattacaggtgcgagccaccaccccaggccccttaattattttaaataaaaacaactgcattgaatttaacgca

SEQ ID NO: 719734 - DNA, 1473 bp, Homo sapiens
ttgctaaaagaaactctgaaagaggtggggcaaggtggttcaggcctgtaatcccagcactttgggagacctggattgggctaatcacatgaggccagaagttcaagatgagcctggccaacatggcgaaaccccatctctactaaaagtacaaaaagtagccrggcatggtggctcgtgcaagtagtcccaactactcagatgctgaggcaggagaatcatttgaacctcggaggcagagggtgcagtgagctgagatcatgccactgcactccagcctggacaatagagcaagactctgtctcaaaaaaagaaactgaaaaaaatacaggaaactaaggaaaccaaaagagaaagggggaaagtagaaatggggaaaggaatgaaatgacacttttcacttgcgtatcttttcattttattttatttaaaactcaatgaagattacccttgcacaaaagtaaaataaaaatttaagtaatttttcaaagaaaatatgtctctaattaatggtgtaggataatctaaacacaaaaacaatggaataaatcattttaaaaactaattatcctggatcattttacattgtgtgcatgtgtcaaaatatcactctgtatcccataaatatgtacaattattaagtgtcaactaaaaataaaaggggaaaaataaaatataaaacttaaaactgatagattttactgtaaagaaatgtcagctttgaaacattgaaaactttgtaaataaggctcaaaaccaattaaacatgaaaacgttcacgcttgcaaaaaattaaaaatgcaaattaaacaatggtaagatgtctttctaatttacaaaactttatttttattgttatagatttgggggtacaaatgttgttttgttagatggatatattatatactggtgaagtctgcatttttagtgtagccatcacccaaatagtgtacacagtaaccattaaataatttctcatccctcacccctcccctattattaactttttgttataaaatgatttgacctacaaaaacttccaaaaaagaattcttgttttcccttaatccagatttcccaaatattggtattttgccacattttctttatccttcatgctctcaataaatagatatgtagacaaacagatgggtagaaattttctgatacaggggaagtgtggagaagtaggtcaaaggatgcaaacttgtagttacatagaataaacaagtctagagatctaacgtgcaacataaggactatagtaaataatatggtattgtatcctggaaatttgctgagagtagattttaggtactcttaccattaaaaaaaagcaaactctgcaaagtgataagtatgttaatttgcttgactaataatttctttgtgtatagtataggtatatcaaaacagtatgttgctcaccttaaagatatacaataaaaataataatttttctgaaatgtttga

SEQ ID NO: 719735 - DNA, 1473 bp, Homo sapiens
ttgctaaaagaaactctgaaagaggtggggcaaggtggttcaggcctgtaatcccagcactttgggagacctggattgggctaatcacatgaggccagaagttcaagatgagcctggccaacatggcgaaaccccatctctactaaaagtacaaaaagtagccgggcatggtggctcgtgcaagtagtcccaactactcagatgctgaggcaggagaatcatttgaacctcggaggcagagggtgcagtgagctgagatcatgccactgcactccagcctggacaatagagcaagactctgtctcaaaaaaagaaactgaaaaaaatacaggaaactaaggaaaccaaaagagaaagggggaaagtagaaatggggaaaggaatgaaatgacacttttcacttgcgtatcttttcattttattttatttaaaactcaatgaagattacccttgcacaaaagtaaaataaaaatttaagtaatttttcaaagaaaatatgtctctaattaatggtgtaggataatctaaacacaaaaacaatggaataaatcattttaaaaactaattatcctggatcattttacattgtgtgcatgtgtcaaaatatcactctgtatcccataaatatgtacaattattaagtgtcaactaaaaataaaaggggaaaaataaaatataaaacttaaaactgatagattttactgtaaagaaatgtcagctttgaaacattgaaaactttgtaaataaggctcaaaaccaattaaacatgaaaacgttcacgcttgcaaaaaattaaaaatgcaaattaaacaayggtaagatgtctttctaatttacaaaactttatttttattgttatagatttgggggtacaaatgttgttttgttagatggatatattatatactggtgaagtctgcatttttagtgtagccatcacccaaatagtgtacacagtaaccattaaataatttctcatccctcacccctcccctattattaactttttgttataaaatgatttgacctacaaaaacttccaaaaaagaattcttgttttcccttaatccagatttcccaaatattggtattttgccacattttctttatccttcatgctctcaataaatagatatgtagacaaacagatgggtagaaattttctgatacaggggaagtgtggagaagtaggtcaaaggatgcaaacttgtagttacatagaataaacaagtctagagatctaacgtgcaacataaggactatagtaaataatatggtattgtatcctggaaatttgctgagagtagattttaggtactcttaccattaaaaaaaagcaaactctgcaaagtgataagtatgttaatttgcttgactaataatttctttgtgtatagtataggtatatcaaaacagtatgttgctcaccttaaagatatacaataaaaataataatttttctgaaatgtttga

SEQ ID NO: 719736 - DNA, 1607 bp, Homo sapiens
acccgcctctgcctccgaaagtgctgggaatactggcatgagccaccactcctgggccacagtatttatatcagaaaaaagtcaaatactgtacatgagtttcaggagcaggagagaaataagggaaaagttgtataaagaagggcggtcaactgtcttgctggcgttcacattcccccatgtcttgagatcaggtgtggctgtgtgacttgctccggcaatgaaaggggagtagaggaggtgcgtgtgacccccaggcagatctaacagccaccatggaggcctccatgcttgttcccaagtctgctaaaagacggacaatgctactgatagcccaggttcctgagacaatattccagtagaatcacagccaatctgtgatacattgagtgagaaataaacctttgttgttagccctgagatatgggagtcgttcgctgctgaagcataactgagcccatctggactcccatcagagttttccaactcgaataaatgtccacaatgggccatgcagggttctaggtgggtaaccaaaatgtcatgtaagctgggcgcagtggctcacgcctgcaatcccaacactttgggaggctgaggcaggcagatgacttcaggtcaggagttcaagaccagcctggccaacatggtaaaaccctgtctctactaaaaatacaaaaatgagttgagtgtgctggtgggcgcctgtaatcccagctactcgggaggctgaggcaggtgaattgcttaagccagggaggtggaggctgcagtgagccaggatcacatcactgtattccagcctgggtgacagagccagactccatctcaraaaaataaaacaaaacaaaacaaaacaaaaaaatatcatgtaagatgtgtcattctgagcataacttttccttaccttcctatccaagcagatggcaggttctgggttcattgtctcaggacgagtgttaaaggaaggagaatacattgttgaataaggtttatccatattaagattatactatgtgtctttgaatcaaatccatctttgtgataaaacagagagcctctgaggaaaaccaaaatgttttccctagggttcagtcctggggcagcctaattggatttgggtgcaaaaaatgtaaaatgttctctaactttaaccctcatcagcctgactttgtacaacagttgctagggtctccctaggccggtgggtggctccaatacttaaaactgtaaaaacggagcttcggtgtattccattgtttcctcagtggtgagttctctgaatttgttttcttcctgcactgttgggtgatcctctttgcatggagaccccctggctggacggccagccatgactgcttgagggtctcactaaacggagaggcacagtgttttcccagcattacggatgaaaacgatgtgctgctgagcagagggcccggtggctgctcttccagacttggtattcttatcctcgctactgcaggaaacatgttctctccggcccataatggagggtgagatggagacctgtgtgtacgtggagatgcgtagtcatctgccggcttggctgctcccctgccacaccccaagtcctccctctgcaa

SEQ ID NO: 719737 - DNA, 1194 bp, Homo sapiens
catgcctgtagtcccagctaattgggaggctgacgtggaaggatcatgtgaacctgggaggtcaaagctgcagtgagccatgatagtgacactgcacttcatcctgagtgacacagtgagaccctttcttaaaaaaagaaaaaaaaaaaaagaatgccatctgggattcaatatggtcattcttttttttctgattacaaagtctactgaacataatggcgaaagttcacgggttacaacaaccaaaagtggaagtcttccctttcatgctaagcatttaagcaaaatatattacacatctacagcagtgccaggtagcccttaattaaaaaggaacatattttaggcacaggtgcaggataagctgacagacttgaaattgttctctgaacaaacaagtgtagatactgatatggtttggctgtgtctccacctaaatctcatcttgaattgcaactcccacaattcccacatgttgtgggagaaacctggtgggaggtgattgaatcatgggggtgactctttcctgttctgttcttgtgatagtgagttggtcttggtctcagtctcacaagatccgatggttttaaaaacgggagtttccctgcacaagccctcttttcttgtctgccaccatgtgagatatgcctttcaccttctgccatgattgtgaggccttccagccacgtggaactgtaagtccagtcaacctctttcttttgtaaattgcccattctccggtatgtcttcatcagcagtgtgaaaacggactaatacagatacattaatgatgattaagtcctaaaaatctattctactaaaatcaagcacagctagcctacagataagggatgccaaagtataatcttcataaaaagaggttattcatttgaaagtatacatgtgtcactgacactgaggatatgttgaggcccaggcaattcatttccttataccactgtttggcagctcctggaactatactgcagaaattctgattcttcttcttcttcttcttcttcttctttttttaataragatgaggtctggctggtctcaaactcctgggctgaagcaatccacccacctcagcctcccaaagcgctgggattacaggtgtgagctactgcacccggccatcctaactacgcagtcagaatctgtagttggttggttaaagaaaaaagtcagcta

SEQ ID NO: 719738 - DNA, 812 bp, Homo sapiens
agcacttactcattactgcaaggacagccccaagacattcatgagggatctgcccccatgatcccaacacctcccaccaggccccacctccaacactggggatcacatttcaacatgagatttgaaggggacagacatsaagctatatcactattaaatagggacaatgccttccacacaaagttattgtaacatttacattaattgctatatgtaagaagtgttttataaaccacaaagctctttacacacatgaattctggatactgaatatttgagtgtgttgaaatatagtagaaaaaaccacaaacaataggaggaagagaaaggaattattgtcagacaatggacttccaagtggagggccaaaaccccaatggaaaattcctttttttgccccaattaatctaaaataagagtaacagaaataacatagaaatgagctcttcaagtctacactaaggtagaacttctctaccaagaatgttttttaaacattttcttacatttctgtgggtacgtagtaggtgtatacatttatggggtacatgagatgttttgatacagcacacaatgtgaaataatcacatgagacagaatgaggtatccatcccctcaagcttttatcctttgtgttacaaacaatccaattgcactgttagttattttaaaatgtacaattaagttattactgactacagtcaccctgttgtgtctaccaagaatgttgttctgtataagaatgtggttctttccctcaagccaattgtgtgaacatgggcttgaacagaaactctaacagagactcaaaa

SEQ ID NO: 719739 - DNA, 645 bp, Homo sapiens
ccattaatccatagatcctgggtttatttactacagtattttttagcctgggatatcctgctaagggctttgtatagataaggaatcttccacctagtaaatattaccagtctgtttacctggagttccaattggcagggaaattagaccaaccttcaccctcagttgctgccctatacacacaccagtgaaaggagtgaatacatcctagaccagctgcttaacttttttctcttcaagtactaatcaatgaaatgtaactgagttgacatttgcaaaaatattttccaaagccatctaaatatttaagcgtataataatttttggcaaacccactgaattttaattaacaaaacaagattatgccaacgatttctaagagaactaaaaatccttcaaaaataaagaattaagtaacagtggaagtaatgatgataatagtawttaagctcttaccacatgtcaagaacttttcaatattctgtacatgtattataagaatcagaataatcttctggggtaggcactattattttcccatttaacagatctagtgtttgaggcataaatgaaatggcttagcctggtttacacatctagtagatcccgaagccattggtgaaacccaggaagtgtgacctatgt

SEQ ID NO: 719740 - DNA, 622 bp, Homo sapiens
aggtgtgtgccaccatgcctggctaattacatttttatttaattaatttatttatttattgtagagacaaggtcttgctttgttgcccaggctggtatcaagctcctaaccccaagcagtcctcctgcctcagcctctcaaagttctaggattacaggtgtgggccactgctcccgggcagaatatccttttaataaaaattatgttgttttttcatttaattaaaagagtactacatacttgtagtaaatatgaaacaaaacttccccttccggcatcctgtgtcccatttcccagagcctcctggcatggtttcttgtgtatacatgcataaacattttttcttttttctttatatattcatttttatktatatctatgtacaatatgtacatttaacgtttacacagtggggccctattgtacaaattgttctgtgattagtgtttgagtcacagtatttttgacatctttctatgtctgtgtatctagaaatattttgttttttattgtcagttgtactgtattccatgatataacaccattatttacctaacctatgataggcaatcaggttgtatcagtagtttgctatgtcaatatgttccagagaactttctca

SEQ ID NO: 719741 - DNA, 1598 bp, Homo sapiens
taaaagtcattaacatgttgtgtttaagactctgaagctagactacctgggtccaagagctggttcttcccatttactattcagattttctctgcctcagagtggggataatcacagtgcacccctcacagggtttcacatgacttagtgagttattatgtgcactggtgactcttatgatgtcctccatcttttggaggatattcagttaggaggatccaccaaagcaaataaaaggcatcttaatctcaataaattatgccctaaatattccaagtatggtcatggaccaacagtatcacctgagaacttgtgagaactgcaaacctaccgaatcagaaactctgagggcaggacttagcaatctatgttttaacaagccttctaggtaattctgttgcacactatagtttaagaattattgctctaaaatataaggattgacaggggaaagtagtttttaaacatattcagatcatggaacacctgaaaacaattcatgtcaccatgaattggtgacatagaattccatgcatttcactagtagaaaaatatccccatattatttgtatgctgttctctgcacctcaaaatatacatatggaattgttttcccttaaatcacatttctaaagttttcccttaacatttgtttgctatgagttcagtagcactgctaaattaaatatcagcagatctcaatattttatttaaaggtagaaaggagaaaaattcaaaacaaamtattctggtaaactcattctaaattacaaaatgggaatagaacaccatgatttagctttagccattttttcttttcttttcttttaaattgtattattttttgagacagcgtctcactctgtcacccaggctggagtacagtggtccaatatcggctcactgcaatctccacctcccattctcaaggaatcctctcacctcagcttcctgagtagctgggactacaggtgcatgtcaccacgcccaactaatttttttttttcgtgtgagaaatggggtttcaccatgttgcccaggctggtcttgaactcctaggctcaagtaatctgcccacctcagccttccaaagtgctggaactaaaggcgtgagctactaatcctggccattttttccattcatttattaattcagcacacatgtactaagtattgactacatgtcaaagacagcaaagcacttggaatgttggtgcaaacaagacaaacaggaggaagatattacctgtctatagatctatcctatgatccatccatagaaaataacagtccacttgtactatactcatgtttccatggtattaggcagaccttccagaaaaaaaaacaagccattactcttcctactcttcctgggtccagcaaaatggtttccccagtgaagaaatgctgctatcctatagcataaatcgaagatgtcaaatgggtctgaggttaatttcagccagttggtaaggcctccttggaacattactttgagaaggattatcagacgatatcctggctgggcaggaaagagtgctgtgatgaacagtcatacacaagaaagaaggtagtaccaagataaaggtctttca

SEQ ID NO: 719742 - DNA, 1598 bp, Homo sapiens
taaaagtcattaacatgttgtgtttaagactctgaagctagactacctgggtccaagagctggttcttcccatttactattcagattttctctgcctcagagtggggataatcacagtgcacccctcacagggtttcacatgacttagtgagttattatgtgcactggtgactcttatgatgtcctccatcttttggaggatattcagttaggaggatccaccaaagcaaataaaaggcatcttaatctcaataaattatgccctaaatattccaagtatggtcatggaccaacagtatcacctgagaacttgtgagaactgcaaacctaccgaatcagaaactctgagggcaggacttagcaatctatgttttaacaagccttctaggtaattctgttgcacactatagtttaagaattattgctctaaaatataaggattgacaggggaaagtagtttttaaacatattcagatcatggaacacctgaaaacaattcatgtcaccatgaattggtgacatagaattccatgcatttcactagtagaaaaatatccccatattatttgtatgctgttctctgcacctcaaaatatacatatggaattgttttcccttaaatcacatttctaaagttttcccttaacatttgtttgctatgagttcagtagcactgctaaattaaatatcagcagatctcaatattttatttaaaggtagaaaggagaaaaattcaaaacaaaatattctggtaaactcattctaaattacaaaatgggaatagaacaccatgatttagctttagccattttttcttttcttttcttttaaattgtattattttttgagacagcgtctcactctgtcacccaggctggagtacagtggtccaatatcggctcactgcaatctccacctcccattctcaaggaatcctctcacctcagcttcctgagtagctgggactacaggtgcatgtcaccacgcccaactaatttttttttttcgtgtgagaaatggggtttcaccatgttgcccaggctggtcttgaactcctaggctcaagtaatctgcccacctcagccttccaaagtgctggaactaaaggcgtgagctactaatcctggccattttttccattcatttattaattcagcacacatgtactaagtattgactacatgtcaaagacagcaaagcacttggaatgttggtgcaaacaagacaaacaggaggaagatattacctgtctatagatctatcmtatgatccatccatagaaaataacagtccacttgtactatactcatgtttccatggtattaggcagaccttccagaaaaaaaaacaagccattactcttcctactcttcctgggtccagcaaaatggtttccccagtgaagaaatgctgctatcctatagcataaatcgaagatgtcaaatgggtctgaggttaatttcagccagttggtaaggcctccttggaacattactttgagaaggattatcagacgatatcctggctgggcaggaaagagtgctgtgatgaacagtcatacacaagaaagaaggtagtaccaagataaaggtctttca

SEQ ID NO: 719743 - DNA, 891 bp, Homo sapiens
cccttccattgaggaaaatgtattcttaacttcacaatataattttaccctgctgatgtctgactaatcaggattgagatttgcagctttgtataggagaaagaggacatgcttgatcctttgcactcagtgactaagaaaatttccttccataaagtttccttccasaaagagtcagtctttaccaaccatgacattattatttttacgataaccctgatctatttaagagacaccaataattttaattcagatgcctggaattcaagaacagaagagtgtatccatcttggtgcaaaacaaagggatatgctaaatgtccacaaaggggaggtagaaattagggggatggtttcaatcaatcacctccggtttcagggtcattcaaatatttgatgaccttcatctcactgcataatgccaagaagacagggcagaaaggaagacattcaatatcatgtatgacaaaatccatcattattacagattattcagtgctcatttctgttttcgcagagaggaaaaaagaagcagaagtctttactgttgttattgttgtagtgttactgggtttgcgggtttggaagtgacagcatctgaacaagtctttagaaggcagtcctgcccagcattggggatgaccaccagcaaactagaggcagaatgacttgttggaggtgatgattctccctggccacacttggagtccacctccctattaataacaaacaatcttccaaaatcttgcgctatcttgaatttacattaggtatgctgcttatccaatgtcattggaacatacaattggaaataaccattaggcacacaaaatcggggtgtaaaaaacttttgagttcagcatctatccctatgatcagtaccactggaaca

SEQ ID NO: 719744 - DNA, 891 bp, Homo sapiens
cccttccattgaggaaaatgtattcttaacttcacaatataattttaccctgctgatgtctgactaatcaggattgagatttgcagctttgtataggagaaagaggacatgcttgatcctttgcactcagtgactaagaaaatttccttccataaagtttccttccacaaagagtcagtctttaccaaccatgacattattatttttacgataaccctgatctatttaagagacaccaataattttaattcagatgcctggaattcaagaacagaagagtgtatccatcttggtgcaaaacaaagggatatgctaaatgtccacaaaggggaggtagaaattagggggatggtttcaatcaatcacctccggtttcagggtcattcaaatatttgatgacctkcatctcactgcataatgccaagaagacagggcagaaaggaagacattcaatatcatgtatgacaaaatccatcattattacagattattcagtgctcatttctgttttcgcagagaggaaaaaagaagcagaagtctttactgttgttattgttgtagtgttactgggtttgcgggtttggaagtgacagcatctgaacaagtctttagaaggcagtcctgcccagcattggggatgaccaccagcaaactagaggcagaatgacttgttggaggtgatgattctccctggccacacttggagtccacctccctattaataacaaacaatcttccaaaatcttgcgctatcttgaatttacattaggtatgctgcttatccaatgtcattggaacatacaattggaaataaccattaggcacacaaaatcggggtgtaaaaaacttttgagttcagcatctatccctatgatcagtaccactggaaca

SEQ ID NO: 719745 - DNA, 1548 bp, Homo sapiens
tcacatattatatagtgaatagtctttaagaactcagaatactttaaattctcctatatcatacttaagattgatcatccattaattgtttattataacccctctactactaccgccaaaggtctatacacataccagaggaaaaagtggtgtctgctatgcatttatttatacctccccctcctctcaccaggctaataaagccagctgagctccagtgatttctgggagaatgcacccagaccttgatttctgaacattcccccttagctcaatccagattaaaaagtatgggcttaacttagtggccaaatcagtaaagctgtactgattcaactccagccaagtctgctctttctgggatatttattaggttaagtgaagttgtgacaaattcatagcgagcagtgagttaatcatgaattttagtttctggtgggaaaaaaaaagagtttgccaaatgtcagactacttcaaacttaatcatataaacaaggaatgagctgatatcaagagtggaaaaatactttgtgtgatagaacctttttcttctcacatagtctgcagacattacttcagaagtcctgagcaacgaacagcaggtattattagattgatttctagaaagaatctcagacatcaaggaataatgtgtcacaaaaagttatctgctaggctagaaatagaagtcagatttcctgaactttctttaagtcacagtgatatctactacaaaacttctttttatatctggatatttctaaaggaaaccaacagagctattccacttaaactcccttctcctgagaaaagtcagatttgctgaggaaaaactcaagtaaaatttatctactttttttttttttttgagatggagtcttgctttgtcaccaggctggagtgcagtggcacgatcttggctcactgcaacctctgcctcctggggtcaagcggttctcctgcctcagcctcttgagtagctgggattacaggcatgtgccaccacacccggctactttctttgtattttcagtaaagaygaggtttcatcatggtggccaggatggtcttgatctcttgacctcgtgatccgcccaccttggcctccctctacttctttaaacaatagaaagatgagtttccctcagaatacacagtttccttttgtgacattctctaagctgactttcacggctaccaaagaaaatcgtgttggtggcttagttcacactaagaaccccttgttaaacaatgctgagcagcatttgattgcccgaagccaaaaattagtgctgcctgtcatcagattgtgccaggccagaagtcttggcactatttctgccgtcaacttctccacgtggtgtagaagggctcaatgggatggtccgacacttgcttctcctgagtttgtgaattaaatcagcatttttaattacccaaatccactgccccaagggggctattaaaattcaaaagtacttcaagagaatttgatgaggaaaaaaaatcagacactttttaaaaaattggatttgttgtacttgaact

SEQ ID NO: 719746 - DNA, 544 bp, Homo sapiens
tgagtgtgagttataagagtacctttgtcaaaactggtcctttctcaaaactgatcaattgaatacacacgtcaaaatcaaacaggacactaagatgtctgcgtatcataatatgtaaaatactgtttagggaaaagaaaagaatgaagccatccaacacaagggcatgctttcctgatcactcttagccagtgtgatggttttccaggccaggtgattttgcataggtggatggagctgagttctgtggcagctgtattttggggataataagtagaacatcctctgcatttcactacagagatggacatcagtgctccaacagactgtcaacatttmacagagttctgcagggagaggctaatgggaacacatgggatgacacccctgctgtggctttaggagactgggcagaatgtgatcttatcatcagctgggaccactggcccagtgaaaaccaaatcaagcctcagacacacccggatgctacatatgaattatatgggactgcacggatgatacataagaattatatgggactgca

SEQ ID NO: 719747 - DNA, 1118 bp, Homo sapiens
tgaagccagctcagatcagggtcatgtacaaaaacctagcaagcatcccctgtattgcaataaaaatacaattttgattttatcacccacaccccttttgcaaattattcggtagggataaatttccccctgccctggatgaaattgctagcaagctcacaattactctgctcactttctcgtattaggtactctttaaattgtacatgcactcttaatttataatagcaatcaaaatgttcagtcccaaactctaatcttgatttagcttggtgccatctaccctattctcagcttgggctgactttaggatgggaaactgcaaagggaaatgggatggggtgtgcctggtgtccccatgtctgccccttgggctcctccattgtccaacctcctcaattgggaaaaggatggagttgggtggatgtaggaaaggcctcacctaaaatgtggggtctcatctggcatcagcatctctgggcctggcatatattggagctgactttttctcttctgggtgctctcttagattctctggggttttctacagggccccccttatgtgaatttctgttcacacagagacatgcattttttatgggtggtaaacccttgccctccagtcagatggtggaacccaagctgtctttcttgagttccataggaaagtgtgttccatgggaaaatacatatacttgcctggacaatctctaggcatgcaakaaatctaaaggcagcagcacctccatgactctgctgggaaagcgggtagtcagcctcttggtctttccgtcctctgattccccaggtgtgtcctcgtgtgtgcgtgcatgcatgcctacgttcatgtgtaggagaggcacgttaagttctctgggtagcccagggaagcccctgcttgccatgtgtatggtgagcagacagacacccaggcactcacctcctactacgggggcaggatggggacaaagagcactacccaaacttccctaaagagccctttctcaaaaattgctcctggaaaagagcaagtaagttctggagatagagaatggtggccaactatttctgctgaaaatgtgcctgtggtgatttagggtctcactttggaatttcac

SEQ ID NO: 719748 - DNA, 639 bp, Homo sapiens
ataacagaggttaaaagggtgctttctaaaagtttacctagatataactgaactttggggggtttaaagtagatcatacttatttcactcatttttaaaccctgaaaattctttctatgcgatattcttggggagaggttggtattgtgttttagtcagcattgggactattcgatatttgtttcatcatgttttaatttgtgaatttgataaaatggcatcttcaagttgatttcatttcrgatacaccatgggatttttcaagaaagtatttctagcttcaactatagtaacccctatttaaaattacatatatttgaatgtttagattcttgaaatattggccattatctttttaacagtaatttaatatttcaaactaatttgaaatattatcgatgacctgtggcatctttgaacttacactctaagagtgggatgattactcaaatgagttcccccatagtaatttacaaaggtacatgatttgtggagatacctaaatcacttttggcatggtgcttctaagtacgggggactttaatgctaggaagatcattcttgtgtctccaatatcagaaaatataccattttattgaggaagttgtctcaattcaagaaatagttgtagcatatggg

SEQ ID NO: 719749 - DNA, 1229 bp, Homo sapiens
tgagctgagattgcgccactgcacttcagcctgggtgacagagtgagactccgtctcaataaattaataaatcaracattcaaataattcaaaaattaaaaaaataaaagtttactgtgtacttttgtgacaactatatagcatttacattgtatttggtattataagtaatctagagatgatttaaagcagatggtagtgtgtgtgtaggttagatgcagatattatactattttatgtaagggacttcactatctgcagattttggtatccttgagggacactagaaccaatcccccatggatacctaaggataagtgtatccactcaatccttggaggtatcactagcagccaacagtttgcttgcatatatttctagagtttcttttctttacatatactacggcatttttttttttttgccaactgtaaataggatattataaatgcttatgtctttgttttcttcttagaacataaaactcagcctcattgagttgtgacttgaaagctctgcctcattgttctctccctccaggatcagtgaggaggaggacctgcacctggggacatcgttttctgcagaaaccaaccgaagggatgaggatgcagacatgtaagtgtcagtctgtttggctgtgagcagttggggctggactccagtcagagtccaagatatttagtcaacagatgacatttctagaattttctagaagatgtcaaagttggcccctctctttctacttcccagcttaagaactttgaaaacctcttaaaaggtcttttcaggccgggcacggtagctctcacctgtagtcccagcactttgggaggccgaggcaggtggatcatctgaggtggggagttcgagaccagactgaccaacatggagaaaccccgtccctactgaaaatacaaaattagctgggtgtggtagtgggcacctgtaatcccagctactcgggaggctgaggcaggagaattgcttgaacctgggaggcagagcttgcggcgagccaagatctcgccattgcactccagcctgggcaacaagagtgaaactccgtctccaaaatataaaaaataaaaacttgttttcaaaggtggtttcatgactagtaatatttccccaaaacattgcagggataaaacatgggcttgcccactttttattttgccaacaaagctattggcaaactatcatctttctgtcttcaaagaaccttg

SEQ ID NO: 719750 - DNA, 1229 bp, Homo sapiens
tgagctgagattgcgccactgcacttcagcctgggtgacagagtgagactccgtctcaataaattaataaatcaaacattcaaataattcaaaaattaaaaaaataaaagtttactgtgtacttttgtgacaactatatagcatttacattgtatttggtattataagtaatctagagatgatttaaagcagatggtagtgtgtgtgtaggttagatgcagatattatactattttatgtaagggacttcactatctgcagattttggtatccttgagggacactagaaccaatcccccatggatacctaaggataagtgtatccactcaatccttggaggtatcactagcagccaacagtttgcttgcatatatttctagagtttcttttctttacatatactacggcattttyttttttttgccaactgtaaataggatattataaatgcttatgtctttgttttcttcttagaacataaaactcagcctcattgagttgtgacttgaaagctctgcctcattgttctctccctccaggatcagtgaggaggaggacctgcacctggggacatcgttttctgcagaaaccaaccgaagggatgaggatgcagacatgtaagtgtcagtctgtttggctgtgagcagttggggctggactccagtcagagtccaagatatttagtcaacagatgacatttctagaattttctagaagatgtcaaagttggcccctctctttctacttcccagcttaagaactttgaaaacctcttaaaaggtcttttcaggccgggcacggtagctctcacctgtagtcccagcactttgggaggccgaggcaggtggatcatctgaggtggggagttcgagaccagactgaccaacatggagaaaccccgtccctactgaaaatacaaaattagctgggtgtggtagtgggcacctgtaatcccagctactcgggaggctgaggcaggagaattgcttgaacctgggaggcagagcttgcggcgagccaagatctcgccattgcactccagcctgggcaacaagagtgaaactccgtctccaaaatataaaaaataaaaacttgttttcaaaggtggtttcatgactagtaatatttccccaaaacattgcagggataaaacatgggcttgcccactttttattttgccaacaaagctattggcaaactatcatctttctgtcttcaaagaaccttg

SEQ ID NO: 719751 - DNA, 1229 bp, Homo sapiens
tgagctgagattgcgccactgcacttcagcctgggtgacagagtgagactccgtctcaataaattaataaatcaaacattcaaataattcaaaaattaaaaaaataaaagtttactgtgtacttttgtgacaactatatagcatttacattgtatttggtattataagtaatctagagatgatttaaagcagatggtagtgtgtgtgtaggttagatgcagatattatactattttatgtaagggacttcactatctgcagattttggtatccttgagggacactagaaccaatcccccatggatacctaaggataagtgtatccactcaatccttggaggtatcactagcagccaacagtttgcttgcatatatttctagagtttcttttctttacatatactacggcatttttttttttttgccaactrtaaataggatattataaatgcttatgtctttgttttcttcttagaacataaaactcagcctcattgagttgtgacttgaaagctctgcctcattgttctctccctccaggatcagtgaggaggaggacctgcacctggggacatcgttttctgcagaaaccaaccgaagggatgaggatgcagacatgtaagtgtcagtctgtttggctgtgagcagttggggctggactccagtcagagtccaagatatttagtcaacagatgacatttctagaattttctagaagatgtcaaagttggcccctctctttctacttcccagcttaagaactttgaaaacctcttaaaaggtcttttcaggccgggcacggtagctctcacctgtagtcccagcactttgggaggccgaggcaggtggatcatctgaggtggggagttcgagaccagactgaccaacatggagaaaccccgtccctactgaaaatacaaaattagctgggtgtggtagtgggcacctgtaatcccagctactcgggaggctgaggcaggagaattgcttgaacctgggaggcagagcttgcggcgagccaagatctcgccattgcactccagcctgggcaacaagagtgaaactccgtctccaaaatataaaaaataaaaacttgttttcaaaggtggtttcatgactagtaatatttccccaaaacattgcagggataaaacatgggcttgcccactttttattttgccaacaaagctattggcaaactatcatctttctgtcttcaaagaaccttg

SEQ ID NO: 719752 - DNA, 1229 bp, Homo sapiens
tgagctgagattgcgccactgcacttcagcctgggtgacagagtgagactccgtctcaataaattaataaatcaaacattcaaataattcaaaaattaaaaaaataaaagtttactgtgtacttttgtgacaactatatagcatttacattgtatttggtattataagtaatctagagatgatttaaagcagatggtagtgtgtgtgtaggttagatgcagatattatactattttatgtaagggacttcactatctgcagattttggtatccttgagggacactagaaccaatcccccatggatacctaaggataagtgtatccactcaatccttggaggtatcactagcagccaacagtttgcttgcatatatttctagagtttcttttctttacatatactacggcatttttttttttttgccaactgtaaataggatattataaatgcttatgtctttgttttcttcttagaacataaaactcagcctcattgagttgtgacttgaaagctctgcctcattgttctctccctccaggatcagtgaggaggaggacctgcacctggggacatcgttttctgcagaaaccaaccgaagggatgaggatgcagacatgtaagtgtcagtctgtttggctgtgagcagttggggctggactccagtcagagtccaagatatttagtcaacagatgacatttctagaattttctagaagatgtcaaagttggcccctctctttctacttcccagcttaagaactttgaaaacctcttaaaaggtcttttcaggccgggcacggtagctctcrcctgtagtcccagcactttgggaggccgaggcaggtggatcatctgaggtggggagttcgagaccagactgaccaacatggagaaaccccgtccctactgaaaatacaaaattagctgggtgtggtagtgggcacctgtaatcccagctactcgggaggctgaggcaggagaattgcttgaacctgggaggcagagcttgcggcgagccaagatctcgccattgcactccagcctgggcaacaagagtgaaactccgtctccaaaatataaaaaataaaaacttgttttcaaaggtggtttcatgactagtaatatttccccaaaacattgcagggataaaacatgggcttgcccactttttattttgccaacaaagctattggcaaactatcatctttctgtcttcaaagaaccttg

SEQ ID NO: 719753 - DNA, 636 bp, Homo sapiens
tgggcgcagtagcccacgcctgtaatcccagcactttggtaggccgaggcagatggatcacsaggtcaggagatagagaccattctggctaacatggtgaaaccctgtctctactaaaaatacaaaaaactagctggacgtggtggcacgcacctgtagtcccagctactggggaggctgaggcaggagaatcgcttgaacccgggaggcggaggttgcagtgagctgagatcatgccattgcattccagcctgggtgacagagcgagactccgtctcaaaaaaaaaaagaaaaattgaccgcacccaatccgttttaactttaataacctctttaaaggccctgtcttggctgggcaccgtggcttacgcctgtaatcccagcactttgggaggtcaaggcaagtggatcgcctgaggtcaggagttcaagaccagcctggccaactagtagagcctgtctctactaaaaatacaaaaaaattagccaggcattgtggcatgtgcctgtaatcccagctactcgggaggctaaggcaggagaagcacttgaacccgggaggcagaggttgcaatgaaccaagattgcaccactggactccagcctgggcaacagagggagactctgtttcaaaat

SEQ ID NO: 719754 - DNA, 636 bp, Homo sapiens
tgggcgcagtagcccacgcctgtaatcccagcactttggtaggccgaggcagatggatcaccaggtcaggagatagagaccattctggctaacatggtgaaaccctgtctctactaaaaatacaaaaaactagctggacgtggtggcacgcacctgtagtcccagctactggggaggctgaggcaggagaatcgcttgaacccgggaggcggaggttgcagtgagctgagatcatgccattgcattccagcctgggtgacagagcgagactccgtctcaaaaaaaaaaaraaaaattgaccgcacccaatccgttttaactttaataacctctttaaaggccctgtcttggctgggcaccgtggcttacgcctgtaatcccagcactttgggaggtcaaggcaagtggatcgcctgaggtcaggagttcaagaccagcctggccaactagtagagcctgtctctactaaaaatacaaaaaaattagccaggcattgtggcatgtgcctgtaatcccagctactcgggaggctaaggcaggagaagcacttgaacccgggaggcagaggttgcaatgaaccaagattgcaccactggactccagcctgggcaacagagggagactctgtttcaaaat

SEQ ID NO: 719755 - DNA, 636 bp, Homo sapiens
tgggcgcagtagcccacgcctgtaatcccagcactttggtaggccgaggcagatggatcaccaggtcaggagatagagaccattctggctaacatggtgaaaccctgtctctactaaaaatacaaaaaactagctggacgtggtggcacgcacctgtagtcccagctactggggaggctgaggcaggagaatcgcttgaacccgggaggcggaggttgcagtgagctgagatcatgccattgcattccagcctgggtgacagagcgagactccgtctcaaaaaaaaaaagaaaaattgaccgcacccaatccgttttaactttaataacctctttaaaggccctgtcttggctgggcaccgtggcttacgcctgtaatcccagcactttgggaggtcaaggcaagtggatcgcctgaggtcaggagttcaagaccagcctggccaactagtagagcctgtctctactaaaaatacaaaaaamttagccaggcattgtggcatgtgcctgtaatcccagctactcgggaggctaaggcaggagaagcacttgaacccgggaggcagaggttgcaatgaaccaagattgcaccactggactccagcctgggcaacagagggagactctgtttcaaaat

SEQ ID NO: 719756 - DNA, 636 bp, Homo sapiens
tgggcgcagtagcccacgcctgtaatcccagcactttggtaggccgaggcagatggatcaccaggtcaggagatagagaccattctggctaacatggtgaaaccctgtctctactaaaaatacaaaaaactagctggacgtggtggcacgcacctgtagtcccagctactggggaggctgaggcaggagaatcgcttgaacccgggaggcggaggttgcagtgagctgagatcatgccattgcattccagcctgggtgacagagcgagactccgtctcaaaaaaaaaaagaaaaattgaccgcacccaatccgttttaactttaataacctctttaaaggccctgtcttggctgggcaccgtggcttacgcctgtaatcccagcactttgggaggtcaaggcaagtggatcgcctgaggtcaggagttcaagaccagcctggccaactagtagagcctgtctctactaaaaatacaaaaaaattagccaggcattgtggcrtgtgcctgtaatcccagctactcgggaggctaaggcaggagaagcacttgaacccgggaggcagaggttgcaatgaaccaagattgcaccactggactccagcctgggcaacagagggagactctgtttcaaaat

SEQ ID NO: 719757 - DNA, 1393 bp, Homo sapiens
gaaagaaaggaactaacttctttctggstcgaagacatctggaaaacataggatctccttcagtgtctttagcaccagatcctgtgattcaaactacacacaaccaataagaaaaagaattcaacatgcgtgctaccggttcacctcctttcttgtgtttattacacatcaataaatcaagtgtttactgagatcctactctcaagttcctagtcagaaaaggaatcacctgccgtaggtaacagcctgtgttctttcctacagcattgaaaagagcctcagactaaaaaatgaaaggaaattgtgtatttctttattgtaaagggcagaaacgtgcaattacagattgtgaaactgctgcttagaattccaggctcattgtaaggaagtgccttgtcgtcagcaagttggcatccaagtactggaacttagtttcttcctgtgggaggaaaaaaaaaaaaagaaaaagacaaaacattgtcctgtgggttgacacctcagcctgtttcttttccttgtttcctgtggcccctctacttcttctatccatctgtctcttctcttcctgatctctcagtttttctttctctgatcacaaagaaccacaatgactgaaggagtttaatctcacaagtcttctttcatttcctcataagaattaaccaaatagttcatatttcctgcttaaactgtcttaatgtatcatcacgatgttttcccctctctatctcccttttattggagatagtgctgcaagaaccctgcggtctaatccctggcatgctttccttttactacctaagatggccataacatttcatttttactgagggtgaaatttcacctttgctttttaatatcccctgaatgaaagctgattgtagaaggagtctcaggctgtagtagaattaatgtgtgattatacaaaagaaatatgcacagaagaacagtaagtaaaaggagaaagaaaaagccatgatggctgagtagaaacagctccagtctgcagctcccacagagaaaaacacacagggcgagtgatgtttgcatttcaaactgagggacccaaatcctatcactgggactatctaggcagttggtgcaacacacagaaagcaaggaaaagcagggtgggacggcagttcacccaggagctacacgggacaaagggacctccttccctcaggcaagggaggcagtgagggactgtgctacccacccggggtactattttttccaggatttttgcagtccagggctcaggagatcccctcgtgagcatataccatcagggccttgggtctcaagcacaaaactgggcagacccacggctgcttttctggtcggaggctgtttgggcaggcactgagctgcaggagtttttacatagtcc

SEQ ID NO: 719758 - DNA, 1393 bp, Homo sapiens
gaaagaaaggaactaacttctttctgggtcgaagacatctggaaaacataggatctccttcagtgtctttagcaccagatcctgtgattcaaactacacacaaccaataagaaaaagaattcaacatgcgtgctaccggttcacctcctttcttgtgtttattacacatcaataaatcaagtgtttactgagatcctactctcaagttcctagtcagaaaaggaatcacctgccgtaggtaacagcctgtgttctttcctacagcattgaaaagagcctcagactaaaaaatgaaaggaaattgtgtatttctttattgtaaagggcagaaacgtgcaattacagattgtgaaactgctgcttagaattccaggctcattgtaaggaagtgccttgtcgtcagcaagttggcatccaagtactggaacttagtttcttcctgtgggaggaaaaaaaaaaaaagaaaaagacaaaacattgtcctgtgggttgacacctcagcctgtttcttttccttgtttcctgtggcccctctacttcttctatccatctgtctcttctcttcctgatctctcagtttttctttctctgatcacaaagaaccacaatgactgaaggagtttaatctcacaagtcttctttcatttcctcataagaattaaccaaatagttcatatttcctgcttaaactgtcttaatgtatcatcacgatgttttcccctctctatctyccttttattggagatagtgctgcaagaaccctgcggtctaatccctggcatgctttccttttactacctaagatggccataacatttcatttttactgagggtgaaatttcacctttgctttttaatatcccctgaatgaaagctgattgtagaaggagtctcaggctgtagtagaattaatgtgtgattatacaaaagaaatatgcacagaagaacagtaagtaaaaggagaaagaaaaagccatgatggctgagtagaaacagctccagtctgcagctcccacagagaaaaacacacagggcgagtgatgtttgcatttcaaactgagggacccaaatcctatcactgggactatctaggcagttggtgcaacacacagaaagcaaggaaaagcagggtgggacggcagttcacccaggagctacacgggacaaagggacctccttccctcaggcaagggaggcagtgagggactgtgctacccacccggggtactattttttccaggatttttgcagtccagggctcaggagatcccctcgtgagcatataccatcagggccttgggtctcaagcacaaaactgggcagacccacggctgcttttctggtcggaggctgtttgggcaggcactgagctgcaggagtttttacatagtcc

SEQ ID NO: 719759 - DNA, 1393 bp, Homo sapiens
gaaagaaaggaactaacttctttctgggtcgaagacatctggaaaacataggatctccttcagtgtctttagcaccagatcctgtgattcaaactacacacaaccaataagaaaaagaattcaacatgcgtgctaccggttcacctcctttcttgtgtttattacacatcaataaatcaagtgtttactgagatcctactctcaagttcctagtcagaaaaggaatcacctgccgtaggtaacagcctgtgttctttcctacagcattgaaaagagcctcagactaaaaaatgaaaggaaattgtgtatttctttattgtaaagggcagaaacgtgcaattacagattgtgaaactgctgcttagaattccaggctcattgtaaggaagtgccttgtcgtcagcaagttggcatccaagtactggaacttagtttcttcctgtgggaggaaaaaaaaaaaaagaaaaagacaaaacattgtcctgtgggttgacacctcagcctgtttcttttccttgtttcctgtggcccctctacttcttctatccatctgtctcttctcttcctgatctctcagtttttctttctctgatcacaaagaaccacaatgactgaaggagtttaatctcacaagtcttctttcatttcctcataagaattaaccaaatagttcatatttcctgcttaaactgtcttaatgtatcatcacgatgttttcccctctctatctcccttttattggagatagtgctgcaagaaccctgcggtctaatccctggcatgctttccttttactacctaagatggccataacatttcatttttactgagggtgaaatttcacctttgctttttaatatcccctgaatgaaagctgattgtagaaggagtctcaggctgtagtagaattaatgtgtgattatacaaaagaaatatgcacagaagaacagtaagtaaaaggagaaagaaaaagccatgatggctgagtagaaacagctccagtctgcagctcccacagagaaaaacacacagggcgagtgatgtttgcatttcaaactgagggacscaaatcctatcactgggactatctaggcagttggtgcaacacacagaaagcaaggaaaagcagggtgggacggcagttcacccaggagctacacgggacaaagggacctccttccctcaggcaagggaggcagtgagggactgtgctacccacccggggtactattttttccaggatttttgcagtccagggctcaggagatcccctcgtgagcatataccatcagggccttgggtctcaagcacaaaactgggcagacccacggctgcttttctggtcggaggctgtttgggcaggcactgagctgcaggagtttttacatagtcc

SEQ ID NO: 719760 - DNA, 575 bp, Homo sapiens
gcgctctcacctctgaaagccacctttagtgtgaccagtgcatgagctgagatgaggtgcaggaagcctcctccaacttcatgcacaattggagaccctaaatcaagtcaggcttcagtgttctgtgcaattgccctactctggagagatagttgggggtgatgaggcggtcatgtgctgccaggtatataaatggaaagaaagggttctttaygagtagactcaacttccaggtaaaagagagctccggggataggtcagggcttctcatcactgtccctgcctcagcgtcaggtgctgggacacacaaaagagcagaggctgttaaattagccagacctgagctgaaactcagtctactgcttgtgagagctttaactctggcaagttacttcgcctcactgagccttagtttccttgctggcaaaatgggaatatttacccacagaaccaatgaaaggaataagggggaacaggggtttatcggattttatattgttcctggcacttactggctgctcagtaaatcttacttcttccttcttcttcactgattttacagacagctacttgca

SEQ ID NO: 719761 - DNA, 575 bp, Homo sapiens
gcgctctcacctctgaaagccacctttagtgtgaccagtgcatgagctgagatgaggtgcaggaagcctcctccaacttcatgcacaattggagaccctaaatcaagtcaggcttcagtgttctgtgcaattgccctactctggagagatagttgggggtgatgaggcggtcatgtgctgccaggtatataaatggaaagaaagggttctttatgagtagactcaacttccaggtaaaagagagctccggggataggtcagggcttctcatcactgtccctgcctcagcgtcaggtgctgggacacacaaaagagcagaggctgttaaattagccagacctgagctgaaactcagtctactgcttgtgagagctttaactctggcaagttacttcgcctcactgagccttagtttccttgctggcaaaatgggaatatttacccacagaaccaatgaaaggaataagggggaacakgggtttatcggattttatattgttcctggcacttactggctgctcagtaaatcttacttcttccttcttcttcactgattttacagacagctacttgca

SEQ ID NO: 719762 - DNA, 1443 bp, Homo sapiens
tgccatcagaatctggaaacggtctctgttctctctctctctctctgttttttagaaatggagactcactatgttgcctaggcaggtatcaaactcctgggctcaagcagtgctcccatcttagcctcccaatgtgctgggattataggcatgagccactgcgcccaccctcacagaaagaataggtgatgcaagcaagtaaacaggtaattacaatgatggaagatgtatgctgtggaacaggagtacattaagaactcaacccaggctttggaggtccagaaaggggttcggaaatactttacgtgtgtgagacttgggctaagcttgggttggttgcaggaaagagaaaatggaagagatggtgttctaaaaatggaaacaatatgctggatagcccagcagaaagaaagagtatttgcatctcaaaaactgaaataatttcgttatctcaatagtggagtaaaaaggtgtggacgttgaaagatgaagtaaagggaaaagaagggaccagagcataaatcaccgttctttcacatgtgaaggtagacatgcattaaaagatgcttttttacaaaaatgggtccgtgccattcataaggttttgtgatctacatgttatcacttaatgttaacgtctttttctttcaatgaatacacttctaaaatagcacttttaaaaataaacagtatttattggttccatgttactttatttattgaatctgtgaaatatttagagtgtttctcatttctttttacatttatctttatagctaagtcttaacagttttcagtgataacttcctaggtacagtttttggttcaacatgtataaataggtttcttttgttgctgttttttgttttttgtttgtttggttggttggttggttggttggttggttttgagatggagtctcactctgtcgccaggcttcagtgcagcggcttgatctcagcttactgcaacctctgcctcctgggttcaagtgattctcctgcctcagcccccagactagctgggattacaggtgtgtgccaccatgcctggctaagttttgtattttcagtagagacggggttttaccatgctgcccaggctggtctcgaactcctgacctcaggcgatccgcccacctasgtctcccaaagtgctgggattacaggcgtgagccaccacacccggccataaatagttttttaaggtttttggtacatagcatcaactcattctccagaaattgttatgaatatgtagtcccaccagaaattcaggagcatagatgcttcctacatactttccaccaggaagaaaaaccatttggtttctatgtttgccaatttgataagtttccatttacatttctgccattaccttggaaacttaacttttgtattctggtagttctttttttatgtaagcttcttaagataataaata

SEQ ID NO: 719763 - DNA, 650 bp, Homo sapiens
ttttttcagccaggcatggtggctcacgcctggaatcccagcactttaggaggctgaggcgggtggatcacctgagatcaggagttcaagaccagccttgtcaacacggtgaaaccccgtctctactaaaaatacaaaaattagctatgcgcagtggcgggcacctgtaatcccagctactcgggaggctgaggcaggagaactccttgaacccaggaggcagaggttgcagttagccgagatcgcaccactgcattccagcctggataacagagcgaggctccatctcaaaaaaaaaaaaagaataaagtatttttctcaagcaggctagataagggggctgtgcatgggaaagaaagggtcttggtattggatgcccacagggcaagaggctttaaatctaaagagaatctatcatgtcccctccacccaagaaaagttacygagaatcaagacttgtaggaagaggattttattagagctaatcgagcttgtccttcccagcctcagcccggcggggaagcaaagctaaaacattttagatgtggaaggcaatgcttgttatttttctcactttccctacctgccctccctctctttcatgagccctctctgagctgataactggaaaaatgtaagagtggtaactg

SEQ ID NO: 719764 - DNA, 650 bp, Homo sapiens
ttttttcagccaggcatggtggctcacgcctggaatcccagcactttaggaggctgaggcgggtggatcacctgagatcaggagttcaagaccagccttgtcaacacggtgaaaccccgtctctactaaaaatacaaaaattagctatgcgcagtggcgggcacctgtaatcccagctactcgggaggctgaggcaggagaactccttgaacccaggaggcagaggttgcagttagccgagatcgcaccactgcattccagcctggataacagagcgaggctccatctcaaaaaaaaaaaaagaataaagtatttttctcaagcaggctagataagggggctgtgcatgggaaagaaagggtcttggtattggatgcccacagggcaagaggctttaaatctaaagagaatctatcatgtcccctccacccaagaaaagttactgagaatcaagacttgtaggaagaggattttattagagctaatcgagcttgtccttcccagcctcagcccggcrgggaagcaaagctaaaacattttagatgtggaaggcaatgcttgttatttttctcactttccctacctgccctccctctctttcatgagccctctctgagctgataactggaaaaatgtaagagtggtaactg

SEQ ID NO: 719765 - DNA, 1551 bp, Homo sapiens
acaggggttcaacggaagggaatgataattattctaattggatgggctacttactgtgtaggactctggttttatgccaaatattcccaataagtatatttgctggagttcctttatctctcacataggttttccagcagtctaactctaactcgtggcttctcttctattgtcctcggagtagctgcccttagcagccccaacccatgttcaatttgctatgggctggggaacccaataatcatagctgayggatgtagtcagaatctggctcttagccaggaagattcgattcaaactcagtccaaatgcattaattttgctatagaatgttttcgtgagtgggagagtttactcaacaacaggacatgtagagatgagtcagagtgaccgatgtgggagtgcccaagccctgtccaggggaaccacagtgcatggacttaaagtattagatcctattggcaagatctttttaactagaaatggatccagggtgttgcaatctgacggcttcaaatactaagtttatatggagtagattattcctgttgtggagtgtcaagtctttgttcattcattcagtatttattgggcaaccactatgctaacccagatccctcctacttttaaaactctttgcccctgctctccaagcaaccttctggtggtgactggctcctggggtagatctccctacagggagagaatgcactggtcatgcagacattgtaagggacaggacactttcccagggtgaattaacaaatggacattatgacgttgcatatcaacatcctgagtttggttaaggtgtgtttggccatgagagatgaattcactatcatgtgttgacaaaaattatctaagcctgaaaacctaaggatgaggccatgaccaaggaggctcacccaggtggtaggtctccccttgggatttcgcttggtgcaatgtgttggactaatgtgttctttgtgatactgaatggtgacatgaggcgctgtggcgtcgtgattcagaagaggatctgggatcagaaacacctgggatgggaggctggttttgccttttatgctctggtttctcctaaattacttcacttttctatgcctccttttcttcattcacaaaaccagatgataatacttcagggtttggctctggctcagtgtctaaacaaaagcagcataccagaagacctgttaaattcttaaaaacctgcctccctcccccacccagttccacagcctccaatcctgacttacaggcccatggccattcagctgcccataataggtacacgcagcactcctcacaagactgtctatggaaacccatagaagtgctcttagacacacagctcatctatactgctgtgcttccgtctcttagatttgaaaattgccttcttagcaaactgtctcttagcaaatgtagttacaaatttaagggagccactttagtcattgtccctacggaataattctgtttacttcaaaacagccagcacatcttccccctcctcaaccaacacaaagacatcgtgttcttcaa

SEQ ID NO: 719766 - DNA, 1056 bp, Homo sapiens
ctccataactttacagaggttccttatgtgtgaaatcacttcattgcaatgccaacctggcagtgcattagccaagaatctgccctagcacaaaaccctctctcccctccccacacacacccttgaatgatatttttaattatatttaactgtaatggcatcataagaacattctaggatatgtagaattgttcattaaagaaaaatatgccagtttctaaaattcttaaatttttagttcaagaagcaaatttttcatgattttattctaatacattgtaaagtatcacccatatttccataaaatgaatatttcattttatggagttaaccaacacattaatttgtaaagtttagttaaacaagatttgtttagcttctatacttacaacatcagcctatcttatttctcacaccattaataatacataaattgtaatgatrgcatatttttttctgttatctattcataactctaaaatgtacaaacagaacattaggaatttcctgtctgttgattctaatatatttcctcctatttaaaagaaatataaaatttaacatctaaacagtatttttcatataaaatgaaaatctgagagttaaggctcaataaaatgaacttttcttactgagtgcaaaaagccaggcacaaaaaaagttgaaagactgtgattcggtatacaaaattttaagaaatgcaaactattctacagtgacataaaaacagataagtgataggctgggtgcaggataacgagaatgatggactgaaaaggggcatgagaaaactttggggagtaataggaaagtctcatatcttaattggggtgtggttttcagttgtatatgtcttttaaaagtatcaaattgtacactttaaatggatgtaattcattgtacatagattacatctcaataaaattttttaaagataattttcaccaaaattaatcagctctttaaaagacatcatcagcaaaaaggcatacagaaaatgccaaaaatctaaattgaataaaggaaaacttactttcttaggatacatagtgagta

SEQ ID NO: 719767 - DNA, 1056 bp, Homo sapiens
ctccataactttacagaggttccttatgtgtgaaatcacttcattgcaatgccaacctggcagtgcattagccaagaatctgccctagcacaaaaccctctctcccctccccacacacacccttgaatgatatttttaattatatttaactgtaatggcatcataagaacattctaggatatgtagaattgttcattaaagaaaaatatgccagtttctaaaattcttaaatttttagttcaagaagcaaatttttcatgattttattctaatacattgtaaagtatcacccatatttccataaaatgaatatttcattttatggagttaaccaacacattaatttgtaaagtttagttaaacaagatttgtttagcttctatacttacaacatcagcctatcttatttctcacaccattaataatacataaattgtaatgatagcatatttttttctgttatctattcataactctaaaatgtacaaacagaacattaggaatttcctgtctgttgattctaatatatttcctcctatttaaaagaaatataaaatttaacatctaaacagtatttttcatataaaatgaaaatctgagagttaaggctcaataaaatgaacttttcttactgagtgcaaaaagccaggcacaaaaaaagttgaaagactgtgattcggtatacaaaattttaagaaatgcaaactattctacagtgacataaaaacagataagtgataggctgggtgcaggataacgagaatgatggactgaaaaggggcatgagaaaactttggggagtaataggaaagtctcatatcttaattgkggtgtggttttcagttgtatatgtcttttaaaagtatcaaattgtacactttaaatggatgtaattcattgtacatagattacatctcaataaaattttttaaagataattttcaccaaaattaatcagctctttaaaagacatcatcagcaaaaaggcatacagaaaatgccaaaaatctaaattgaataaaggaaaacttactttcttaggatacatagtgagta

SEQ ID NO: 719768 - DNA, 2093 bp, Homo sapiens
ataataaggacctttccaagtaatatgatgaattaaccaagtacaggtcccccatctaacaccccttctccgaatacagcttcagatgaatggagggacgtgactgtttggatgtgttcagtaaggccctacttctgtccagaacactctcagccagctactttttatataaccactaaaaggcagaattctattacaaaagagagtaaatgaaatagcaatactatatacagtctgaagttagaaaaggcaacagtcatttgactgcaaagcacaatgaattaaagaaccatgccccaacaaaaccaactctttgcctcttttcatccaaccttccccatcctatccctctcccctctgcctctttaataagttgagcttgcagagtataaatggagttaaggtttgaaagctcagtctttgttcatagcactgatttttacaccatgttgtctttaaccagctcaaacgtaaatcgagtttcctttttctaaatgttgtttttgccttctgtttactgactccacccactgctacttctccttagtcaaaattgctctcgacaaagggtatattgtcctttgcatttcctactgtatgaacttacctcaattacttgcctacttgtaggtattttctgctctatctttctttatggactaaatcgttctgtgccccataaggctactactatactttaggttaatatatggactagatagaaaatatctctagaattccgcacagaggaaacataatccactttaagtctcacacaaatactcctgagtagcttgctctagaaatttcttgaaaccaacaggaaatattgtcattggaacaagaaatcactgaggatcatcagtgccatctgtcctgtggacttgtttgaaaaggaggattatttgaggttgtatcaactatatacagccacaagaatgctacaggtttaaccaccccaaaacttagtggcttaaaacaataagcatgtatttagcttatgcatctgtaggtcagctggacatttctctggttttagttgagttcactaacatatcttgtggttggccttggctgggacaactggtataattcaactctgctccatatgtctcatcctccaacaggctagtccaggattgttcttctatagtgacagaaaacagcaagagtgtgaacagaaatgtacaagtacttttacaagcctctacctgtgtcacataagctaacatcccattggccaacgtaagctaaatgactgatctcagagtctagtcgtgaggacaaatgccctatcaatattggaagggcactgaaaagttttatggcaaaggtcataaatagaaggaaggataaagaagaactgggttctttaaagtattcagtcttagcaaagaggtcaaggtcatttgatgactcccaaagttcatcagcagaagcttctgttttgttccattttaactaatgctgtctacatagccactcaaaattgatgtcattttattttaataagtgagaaaaattcttaaaaagataattaacaaccccatcacaccttatctccattgacttccaatttaaaaattacagctattaagctgatcctaaaatgtgacctatacaagttcacatttttgtgtactgaattattgtgaatcagttataccttaataaggtttcaaaactacaaacttttttgtctcagatgcttcccttccactgacagaagcagctaagtttgaggagctatctaatggctactagactcagaattttgttcattactatatcttagaaagtacagacagttttattccacagaataccagaaaacagtatttcacacccctttacaacagcagatatagccacaatagcagtgtttaaaactaaaaattcttttgaagtccaakccctatcacatctctatgcttcctccaagagctttgtctgcgaaaaacatacaaagaaaattggtctgaggacactacatgagaaagtgccctagaataagattattaagaagctaattttaagctttgcaaatattctgtttctacaaaagatgaatgaggaaagtatccacgatgatt

SEQ ID NO: 719769 - DNA, 1715 bp, Homo sapiens
atttttaccatatgtaagttctaaaacagtataatctgccaaaataatgacggaatcaaagctaagaaagctaaaatgaagtattcttaatatttcaaagccacaaaaaagaagcaataaaaaaaacagaaaagtgttgtttcattacacattcctaggtcataaatttcacgtagacttaaactaactctatataatacttgcccactgagtgatacaaagttattagttatattatgccaaatttagaatttcattaattccaaatgtaatatagtattaaaatgtggccaaaagaatcctggagcctgggtgacatggtgaaacctcgtctctacaaaagacacaaaaattagccaggcatagtggcccttggaccacctggtctatattaacgagctactagggaggctgaggtgggaggatggcttgaccccagaaagtggtggttgcagtgagccaagatggtgccactgcactccagcttgggcaacagaatgagacccctgtcctcctacccttgcaaaaaaaaaaagaatcctggtagtttcatagttaacactgtttcatatggtaatactgaaatgtcttagaaaactcaaaggacaaagttgtgaaaactgtattttaattatagcttaccctttaactagttgttaagatcttcagcaaatcatgtcagccagcatttcctaaagtttgccctgtatccacagatcattcattaatgtaacaggatctatggccaattgagtctgagaaatgctacacattatatacatctctagaagatttataatgtacttaagcagatcataaattctgagaagttccgcagtaaagaaaactgttggtttaatctggtattgtccaaacttaaccactttttgtgtgtcatacttattaacatccaaaaaaacctaaaatttcttaaaacatactttagaaaattttctaatctctagtcgaaatcagataaacatccctttgggttctaaattttagaattctgtgagactaattctaagtggtaattttgtgaaagctgttcaactattaagttcaggtttacaaacctggaacctctggatcaaatgtactcttttatactcccacaacactatgaacttcctctactagagcacttatctttaagtagacatcatttctctaactttctagacttactccttaagtgggagatggaaccatcctagtttcttcaacacttaggagaatgcttggatcactcactaaatgtgtttcggttttggttttgtttctattttattgcaataatctcccacttgatctacccataaccactcttgcctttctcctactgcttctctatgcaaacatggtcaggtctcccccactcaaaaactttcatctttgccaggtgcggtggctcacgcctgtaatcccagcactttatgaggccaaggtgggtggatcatgaggtcaggagatcaagaccatcctggccaacatggtgaaaccccatctctactaaaaatacaaaaattagctgggcgtggtggcatgtgcctgtaatcccagctactcacgaggctgaggtaggagaatctcttgaacccgggaggcrgaggtcacagtgagccaagatcgcgccactgcactccagcgtggcgacagagcaagactccgtccaaaaataaaaaaaaaaaactttcatcttccactcttctgaa

SEQ ID NO: 719770 - DNA, 934 bp, Homo sapiens
ttttctcctaagccatacatgtatttcgtttctaataaagcccagaaaattatcaaaagaaaagatacrataatattatcttaaatatcattactggcaagcaacaaaaaaagtacaatctgtcttcctgaagaaaagttaaagaaacagcatttttattacccagtgtttaaactggaatgtttctgtaccttggtttccttttttcaaacaaaagcatacactaaccatttttaccttctggtgatggggctagaggattttgaagaacaaataagataatgcatgtttacatgaggttattattgccttaaaacacaatctcatttatttggcatcaaaggtgaatagagaattctacaaaagtacattttccaaataaaagaagctttaacaaagcaaaaattccatgagtacttaacacttctgcttcctaaagtaaattgtatgctttattagtttcataaacaggctcctggacacaatttgaactgctcctgatgacctaagatgcacagtgtcttcagatattattgccatatgggccgggcatggtggctcatgcctgtaataccagcactttgggaggccaaggtggacagatcacctgaggtcaggagtttgagaccagcctggccaacatggcaaaaccccatttgtactaaaaatgcaaaaattagctgggtgtggtggcatgcacctgtaatcccagctactggggaggctgaggcaaaagaattgcttgaacctgggaggtggaggttgcagtgagccgagattgtgccactgcactccagcctgggtgacagagcaagattccgtgaaaaaaaaaaaaaaaagatattattgccatatgaagggctatttgtttatttctcaaacttatatagcactatgaatttagagtctttcaataggtttgtttgtaagtata

SEQ ID NO: 719771 - DNA, 934 bp, Homo sapiens
ttttctcctaagccatacatgtatttcgtttctaataaagcccagaaaattatcaaaagaaaagatacgataatattatcttaaatatcattactggcaagcaacaaaaaaagtacaatctgtcttcctgaagaaaagttaaagaaacagcatttttattacccagtgtttaaactggaatgtttctgtaccttggtttccttttttcaaacaaaagcatacactaaccatttttaccttctggtgatggggctagaggattttgaagaacaaataagataatgcatgtttacatgaggttattattgccttaaaacacaatctcatttatttggcatcaaaggtgaatagagaattctacaaaagtacattttccaaataaaagaagctttaacaaagcaaaaattccatgagtacttaacacttctgcttcctaaagtaaattgtatgctttattagtttcataaacaggctcctggacacaatttgaactgctcctgatgacctaagatgcacagtgtcttcagatattattgccatatgggccgggcatggtggctcatgcctgtaataccagcactttgggaggccaaggtggacagatcacctgaggtcaggagtttgagaccagcctggccaacatggcaaaaccccatttgtactaaaaatgcaaaaattagctgggtgtggtggcatgcacctgtaatcccagctactggggaggctgaggcaaaagaattgcttgaacctgggaggtggaggttgcagtgagccgagattgtgccactgcactccagcctgggtgacagagcaagattccgtgaaaaaaaaaaaaaaaagatattattgccatatgaagggctatttgtttatttctcaaacttatatagcactatgratttagagtctttcaataggtttgtttgtaagtata

SEQ ID NO: 719772 - DNA, 397 bp, Homo sapiens
tatgaaaaacattccttttttggaggtgatgaagttcaacctgaatgtgaacttatcactagtccagatcatgtgatccttagagcagcaagcttagttataatgaaatccttagaaatcaagtttcaaaattattcttcagcaagtgaagtgaaaggtaattctccaaactccttttgtatgcagtgtgtaattatttacttaagtacagtaattcataattatcaaatctcaggactagtttaaattccagtaatttaagctrtatgttatcctatttgtaacttattacattttcaaaaaaaaaaaaaagaactggatttacctttaagaaacatgtcagctttttgtgcctacaatgaatttgtaaagcataaggaatgatttaggtttaaaa

SEQ ID NO: 719773 - DNA, 616 bp, Homo sapiens
aatattttataaaaggaagagttaaagcagcaaatttcattgttgtctttaaaaaaacaattagcacagccatctcagacttcagcaaccaccatcctgatcagtcagcagccatcaacatcaagggaagaccctccaccagcaaaaagattatgactttctgaagattcagatgatcattagcatttttagcaataatgtatttacaaattaaggtatgtacatttttcagatatgttattgcacacttaatagactacagtatagtacaacttttgtatgcactgggaaaccaaaaaattyaggtgacttgctttattatgatgttcactttattattcagttcactagaactgaacctgtaatatccctaaggtatgcctatgcttgaaaaatgttatcagtaagatgtgtaatgtgtgacaaatccagataatacattacttttggagaagctgagctgtttcaaaagtgttccttttatttgaagaagaagcagagtagcccaatcaagtaattttatttattttgaacttacacaataatttacgcttttgtttttcagcaagtagtaagggaggtgggttaatctgaaatgaaatgttcttagatcctg

SEQ ID NO: 719774 - DNA, 1029 bp, Homo sapiens
tatgctgtttcataatccataataattatctactctattttcatgagaggtaaaatttaatattacaaaacaattaaaatctccaatttcatgatacggtcttgtttatcctaccctaaaatgtttctcctattctaaaatgactgaatattatataatatcctattaatattatactacaattaatttaaagcacaaataagacaatatttatttcaattttatatactttgatcagaccatatttttattataaagaaagataaatccagatttattcattacctaaagtcaccaatatataagaatataattgataaatgttttcaaaacctgttgctaataataaaataattttacataaaaaactcagaattgaaaggataaccttcagtcctttctgacaatttggttaattttatatttaagtttgaattctgctaaaaagcaaactaaaaactaaaaattctcctcttcggtgtgtctcagcagtaacagtcccagtagtaacaatggagaagcatttcctttctccaataccayaaatgcatgatgggatgggtagttttctatcaacttggctaggctatcatgtcccattatttaatcatacactaatcaaggtgttgctatgaaggcattttttagatgtggttagcatctataatcagttgaccacaagtaaaggagataatcttcaatgtgggtgtgcctcatccgattgcttggcaggccttaagagcaataactgaggctttccatagaagaaaaaagtcagcttcaaaacagcagcatcaactgctacctgagtttccagcctgcaggcctccccctacaggcttctgacttgccatccccagcaatcacgttccttaaaataactgttttttctagagagatatataacaggttctaatatattataggttctgtgttcctgggtctccctacttcccataaaaagaggggtcctggccagaggagcaggcctgagaggtatattaggcccaatcagagatgtttagagat

SEQ ID NO: 719775 - DNA, 633 bp, Homo sapiens
ctgggaaaagacaatagataaagacataattaattagtagttactgctatgaaaaaatagggtaatgaaaggattgggtggggaaaggcgatattcggcagggtagctggggaacatctctgcagaaggctgaaagctgtaaacagctaggagaagagaacaccaaacagagctaactgcaaacacttaggccctgagatggaaatgtgtcttcaattttggggaaaagaaaggaggccaaagtggctkcagcatagcacacaagggtcagaggtagattaagttctagagaaaggcgatacactgatcaagtagaccctttaggccatggaaagaaatttggaattttaagtgcaatggaagtcattctaggattttaagtaaaggagaataatgatcaaattatactttttaaaaggtcattttgcctcttctgttgcttatggaatgagtagcaggaagttacagaagcaaacagatcagctctaagattatttacattcaaggcatgggattttggtgggtagcagtgtggatggagagaaatgaagagtattcatgttggaagcaaattcaatatggtccactagtggatttggtaaatcagaaagttacccaaggtgatgtctaagc

SEQ ID NO: 719776 - DNA, 1945 bp, Homo sapiens
aaaaaaaaatgagagcatgtgtacccagctaggtaaagtgtgcaatttgagtctgttttctgttcattttactccgggagagattgtctagacaaaagcagaaaagaaactttgtgtgcgccctcttgtggaggaggcctagcactgcagggccacccccagccagccttgccctttagagctgctgaatgagacagacaaggggctgcctgcccatggaatttacattctagtggaagcagatggggaaaatcccaagcagataaatgaacaagatctttccagatcatgaaagtaaagagcataaaacagggtaatgtaatagagtgagtagaggagggtgtgggtcaggctacaagttgtgtgttcaagaaaggccagctggggcaggggagaggagatggctgagctgagccccaagtgtcaagaagttaccaaccacgggaagttcagggcaaccagcccaggcagtgccaacgccttgaggtaggaatgagtttggggtgtcaagcacagagaagccagtgtgacaagtggcaaaagcaaacagaagtattccagtgagtgaggatggagggtgaggcacctctgggagcacgcatatcatccaagtaggaaaacggggtctgtttcacactttcaggagacttaattctcacccctgcacccacctcccacagccagttcttcagcaaatccagttggctctgcctcaaaccatccactttcctcatccctatggccatccccagccctagttatcaccctcttctgcaatagcttcctagtggatctccttgccccttgcaaggcattctcctctccacagaaaagtgatctgcttaatgtaaatgagaaaatcagatggtgcctcttccttgcttagaactctccaatggctttgcacttagaataaacctccccttaggtctgacttatccctgcctctgctccagccacagtaaactctaatctctttcctgcttcaggacacttgcactcgcagttccctacaccaggaacattttttccttggtttttgacaaatctggttccttttcatcctcctgggctcagcttaaacttctcagggaatccttccttgaccactccatccaaaggagcccccaagtgactctccatcaccttgtcctattgatttccytcatggcagctatgataatgtgtcatttttccatttattcattattttcttacttttcatcttttttcacattgtatttgaggtccatgagggcagagaccataactcttattcactgctggatcctcagtgcctgcagagctcctggtatttgcgtgatatttgaggaatgaatgaatgagccctaggaggtagcagtcaagatggaatctaggaattatctagcccaacagccctcaaattctgtttttagcacagaagctgtttccaaatggactcttacacagaacctaagaatgaagcaagacacagcagacatgagccctgccctcctggctctgtctccatgtcgccaagagccctggctgagccaacgacactggcagctcttgagaaacacctcccaggtggctaagtcctcatgaattttccctcagcccatgtttctctgacttcccctgttctacaaatgagaacagaggcagaatggaaaataatattttaaattgccatcagcagtttggggggtgggtagagttaaatatattagagaaaattttcatgggggaatgtatttgggaacacttctggggtgtgagtgagctctgtggtttttacttcagagcacctatgtgggctcaggcacatttgcaagaatttctggaagccctgtgtgccccaaagagggagcagagaccagttactctcctgccatccttttccttctccagaacattgatgtgccctttcaggtgccaggcagcacaactcagtgggcac

SEQ ID NO: 719777 - DNA, 633 bp, Homo sapiens
tttgtatttttagtagagacaaggtttcaccatgttggccaggctggtctcaaactcctgacctcaagtgatccacccacctcggcctcccaaagtgctgggattacaggcatgagccactgcacccagcctactttgttattattatagatgtaagatacaatrtatttctctgagtttctctttaaagatttagcctgctaacttccttgacctttgttttcaaacctcaacttttctgttcctccttgcccctagttattgtaaaatagcctacccccttcccatcagttctaatcaatacctcacatctgttgccttggttacctgcactcattgttcccctcaaactgcatgtctcacacacttcaccactgtacctcacgtccccttcccctccatatttagaaaaatatttccaagtagccagtcaggtcagctcagattgcgcagtctgaccccagctcatgcgggagggacacagaggtagggattgcattaaggatataaaaactgcctggtctcctttgttctttgtgctcttgcaatcttgattgactcaagtggcacccttctgcagaagtaaattgccttgctgagaaaacttttgcctgagtgctggttttactttgc

SEQ ID NO: 719778 - DNA, 633 bp, Homo sapiens
tttgtatttttagtagagacaaggtttcaccatgttggccaggctggtctcaaactcctgacctcaagtgatccacccacctcggcctcccaaagtgctgggattacaggcatgagccactgcacccagcctactttgttattattatagatgtaagatacaatawatttctctgagtttctctttaaagatttagcctgctaacttccttgacctttgttttcaaacctcaacttttctgttcctccttgcccctagttattgtaaaatagcctacccccttcccatcagttctaatcaatacctcacatctgttgccttggttacctgcactcattgttcccctcaaactgcatgtctcacacacttcaccactgtacctcacgtccccttcccctccatatttagaaaaatatttccaagtagccagtcaggtcagctcagattgcgcagtctgaccccagctcatgcgggagggacacagaggtagggattgcattaaggatataaaaactgcctggtctcctttgttctttgtgctcttgcaatcttgattgactcaagtggcacccttctgcagaagtaaattgccttgctgagaaaacttttgcctgagtgctggttttactttgc

SEQ ID NO: 719779 - DNA, 633 bp, Homo sapiens
tttgtatttttagtagagacaaggtttcaccatgttggccaggctggtctcaaactcctgacctcaagtgatccacccacctcggcctcccaaagtgctgggattacaggcatgagccactgcacccagcctactttgttattattatagatgtaagatacaatatatttctctgagtttctctttaaagatttagcctgctaacttccttgacctttgttttcaaacctcaacttttctgttcctccttgcccctagttattgtaaaatagcctacccccttcccatcagttctaatcaatacctcacatctgttgccttggttacctgcacycattgttcccctcaaactgcatgtctcacacacttcaccactgtacctcacgtccccttcccctccatatttagaaaaatatttccaagtagccagtcaggtcagctcagattgcgcagtctgaccccagctcatgcgggagggacacagaggtagggattgcattaaggatataaaaactgcctggtctcctttgttctttgtgctcttgcaatcttgattgactcaagtggcacccttctgcagaagtaaattgccttgctgagaaaacttttgcctgagtgctggttttactttgc

SEQ ID NO: 719780 - DNA, 1933 bp, Homo sapiens
aataaaaatgtaaatttaaaacatacatatttagactgacttcctaaatacttgaataaatgtaaataagcaaacttgtcttcatattattatcctacttgagataatccaaacttctacatcgagaattcaggaagttaactacagatctttctaataatcaacatagtaggctactgtgttagggaacaggcattctaaaaataatacaagttcaaatgacaggtcatcttttcatgagtatacaatgcttggctcacggcagacattcaatggatgtgtgacacggattcatttaaagtcttgatttcaagtctgattctaaaaagcctgtgttttttttgttttgttttgagacagggtcttgctctgttgccccagctggagtccagtggcgtgatcatagctcactgcagccttgaccttctgggcttaagtgatcctcccacctcagcctcctgagtagcagggaccagaggtacacgtcaccatgcccagctaatttttcttttaatttttktagtgatgagggtctcgctatgctatccgggctggtctcaaaattcctggcctcaagtcatcctcctaccttggtctctcaaagtgctaggaatacaggcatgagccactgtgcccagccaagcctgtgttcttaatcacagttcagtgctccacatcaactgcaaagacagctagcaacttgagtcagtgcttgaatattcggatttctcaaattaaactgaccatacccaccccataatgtgccatagctaaaaaagaagtaattcttttagcaaagaaaggcataaccgagccctgcttgaatatcaccacataccaggcattgtcctagctgtacaaaagtaagactgaagatttgtcagactgaagttgtcttttttttttttttttgagacggagtctcactctgtcaccaggctggagtgcagtggcacaatctcagctcactgcaacctccgcctccctgggttcaagcgattctcctgtctcagtctcccgagtagctgggattacaggcgcatgccaccatgccccagctaatttttgtatttttagtagaaacggggtttcaccatgttggccaggatggtctcgatctcttgaccttgtgatccacccgcctcggcctcccaaagtgctgggattacaggcgtgagccactgcgcccggccccgagttgccttcttcatacagtctaataaaagggctttccagaaaagtcttttcaaaatccaacatggcaactgaacatatattatttacactggactaaatgctgagcaggacataaagaaataaataaacttcaaaggactataatgccatttcttgtagaaaatgtcagaaagtagcagcaagagataaacttgctctgggcctcactgatctctttataatgaatctgtgtagaaacttgactacttaagcttgactatctcaaagattaaagtgactgtaggtcacggaattctactgttttaggattacatctaactttgttcctcaatactaggtcaatgaaaattatgctactgaaagaatgaactctgaggaatcatacattaaatataaaagacaatataaaaagaagagtttagccagttgtggtggctcacacctataatcccagcactttggggaggctgaggtggaaggatcatttgaacaggagtttggggccagcctgagcaacacagtgagatctcatctctgccaaaaataaataaacaaacaaataaataagctggacctggtggcacatgcctgtggtcccagctatgcaggaggctgaggtggaagtatcacttgagtctaggaggtacaggctgcagtgagctgggattgcaccactgcaacccagcctgggtgacagaatgagattgtatctctaaataaaaaaaaaaaaaaaaaa

SEQ ID NO: 719781 - DNA, 1008 bp, Homo sapiens
gatttttggacaagttgcctaacttctttgtgccttcagttcctcaactgaaaatgaggataataccatctacatcttactggtctgttgtacagagtaaatacaataatcctttgtaaaacactcagataacacatcagtgcttctcaggatatatttgttttaccattatttttcatgtaccagttgttatttgttcaaccagaaaaaaaaagggcaaaaaagcatcttggcaaaaggattctgtctttccaaaatgttccagataggatatatcctaatttttaatgttaatattttagctatggccttttttttctctcttttttttttttgagacttgctttgttgcccaggctggagtacagtggtgtgatctcagctctcagcaacctccgcctcccgggttcaagtgattctcctgcctcagcctcctgagtagctgggattacaggcatgcaccaccatgcccagctaatttttgtattttagtagagatggggtttcaccatgttggccaggcttgtcttgaactcaagacctcaagtaatccacccgcctcggcctcccaaagtgctaggattacaggcatgagccaccgcacctggactttttttttttttttttttcccttaaagagatgggggtcttggtctgtcagccaggctggaatgcagtggtgtaatcatagttcactgcaaccttgaactctagggttcaagygatcttctaacaacagcctctggagtagctgggactactggcatgtaacattacacctggctaatttattttttgtagagatggtctctaagttgcccaggctggttttgaactcttgggctcatgtgattctccagccttggcttcccaaagtgctgggtttacaggtgtgagccaccatgcctggccagctatagccaatttttacagacataaggaaaaacatagattccattgataagaaggataagaaaaacaagaggaaaactaactaaacaaccccca

SEQ ID NO: 719782 - DNA, 818 bp, Homo sapiens
aatatgtataaaatgaaacttttatttgtcctcatcttcaagcaatggatgtaatgggactatggaatggattaaaattctccccactctaaaatgttagcaggtttgagtctattactagaacctttctttggggtcctgtcttatagatccttcctatatgctgctatctctgtagtcacttgcctcctaccagataagaccaaggaatagaaaaaaattaagtggaggaaataaatttaatctgtaattcccaccaccctcccactgcaggtgtattttgtcataaccatggaggtactactatataagactcgaacgtttctttgttgaagcccaagtggaggaagtaaaagtgaagcttacttatttagtacattcatacaaaaaaaaaactcatagaaattgaaacaaaaacctcagaaaaaataataattaaacatataaaatttcttattgattaaaccaaatcaaggacttatgacttttcattcatcaaaaatattaagtaaaaatgaaaatttcctttgaccatacagaagacawgaaatagcttaattatacaaaaagaagtaatgctttagagcccaagaaaaatataattttatacccccaaattactggatattaagaaattttacttgacaaaaagtttacttttctggtttggatccctaatcctgttccttatagtgataagctactatgatcatggctgtcattatgacttaattgacccaaatttccctggctacaaataattataggacatggaaagaaaacccattcctctttaaagcatatctggaaactactca

SEQ ID NO: 719783 - DNA, 818 bp, Homo sapiens
aatatgtataaaatgaaacttttatttgtcctcatcttcaagcaatggatgtaatgggactatggaatggattaaaattctccccactctaaaatgttagcaggtttgagtctattactagaacctttctttggggtcctgtcttatagatccttcctatatgctgctatctctgtagtcacttgcctcctaccagataagaccaaggaatagaaaaaaattaagtggaggaaataaatttaatctgtaattcccaccaccctcccactgcaggtgtattttgtcataaccatggaggtactactatataagactcgaacgtttctttgttgaagcccaagtggaggaagtaaaagtgaagcttacttatttagtacattcatacaaaaaaaaaactcatagaaattgaaacaaaaacctcagaaaaaataataattaaacatataaaatttcttattgattaaaccaaatcaaggacttatgacttttcattcatcaaaaatattaagtaaaaatgaaaatttcctttgaccatacagaagacatgaaatagcttaattatacaaaaagaagtaatgctttagagcccaagaaaaatataattttatacccccaaattactggatattaagaaattttacttgacaaaaagtttacttttctggtttggatccytaatcctgttccttatagtgataagctactatgatcatggctgtcattatgacttaattgacccaaatttccctggctacaaataattataggacatggaaagaaaacccattcctctttaaagcatatctggaaactactca

SEQ ID NO: 719784 - DNA, 1849 bp, Homo sapiens
caataacaactaaataacagggatatataatattaagaaatcataaatgctatgaagaaaaatacagcaagtatgtaaggggctagtgggttacagggttacatctattttagatgtggtgatcaggaaaggcctatctaggaaaattatacttaggcagaaaacatgaaaggggacaatttaaactttcttctgaagtatttrtggattttaaaagttgtattgaaaacatgacagggtattcagcagctcaggtagaacttctaaagcatataattacatatacctttgcttttttaatggactaaaataaagataatttaagtgcttcctggtgacttagggtggcaggtcattattatgatccattcaagtcagaaggtttttttttttttttcttttccctcacaactgttccaatcacatcctatcagttgactgctgctaatcactatagtacaaaaaccggagttatggttaaaaggattcagggtaaacagttaaaacttctgaatgatggttttacagcttgcctacagaagagctttaggctggaagcttataaaaattctttcatcagctaagaaaattgtgttttgtaaagtgactttgggaaaagaattacagaaatgcaaaaaatttacatatcagatcataaaagctaatatttattgattcacatttatatacagtaatatttatattgcttactacattttaaactttgttctaagtactttatctcatttaatccttcaaaagctaaacgtctctgccttagttttatatctgtaaaatggagaaagcagtagtaccttcttcagagttttactaacgaatttatgatctacaaaatatcccatttagcatagaaagaagtatttttttttatcaaaggaagaaagaataatgaataaaggccctgacacaaaaatggatttggcatgttttaggtacagctaaagagccagtatgacttattaaatatgtatatctaaatagcagtgcatgctagtctctataatgattattgagtatctattttatctgtgatttcgttttatatatatatatatatatatatatatatatatatattttttttttttttttttttttttttttggatggagtctcgctctgttcccaggctggagtgtagtggcttgatctcagctcactgcaagctccgcctgccaggttcacaccattctcctgcctcagcctccccagtagctgggactacaggtgctcgccaccacgcccggctgattttttgtatttttagtagagacagggtttcaccgtgttagccaggatggtctctatctcctgaccttgtgatctgccctcctcagcctcccaaagtgctgggattacaggcgtgagccaccacgcccagccaattttgttatatttatcaatatttatagctgaatacatgcaattagggaatgatccccaaagagcagtatttcaaataaatttatcaatgtggacacaaaagtatgtaagtatgttcttaaagggaaacatgaaatgaaaaatgcaaatttccctttaagaaaagaagcacctttaaactaagagaaaattggggcaaaaacatttctgtccattatgtaatatgtgtaaattccttcttttgatgagagcagcttgaagagacagagggagtattcgcagtcctatttgccaaataatcagatagggaccagagggtaaattaaagagagagagagtgggtgagtgagagagttacagagagagagagaaattcttggtataaataccaagaatcacaaaatatgttttagagaattacaagttataaagcatggatggctta

SEQ ID NO: 719785 - DNA, 1849 bp, Homo sapiens
caataacaactaaataacagggatatataatattaagaaatcataaatgctatgaagaaaaatacagcaagtatgtaaggggctagtgggttacagggttacatctattttagatgtggtgatcaggaaaggcctatctaggaaaattatacttaggcagaaaacatgaaaggggacaatttaaactttcttctgaagtatttatggattttaaaagttgtattgaaaacatgacagggtattcagcagctcaggtagaacttctaaagcatataattacatatacctttgcttttttaatggactaaaataaagataatttaagtgcttcctggtgacttagggtggcaggtcattattatgatccattcaagtcagaaggtttttttttttttttcttttccctcacaactgttccaatcacatcctatcagttgactgctgctaatcactatagtacaaaaaccggagttatggttaaaaggattcagggtaaacagttaaaacttctgaatgatggttttacagcttgcctacagaagagctttrggctggaagcttataaaaattctttcatcagctaagaaaattgtgttttgtaaagtgactttgggaaaagaattacagaaatgcaaaaaatttacatatcagatcataaaagctaatatttattgattcacatttatatacagtaatatttatattgcttactacattttaaactttgttctaagtactttatctcatttaatccttcaaaagctaaacgtctctgccttagttttatatctgtaaaatggagaaagcagtagtaccttcttcagagttttactaacgaatttatgatctacaaaatatcccatttagcatagaaagaagtatttttttttatcaaaggaagaaagaataatgaataaaggccctgacacaaaaatggatttggcatgttttaggtacagctaaagagccagtatgacttattaaatatgtatatctaaatagcagtgcatgctagtctctataatgattattgagtatctattttatctgtgatttcgttttatatatatatatatatatatatatatatatatatattttttttttttttttttttttttttttggatggagtctcgctctgttcccaggctggagtgtagtggcttgatctcagctcactgcaagctccgcctgccaggttcacaccattctcctgcctcagcctccccagtagctgggactacaggtgctcgccaccacgcccggctgattttttgtatttttagtagagacagggtttcaccgtgttagccaggatggtctctatctcctgaccttgtgatctgccctcctcagcctcccaaagtgctgggattacaggcgtgagccaccacgcccagccaattttgttatatttatcaatatttatagctgaatacatgcaattagggaatgatccccaaagagcagtatttcaaataaatttatcaatgtggacacaaaagtatgtaagtatgttcttaaagggaaacatgaaatgaaaaatgcaaatttccctttaagaaaagaagcacctttaaactaagagaaaattggggcaaaaacatttctgtccattatgtaatatgtgtaaattccttcttttgatgagagcagcttgaagagacagagggagtattcgcagtcctatttgccaaataatcagatagggaccagagggtaaattaaagagagagagagtgggtgagtgagagagttacagagagagagagaaattcttggtataaataccaagaatcacaaaatatgttttagagaattacaagttataaagcatggatggctta

SEQ ID NO: 719786 - DNA, 640 bp, Homo sapiens
gagtttggttcatactgtcaacttcatttagagttatgggttaggaaccatatagttttatgtaaattttagtatataaagctaggctacatcaaaaaatgaagtatggtacttggggggaaataagccttgatttaggtctcaggaacaataaaaggaagtgtatataaaaagaacaagttacatgagcaactgtattctatgactgattttattcctagcttctccatctgtaaaactagggggctgaatttttaaatgacctctacaggctctttgaattcaaaaattatgtaatctgatttcatgtaattcatcaattttattytcacaagtaaactactactctcacttatctatcatttttttctgattaagctaacaactttgttgagaacacaaaatcttggtgcagttatataaattcatgcaaaatacttgagattaagggtaatacattccctttgagaaacctgaggtgataaaatagagtagctctgcttatctaacagggatacattccaggacccccagtggatgcctgaagctgcagatagtatcaaacctatatacatatattgactttcatatacctcacacctctgataaagataattgataaattaggcacagtaagaac

SEQ ID NO: 719787 - DNA, 602 bp, Homo sapiens
gggttccgtgattccattaaccttctgattcttcagagcttctccacacctttccaattcctctctgctttcatttctacattggtgttgggggggaaaaacaaaccttattagccacacataaacatcttccattaaactgctctaaagcaattactgctgttaacacagttaatggactgtcaatgtcaaatgtgaaaccttttctcctggaaaggcaacaatgacttcgtgaaatcgttttctgtgctgtagcagaaagggaggaattctggaggatcgctctttctgcaaacatcgcggtctgtgaaatctgccccctaaaaaacaaacaaacaaaaaaaccaaaccaaaacaaaaaaaccctgatcataygcctgttatcctaaaatagcaccttcctccattatgccgaggttcagcgcaaaactgactcatgcagtaccgggatcgctgccagagcgacggagcgcgcgagcagcgcggcatcaacaggcagaaggtgccacggggcggacgggacccactgcccgggtccagactttccatccgagaaagcaaaagctttcagtatccaacttattagaagataacatcttgat

SEQ ID NO: 719788 - DNA, 1366 bp, Homo sapiens
ctactagccttcggacttaaactgggacactggctctgcagacagtggaccagcctcaataatcacatgagccaatttcttataataaataaataaataaaaaaaaatctcctattggttccaattctccagagacccctgactaacataatacctattttacgatacttattagaaaaaataaaacccaaccaaatttgggtataagaaacaaacagagcaagaagacatttcaaaagcggtctgagttttaaaatgtcaacactgctggtgtgtcagcaacatttaattgccatcttatccatgcccttcctcttacatgttcagcaagtgtcatttagtcttcatttaagttaggaacaaaagttcaataataggtttaacccagttttctcctttcccagcctcttttaccctaaggtgcccttraagcaagggcctctgcccagccattccctaacagaggatcatgggagtgaagtatagtgtctttcctgtccagattaaacattatcgttgagctacaaagctagatgctgctttgggaagggatcacatacaggactcttgtattttactgacttttctgcaattaataatctacttctcatagtacatatcctaaaacttaaaaggagtgcagaagttagctagtcaatattgtttattttggatatggagaaacaaagcctcagaggagaaaaatgtcctatctgtaccatacagcaattattagcagatctgtaaagcctgctatataatgaagcctcaattcttagcatgtctttaagatgcaagaatttttaaaaagtgtagttggagcttcatgaaaatccactatgtctgctctgcaggaggggctatgcttctgaccctttaccatataaacttttgcttaaagatcaaatcaagaaaataaacctctgaatctctaagtagcactgcacaattggatagttcatgtcgtcctactcaaaaatgggccacctcctgtcaatgaaaccagacttccaaaacataggttatcatagcattccccattcaaacccctgcaatgattctccattgcttaggggggatgagggcaaatgttcaaatgcttagcctaaaatttaagaacctccataatcaaagcttaacctactctagcaacacatatttgttgaatactactgtgtactaggtacaataattgagacagtagataaaaatgcatctttggaagtgactcctccagcccagtcaaactttcaggtaactgcacatgcagaagtggtcacctgcttaacagcaatctcatgagagaccctgaaccagagccacccagctaagccgctcccaaatgtctggcccacagaaactgtga

SEQ ID NO: 719789 - DNA, 2038 bp, Homo sapiens
tcccataggtagcaggttgggtaaaagttactgtgtgaaattaattgtcaccttttgtaaaactaagtttctgtgtagttcagctatgcagtaatgcataccagaaaaagcatgggctttgaagcccgacaagagccatttggaattgaagttctgccactgtgatcttagagaaaatatggagtccctcactttcctcatagcatattgggaataatagcacccactctgcagggctattttagagtagagataatatagacgactcgtggagcatagtgcctgtcaaaaagtagatattcttattgatgagaaaattgtgtcttttgtttagggaagtagcagggttaaattaagttttcagcaatatcttaggcaagatacaaatccaaaaaaaaaaaaaaaaaaaaaaaggaacatacacttgcacacatcctcctgcctccagccctaagaactgttgctctcagaaccagaaggggcctcaagaaatctggaaagcttggcaagacgcttggtactgtgctccaatgccactagtggaaatgatacaatgcaagttctttgggggcaataagggaaattggtacatatcttctatcccaaatatttaccctgtgacgagaagtcaaataatgccagatgtatatgaagaaagttgcagccatccaggattgagaactcagatctttccagttgttggtgagtagcccactgaggaaaaggcctcttttccaatttctttacaaatgcaagccaagtactaaattttgctgttgtcaaatggcatgggcacaaataaatacgcacagcatggcttctctgtgccaactggtatgtagatgtaatcatttccacagcatgccctccctcagcccaagggtatcaagcaaaatgtagcaactgagagacaggaaggctatggagcagtccaaagggaaagaaagagacatgcgggaacagagtcatccaggagtgctcctttcaacctcacatggagccattctagagttatcatcgaaccgatgagacagtaggtaagtcattggtagaatgccctgagcagaaaccactaaactaggagtccaatccttggatcagatatttccaatcctcacagtaccctaagacacccaagacatacaacattctctcatggaaacagtgactaggaaaaggaggggtcagggaccaccagtcagtgggagtcactgtggagttcaaggcaggtccccacataattcaagtttaccccagtcttggttccaatctttactaactaggagaacttaggcaaatcacttaactgttctgaagcttagtttacataattgtaaactagacaaagtattctcataccgttttgaacattaaatatgatcatggaaaagcacagatgcatttcataaactgtgaaacaccttgtacccacaaataaacagatttctcacttttcttcatcaggtgaggacccaaatgcacacacacttacacacagacacagacacacacacgtggctaaagaaatcaaggttttgttgttttcttagggtggccttcctggacaaccaaggagagcaagtcagtggcgtcttctctcctagatccagggaccacagaacaatctttctggattatgacatttgcagcaagcacttaatatattagaaataaaaccaatttctatatcaaacctggcatatctcccttcctttcccctctgtttacrttgggataatcaaagtgtcactcattattcaattcaatcaaataaacatcaaccatgtaacagctataagccaggtcccctgctagaggttatggtagataaagatagaaataacatggtctttgtcctctgtttgttcatgttcatgttcatgttgacatgaaagcaactaataacaaggcaaaagtgaagtcagtaccaaatggactacaagagcacagaggggggtatcatcctttttctgatgagacaacagaaagtaaaaatttaagcaagccaaatatgctttttgtgaacagctctggatgg

SEQ ID NO: 719790 - DNA, 2038 bp, Homo sapiens
tcccataggtagcaggttgggtaaaagttactgtgtgaaattaattgtcaccttttgtaaaactaagtttctgtgtagttcagctatgcagtaatgcataccagaaaaagcatgggctttgaagcccgacaagagccatttggaattgaagttctgccactgtgatcttagagaaaatatggagtccctcactttcctcatagcatattgggaataatagcacccactctgcagggctattttagagtagagataatatagacgactcgtggagcatagtgcctgtcaaaaagtagatattcttattgatgagaaaattgtgtcttttgtttagggaagtagcagggttaaattaagttttcagcaatatcttaggcaagatacaaatccaaaaaaaaaaaaaaaaaaaaaaaggaacatacacttgcacacatcctcctgcctccagccctaagaactgttgctctcagaaccagaaggggcctcaagaaatctggaaagcttggcaagacgcttggtactgtgctccaatgccactagtggaaatgatacaatgcaagttctttgggggcaataagggaaattggtacatatcttctatcccaaatatttaccctgtgacgagaagtcaaataatgccagatgtatatgaagaaagttgcagccatccaggattgagaactcagatctttccagttgttggtgagtagcccactgaggaaaaggcctcttttccaatttctttacaaatgcaagccaagtactaaattttgctgttgtcaaatggcatgggcacaaataaatacgcacagcatggcttctctgtgccaactggtatgtagatgtaatcatttccacagcatgccctccctcagcccaagggtatcaagcaaaatgtagcaactgagagacaggaaggctatggagcagtccaaagggaaagaaagagacatgcgggaacagagtcatccaggagtgctcctttcaacctcacatggagccattctagagttatcatcgaaccgatgagacagtaggtaagtcattggtagaatgccctgagcagaaaccactaaactaggagtccaatccttggatcagatatttccaatcctcacagtaccctaagacacccaagacatacaacattctctcatggaaacagtgactaggaaaaggaggggtcagggaccaccagtcagtgggagtcactgtggagttcaaggcaggtccccacataattcaagtttaccccagtcttggttccaatctttactaactaggagaacttaggcaaatcacttaactgttctgaagcttagtttacataattgtaaactagacaaagtattctcataccgttttgaacattaaatatgatcatggaaaagcacagatgcatttcataaactgtgaaacaccttgtacccacaaataaacagatttctcacttttcttcatcaggtgaggacccaaatgcacacacacttacacacagacacagacacacacacgtggctaaagaaatcaaggttttgttgttttcttagggtggccttcctggacaaccaaggagagcaagtcagtggcgtcttctctcctagatccagggaccacagaacaatctttctggattatgacatttgcagcaagcacttaatatattagaaataaaaccaatttctatatcaaacctggcatatctcccttcctttcccctctgtttacattgggataatcaaagtgtcactcattattcaattmaatcaaataaacatcaaccatgtaacagctataagccaggtcccctgctagaggttatggtagataaagatagaaataacatggtctttgtcctctgtttgttcatgttcatgttcatgttgacatgaaagcaactaataacaaggcaaaagtgaagtcagtaccaaatggactacaagagcacagaggggggtatcatcctttttctgatgagacaacagaaagtaaaaatttaagcaagccaaatatgctttttgtgaacagctctggatgg

SEQ ID NO: 719791 - DNA, 2038 bp, Homo sapiens
tcccataggtagcaggttgggtaaaagttactgtgtgaaattaattgtcaccttttgtaaaactaagtttctgtgtagttcagctatgcagtaatgcataccagaaaaagcatgggctttgaagcccgacaagagccatttggaattgaagttctgccactgtgatcttagagaaaatatggagtccctcactttcctcatagcatattgggaataatagcacccactctgcagggctattttagagtagagataatatagacgactcgtggagcatagtgcctgtcaaaaagtagatattcttattgatgagaaaattgtgtcttttgtttagggaagtagcagggttaaattaagttttcagcaatatcttaggcaagatacaaatccaaaaaaaaaaaaaaaaaaaaaaaggaacatacacttgcacacatcctcctgcctccagccctaagaactgttgctctcagaaccagaaggggcctcaagaaatctggaaagcttggcaagacgcttggtactgtgctccaatgccactagtggaaatgatacaatgcaagttctttgggggcaataagggaaattggtacatatcttctatcccaaatatttaccctgtgacgagaagtcaaataatgccagatgtatatgaagaaagttgcagccatccaggattgagaactcagatctttccagttgttggtgagtagcccactgaggaaaaggcctcttttccaatttctttacaaatgcaagccaagtactaaattttgctgttgtcaaatggcatgggcacaaataaatacgcacagcatggcttctctgtgccaactggtatgtagatgtaatcatttccacagcatgccctccctcagcccaagggtatcaagcaaaatgtagcaactgagagacaggaaggctatggagcagtccaaagggaaagaaagagacatgcgggaacagagtcatccaggagtgctcctttcaacctcacatggagccattctagagttatcatcgaaccgatgagacagtaggtaagtcattggtagaatgccctgagcagaaaccactaaactaggagtccaatccttggatcagatatttccaatcctcacagtaccctaagacacccaagacatacaacattctctcatggaaacagtgactaggaaaaggaggggtcagggaccaccagtcagtgggagtcactgtggagttcaaggcaggtccccacataattcaagtttaccccagtcttggttccaatctttactaactaggagaacttaggcaaatcacttaactgttctgaagcttagtttacataattgtaaactagacaaagtattctcataccgttttgaacattaaatatgatcatggaaaagcacagatgcatttcataaactgtgaaacaccttgtacccacaaataaacagatttctcacttttcttcatcaggtgaggacccaaatgcacacacacttacacacagacacagacacacacacgtggctaaagaaatcaaggttttgttgttttcttagggtggccttcctggacaaccaaggagagcaagtcagtggcgtcttctctcctagatccagggaccacagaacaatctttctggattatgacatttgcagcaagcacttaatatattagaaataaaaccaatttctatatcaaacctggcatatctcccttcctttcccctctgtttacattgggataatcaaagtgtcactcattattcaattcaatcaaataaacatcaaccatgtaacagctataagccaggtcccctgctagaggttatggtagataaagatagaaataacatggtctttgtcctctgtttgttcatgttcatgttcatgttgacatgaaagcaactaataacaaggcaaaagtgaagtcagtaccaaatggactacaagagcacagaggggggtatcatcytttttctgatgagacaacagaaagtaaaaatttaagcaagccaaatatgctttttgtgaacagctctggatgg

SEQ ID NO: 719792 - DNA, 1472 bp, Homo sapiens
ataaataaataagtaaaaaataaataaatgcatgaaatgaattaagtttcacaagtacattgactacaaagcaggtatcaaactagacacagtgtgatcccaatcatatatatgatgtatatgtataccagtatacttatagagaaaagactggaaggaactaagccaagatattactagtggttatttctgggtagtgggatgaaatgtgattttacctctttgtatttccccctcctcttcaaatttactgcaacagatagatttttataatcaagtaaaagtgttattataaagacagatacatggggaccatgttgaaaatgatccagttatttgaaatcagggctgtttctctctctcctattgcagcaatgccatatacgtgtttatctttttcaggtggaaatgaccatctggtcaaagtttgggattataatgagggtgaagtgactcacgttggggtgggacacagtggcaacatcacacgcatccgcataagtccaggaaatcaatatattgttagtgtaagtgccgatggagccattttgcgatggaagtacccatatacctcctgaagctgatgagatgtctctgagccttggcgttgcacgcagtcctgttgaagactgagtttagataactccaacactagtcttcatttctcacagctctgtttttgttcttgagtcaatttttctctttttctttatagaatgcattttatattcttaaattgcatattaaaattgaagtatgttcaagaataatttgtgcagactctaattagaacttttaacattttgaataaattcttagttgttggttttctgttataatttgttttctgcaactctgcaaaacccacagaccttcctcatgatctgtgcacagacagcattgctattatcctctaaaaataaggtgaggtgaatttccttcttaattgccatttcattggtcaagctatatgggactagactcagatttaaatccagatcttgggcaggcttcttaaaaattctctgagccacaattttctcttttgtcaagcaagagtaagttcctgctcaaaaggttattgtgagaattaagtgactaatgtactaaagcatcggcagaattcctgacagggtagagagaaatatgcatgctttctcaaagaaaatgtgtggtgttggggatctcaggacaattaccaaagaaagatgaaattacagagatgctttattggagttggccattacatctttcttctgtgctttccaccagaagggtgatgaaatggaccttgtgtccttgtgtattaatcacccagccgggtatctttttccagagaggggtaaataatggcattttccagaacgcaagtctccgattcacagtaccgtctgatgttttaagcatgttatttatcctttaagtaaggctgcttttttgcatgaggtaactgctgtaasccggtttgaaag

SEQ ID NO: 719793 - DNA, 622 bp, Homo sapiens
aaaaattaagagtaaatgataaagaacgaatatctttatctataaaccctggaggactccagggttttttttccaaaagcaactgaatagagggtagtatattcattgggaaaagggagaccagaagaaaaacacatgtagggagaaattaagaatttaatattgaacatactgggtttgagataatgtatctgtgaaataaagaagaggagatagcagacagtccttttaagataaatgattaaaagacacgagctctaagaattttaattatattaagtgtatgagataggtccaatactgttcctatcctacagatgagaaaagttgaggcacaaaaaggataaataacttgatcataatcacacagctagtactctctctgggaaagcagattctcaaacttggcagtatrgttccagagttcatgcattatctctacacttattgctcgcttctttggcaattgattgattaccccacactgcagagaccccagaaaggtttagtatttgacttccaagaaagaaaggttgaggtataagggtcataacagagaatttttaaaagtctccacaatgaatgggaaaaccctactcccttttccactgccaatcctcaa

SEQ ID NO: 719794 - DNA, 612 bp, Homo sapiens
actctctttctcacacataccacacaaagacaagcttgtacacacatgcatacatataatttggctttcagagctaggtcagagggtaggggaagtgaagggactaggggaaggacaaggcaagctgaagctttggctactgactcagtccctctggaataacccctcttccctcagctgagggagagcagttctccttctgctcccctgcataagcctcttcaactcctgaggttggagcaatatctgagagtgggaaaggaaaaggggtgacgccaatgatcaggtgtgggaggttactaagtcaatccaatttgaataagttataaattaaaaataaataaaataataaatggttctttttcaggacagggaggcaacgctggcatgacttccctgggaacttgggataacctcagggtggctctggttcctccctactacctaagctggactgggagaaccaagggaggggacaggcacatggaggacctgaagtagggcaggttgtagtaaggatcagaagctctaaatacccaaatgatcaatctrggcatgagcatggtgagggctttaactcgagcctgaagggtctcttgccatctctccatc

SEQ ID NO: 719795 - DNA, 1206 bp, Homo sapiens
ctcagtgggcactcagttgttatgcctgatactcataggatggtccttgatttctaaccactggtatcctattcactcctaggcaggcagaagctgtggtttttctatatgatattattgaaactttacagatttgttccttaacattagagtgcaaagtttggaagcaatttcttactattgtagcaaaatgaatatatgcatcttaacctgacatgagaattgacgagatgatatggcaagttgaatccccctaaaattttaatatagaatctctcagttttggctatattaatttgtttaaccctcgaatagaattttctcagacatattgtggtgagtggtgattgaacatgtgaaataaacctccacacttgcaaaatagaacatctcattttcttagatgaagaattgctcctcatttttctcaaatattaacatgctgaagggataagaaggcatgactagctagtactgattgttgatgagaattctcttggggatcataactatttctagatccctgtgggatgtagtgggtggtgtgaagatgagccaatcaatcttgaactctttcccagtgaaaaccaaaaagaaatgtgatcctgatcagtttactagacagcctgactgggtgactatttgatagttatttacatatttgcatgccaagctctgaatgggagaatatgatctcttcttgtcatcattgtgaacaaccagtaatgggcttaattacacacaatgcttgctcagaacctagtcggagtcggggtaaagagtaaccgtgcattttgggaggccgaggtgggcggatcaagaggtcaagagatcaagaccatcctggccaacatggtgaaaccctgtctctactaacaatacaaaaattagccgggcatggtggcatacccctgtagccccagctatttgggagtctgaggcaggaaaatcgcttgaacctgggaggtggaggttgcagtgagctgagatcgtgccactgcactccagcctggtgacagagcgagactccgtctaaaaaaaaaaaaaagagtaactgtaaatgccactattttataagccaagtaagagaagcagaaactggctgagaaattccttagggtacactacaaattaggaacagaattagaatgaaaattcataagcaccragtttccagtctgctgcttagtcactgaatctttcctc

SEQ ID NO: 719796 - DNA, 1222 bp, Homo sapiens
gttcaaaatcactttaaacatagaaaaattaccaaaaaaaatttctttatgaactatccttgaaaaatttagaatgtgacacatttagctacactaatgcatcttatgtactagctaatgctgggatcagggaaaccaaaaaacaaggtcagagtctgtctggaacagtcttcacctagatgaggtgacctcaaggagcaataaaggtggcattattatgaagtatgagacagacattggccaagataaaaatatgtgtgagaatattagaaatatatcaaagatgaagtaatttcgaagagaaaaaagataagaatctctgtgcttatgaaatcatctttgcaaaaattatgacactgagagaaatctaacataactgactccattttgcttccaacctcacaagctaactgtcctgggtggaggtcaagctaacagaaattatagtttcactttaaagcaaggatgataatagtcccttcccaaaactaagtcccttctggttggggactgaaaactgcccttgtaaaattaatgaaagaccacagggttaggattatgggaggggcctgaattctgctaaaatgttagtgtagctaaatgataaccagttattttatcctagcttgcttttctataatttcttacttctcaggagtcatgtaaccagaggtcacaagatttgtgacttccccatttgctcctatagataacatcactatcttggtctttgagttatttttcagacttttgcattctagcaacggactgaawccacccagatccatgactcataccaaggaactgattcaaccagtccagtggcccctacccagaaactgactcgcacccaagaaattttttgaccaagatccatggtttcatccccaaccaattagcagcacccatttcctagccccctgcccgccaaattatccttaaaaatcctagcctctgagttctcagggaggtgaatttgagaaatatctcccattcttcaactcagctgccttgcaatgaataaactctctctgtactgcaacaccactgtctctgtgtattggcttttctgtgcagcaggcaagaagaacccactgggctgtaacacttattgctgtcaaattatgccccatctacagacaaaatggactccctgtggctaactgagatgctcaagttaaagcaaaacttggcagccatagtaggatgaaggggcagtcac

SEQ ID NO: 719797 - DNA, 1237 bp, Homo sapiens
cgccctggcagttactaaagacagacttcttcaagatctattccaaaccacttcaaactcacctttacaagaaaggctagaaagctcaaactaaaacaaaattaaagaaagctgagattccctgttctctcctgcatccagagttctgtgtgtgtctcagcttctgccagagattggagcagcagtgagaaagtggaggtgatggcctcgatgggataactggatctttctggcgggagtggtgtctgcatttcctggagtagtccctgtagagtttctagcatctggttcccaagcaccacagaagctaagtggatccccagtatgggattctccactggagtctcagctatggttaagcatctttcctgcctacattgttcctgggcatgtagaatctaagtctgatttcgtgactcttccagagatgctgtgagctaagtctttaataaattatttattgtctaaattagcttgaatcaattcttcttttaaaatctgtagcctaaaaccatgatcaacgtaattgcttgtaacaattcctccacttctaagagctgtctaaaatgcttttctaagttttttttaattttttgagacagagtcttgctctgtcgcccaggctggagtgcagtggctcgatctcgtctcactgcaacctctgcctcccaggttcaagtgattctcttgcctcagcctccagagtagctgggatcacaggtgcctgccaccatgcccagctaatttttgtatttttagtagagacggggttttgccatgttggccaggctagtctcaaacacttgacctcaggtgatccacccccattgccctcccaaagtgttggtattacaggcgtgagccaccacgcctggcctaaaacgctatttggagcagcacagaccacacctttgtgcagagagccagcaacgaaaagatctcaacagctcattaatctgggcactttattttacagagaggaaaaccaagggccagtagtgaacagtaactctcccagagctcagtgtctagagtattgagcatttgcaaccactgtgccgggctgtgtactcagtcctgtatttgtcatctcatgtaattctttctagagtcctgaggtgtagactttatcatctctttacaggaaggaagtaaggctcagaaagcatatgtaactttcctaagaagtcaaacagatattatcaagcagagctgaaactttggcayggaactaatg

SEQ ID NO: 719798 - DNA, 632 bp, Homo sapiens
tctgtccctcctcatctctgtctcacctcccctgctccccacacctgggctttgctgggagttggggctgaggctggagcagtcctcactgagcacagaagagccaggccccaggcttgtcatcccagcctcacattccaaaactctcagccgcatcagctcactccttggtaggcctggcacaggccctctgcacgttagaataacacaaaaaaatcaagttttcaggtaactaaakttctaggccaggcttagcccctcccttgcagcaggccctcgaaaagtcagttctttccccaggatctcacgggttctgttgccatcgcatgtgccgctatgtgcatacatttccgtttctctaccagatggaaagtgccttaaagatatgggttgtgtatctcaagccttcctgctccatcccttgacctggtagagttcaatattgaagaatacagggtttggggtcagatcaatctgggtgccaattctgactctcccagttactagatgattgaccttaggtaaatctgagcctcagtttcctcatctttacaatgggtatccattaactgatttacttattcaaacaatatttatgagggccaactccatgtcaaacactgatgtgtgta

SEQ ID NO: 719799 - DNA, 632 bp, Homo sapiens
tctgtccctcctcatctctgtctcacctcccctgctccccacacctgggctttgctgggagttggggctgaggctggagcagtcctcactgagcacagaagagccaggccccaggcttgtcatcccagcctcacattccaaaactctcagccgcatcagctcactccttggtaggcctggcacaggccctctgcacgttagaataacacaaaaaaatcaagttttcaggtaactaaagttctaggccaggcttagcccctcccttgcagcaggccctcgaaaagtcagttctttccccaggrtctcacgggttctgttgccatcgcatgtgccgctatgtgcatacatttccgtttctctaccagatggaaagtgccttaaagatatgggttgtgtatctcaagccttcctgctccatcccttgacctggtagagttcaatattgaagaatacagggtttggggtcagatcaatctgggtgccaattctgactctcccagttactagatgattgaccttaggtaaatctgagcctcagtttcctcatctttacaatgggtatccattaactgatttacttattcaaacaatatttatgagggccaactccatgtcaaacactgatgtgtgta

SEQ ID NO: 719800 - DNA, 1407 bp, Homo sapiens
tcaattttatcttccagcttttgtattgaatcgttcatttttcctaacaggtttctgttactttctaagagtgctttttgtgtgttgtcttctgaatattgctttttaatagyatgctgttctaatctaacgaattcaaaatctttagatacttcctcagggttaatagcaatagattttttgatgttttttccctgtatagtctctgcttttctcaaattgcttttccccatctgctttcgtctgtctccaggctagaggcattcctcacatgtttggggatcctcgtctgtgtgtgtatggttgggattcaccacccctaggcctcagtgtggggtaactttgctgtgctgccatccagtacaatagccactagccacatgggggctattgagcacttgaaatgtggccagtgcaactgaggaactaaactttaaaattttaatttaggccaggcgtggtggctcacgcctgtaatcccagtactttgggaggctgaggcaggtggatcacgaggtcaggagctcgagaccagtctggccaataatggtgaaaccccatctctactaaaaatgcaaaaattagccaggcgtggtggcggggacctgtagtcccagcttctcaggaggctgaggcagaagaatcgcttgaacccgggaggtggaggttgcagtgaactgagattgtgccactgcactctagcctgagtgacagagcgagactctgtctcaaaaaaaaaattaattttgatcaatttacttttcaaaatatataatctattcagtatagaaaaacgtttacatattctggaacaaattgggtatctggatctactttttcaactgtagattttatgaaatctaacaacagatcaagtatttttaatgaaaattcgagatgtgctataatcataaaatacatactttttgaaatgaaaaaatgtaaatgatctcatcagtaatttcttatattgattacatgttgaaatgacattttgtacatattgggttcaaccataatattaaagttaattttacctgtttctttttagttttaaaaatgtggatactagaacatttagaattatgtatgtggcttgcagtatatttctatgggcagtactgccctagaggctagagagggtgctccagtggggatgggtggtcctccagcttggggctgggtctctgcctcataaatagacctcgagccatgttcccatttgagaccattattgggcctttgagacttctgagggggcagatcctgtggttgttggctttgtttaccatactcaccttgaatccagttgaatctttgggcttgcttgtcaaccaccaagtgatggtttgcttctaggtttctgaaagtttattgctattgactcttcacctttaatctttgtcc

SEQ ID NO: 719801 - DNA, 1407 bp, Homo sapiens
tcaattttatcttccagcttttgtattgaatcgttcatttttcctaacaggtttctgttactttctaagagtgctttttgtgtgttgtcttctgaatattgctttttaatagcatgctgttctaatctaacgaattcaaaatctttagatacttcctcagggttaatagcaatagattttttgatgttttttccctgtatagtctctgcttttctcaaattgcttttccccatctgctttcgtctgtctccaggctagaggcattcctcacatgtttggggatcctcgtctgtgtgtgtatggttgggattcaccacccctaggcctcagtgtggggtaactttgctgtgctgccatccagtacaatagccactagccacatgggggctattgagcacttgaaatgtggccagtgcaactgaggaactaaactttaaaattttaatttaggccaggcgtggtggctcacgcytgtaatcccagtactttgggaggctgaggcaggtggatcacgaggtcaggagctcgagaccagtctggccaataatggtgaaaccccatctctactaaaaatgcaaaaattagccaggcgtggtggcggggacctgtagtcccagcttctcaggaggctgaggcagaagaatcgcttgaacccgggaggtggaggttgcagtgaactgagattgtgccactgcactctagcctgagtgacagagcgagactctgtctcaaaaaaaaaattaattttgatcaatttacttttcaaaatatataatctattcagtatagaaaaacgtttacatattctggaacaaattgggtatctggatctactttttcaactgtagattttatgaaatctaacaacagatcaagtatttttaatgaaaattcgagatgtgctataatcataaaatacatactttttgaaatgaaaaaatgtaaatgatctcatcagtaatttcttatattgattacatgttgaaatgacattttgtacatattgggttcaaccataatattaaagttaattttacctgtttctttttagttttaaaaatgtggatactagaacatttagaattatgtatgtggcttgcagtatatttctatgggcagtactgccctagaggctagagagggtgctccagtggggatgggtggtcctccagcttggggctgggtctctgcctcataaatagacctcgagccatgttcccatttgagaccattattgggcctttgagacttctgagggggcagatcctgtggttgttggctttgtttaccatactcaccttgaatccagttgaatctttgggcttgcttgtcaaccaccaagtgatggtttgcttctaggtttctgaaagtttattgctattgactcttcacctttaatctttgtcc

SEQ ID NO: 719802 - DNA, 1407 bp, Homo sapiens
tcaattttatcttccagcttttgtattgaatcgttcatttttcctaacaggtttctgttactttctaagagtgctttttgtgtgttgtcttctgaatattgctttttaatagcatgctgttctaatctaacgaattcaaaatctttagatacttcctcagggttaatagcaatagattttttgatgttttttccctgtatagtctctgcttttctcaaattgcttttccccatctgctttcgtctgtctccaggctagaggcattcctcacatgtttggggatcctcgtctgtgtgtgtatggttgggattcaccacccctaggcctcagtgtggggtaactttgctgtgctgccatccagtacaatagccactagccacatgggggctattgagcacttgaaatgtggccagtgcaactgaggaactaaactttaaaattttaatttaggccaggcgtggtggctcacgcctgtaatcccagtactttgggaggctgaggcaggtggatcacgaggtcaggagctcgagaccagtctggccaataatggtgaaaccccatctctactaaaaatgcaaaaattagccaggcgtggtggcggggacctgtagtcccagcttctcaggaggctgaggcagaagaatcgcttgaacccgggaggtggaggttgcagtgaactgagattgtgccactgcactctagcctgagtgacagagcgagactctgtctcaaaaaaaamattaattttgatcaatttacttttcaaaatatataatctattcagtatagaaaaacgtttacatattctggaacaaattgggtatctggatctactttttcaactgtagattttatgaaatctaacaacagatcaagtatttttaatgaaaattcgagatgtgctataatcataaaatacatactttttgaaatgaaaaaatgtaaatgatctcatcagtaatttcttatattgattacatgttgaaatgacattttgtacatattgggttcaaccataatattaaagttaattttacctgtttctttttagttttaaaaatgtggatactagaacatttagaattatgtatgtggcttgcagtatatttctatgggcagtactgccctagaggctagagagggtgctccagtggggatgggtggtcctccagcttggggctgggtctctgcctcataaatagacctcgagccatgttcccatttgagaccattattgggcctttgagacttctgagggggcagatcctgtggttgttggctttgtttaccatactcaccttgaatccagttgaatctttgggcttgcttgtcaaccaccaagtgatggtttgcttctaggtttctgaaagtttattgctattgactcttcacctttaatctttgtcc

SEQ ID NO: 719803 - DNA, 1407 bp, Homo sapiens
tcaattttatcttccagcttttgtattgaatcgttcatttttcctaacaggtttctgttactttctaagagtgctttttgtgtgttgtcttctgaatattgctttttaatagcatgctgttctaatctaacgaattcaaaatctttagatacttcctcagggttaatagcaatagattttttgatgttttttccctgtatagtctctgcttttctcaaattgcttttccccatctgctttcgtctgtctccaggctagaggcattcctcacatgtttggggatcctcgtctgtgtgtgtatggttgggattcaccacccctaggcctcagtgtggggtaactttgctgtgctgccatccagtacaatagccactagccacatgggggctattgagcacttgaaatgtggccagtgcaactgaggaactaaactttaaaattttaatttaggccaggcgtggtggctcacgcctgtaatcccagtactttgggaggctgaggcaggtggatcacgaggtcaggagctcgagaccagtctggccaataatggtgaaaccccatctctactaaaaatgcaaaaattagccaggcgtggtggcggggacctgtagtcccagcttctcaggaggctgaggcagaagaatcgcttgaacccgggaggtggaggttgcagtgaactgagattgtgccactgcactctagcctgagtgacagagcgagactctgtctcaaaaaaaaaattaattttgatcaatttacttttcaaaatatataatctattcagtatagaaaaaygtttacatattctggaacaaattgggtatctggatctactttttcaactgtagattttatgaaatctaacaacagatcaagtatttttaatgaaaattcgagatgtgctataatcataaaatacatactttttgaaatgaaaaaatgtaaatgatctcatcagtaatttcttatattgattacatgttgaaatgacattttgtacatattgggttcaaccataatattaaagttaattttacctgtttctttttagttttaaaaatgtggatactagaacatttagaattatgtatgtggcttgcagtatatttctatgggcagtactgccctagaggctagagagggtgctccagtggggatgggtggtcctccagcttggggctgggtctctgcctcataaatagacctcgagccatgttcccatttgagaccattattgggcctttgagacttctgagggggcagatcctgtggttgttggctttgtttaccatactcaccttgaatccagttgaatctttgggcttgcttgtcaaccaccaagtgatggtttgcttctaggtttctgaaagtttattgctattgactcttcacctttaatctttgtcc

SEQ ID NO: 719804 - DNA, 1373 bp, Homo sapiens
tattttagagatatcacttcttgttatagctacaaactacctgatacatatttacattttaaaagccatataacaagctataacatttatttatatacaatgttttgttttggtttggttttgagacagtctctcactctatcacccaggctggagtgcagtagcaggatctcagctcactgtaatctccgcctccctggttcaagcaattttcatgcctcagccaccagagtagctgggattacaggtgtgcgccaccatgcccggctgatttttgtatttttagtagagatggggtttcactatgttggtcaggctggtctcgaactcctggccttaagtaatctgcctgcttcggcctctgaaagtgctgggattacaggcatgagccattgcaccaggccaatacaatgtcttttaagtatataaataagggtgaataaacattccactttcaatagacaaagaaatactggcaactccttaaaattttcttttcccttaataaatcaaacaggacaagtaagaaataaaaagatacttaacttagattaagaatttccaagttactttaacattctgagttatataatttaccataaatttaattctcattactatacctttttattattaaatttgagatatataattagttctttgatctaaattataaattagtgcagaatgaaagactgcctctggattaaactttttttggccttaaaagatgaacagcattaaactggcttttgagaattttctaaattcaattgatattctattttaaatcaatgaactgacaagtaaacagtgagttgatgagacaggttttctgacattaaactgtgaattaaatggtagagagttataccatttagaccccatgtaaacttacttttataaataatacttcatattttgttcctattctggggttaagtgctttcattttgtttgcaactccttagggataaaatttattacaacctctactatcccactccccactttttttttttttaaagaaaaggttactcagctttcaaaggtattaaaaataattcaaaacatgtaactgacagtatactaagaataaagcagtgtgctaggttctcaggttattcaaagatgaccaagattttgatacacaactttgggagcatacaatacactaggtgacagaggaaatgagacgggtacctaggtaatttcaaaacaagtyagaagatataaaaccctaagaacaataaaaagtgttttagaaattctcaggatgtagaaaatacttttaacttggaatggctaagcaaaacaaggaaagtaagcatgtgagttcggtcttaaaggttagggtagaatttggacattta

SEQ ID NO: 719805 - DNA, 1785 bp, Homo sapiens
tgaaaccagttccccatggatactgagagacagctgtgtgtgtgtgtgtgtgtgtgtgcatgtgtgtgcctgtgtgtgtgtgtaatccttaatggataatatatggaaaatatgtcaattagaaataaaatatsttactgaacaactttttttcgtcttgctatctttctctgtctagatgctgatagtcttcttagttcctatattctatttccagaattgctgaagttttatcacattttcttctgccctttattacataatttcatagtttcagaacctcttttctctctttaatatggctcatgcttggtctctctaattattacatactacacgtacaatcttcaccaaatggtgcctctttatctataaactgaggagagtcatgatacctaatctaaggtgctcagtgtaatacctcgcacctgctgatactttttaaatagtgaatgttattgttgctatgatgtacagtttcagagtttttatttgaccttgaattctgccatacgtactttatttctgccatttgatttatgaactccagttgttctttacagcccagagggtctaccctaagattgccagtgccccaccatccctatggctcactcctaagggagaacaggctgagtaaaggcagtcagattcctctgtcaggggtagtagattcagtcactcttgggttttgtgaccctctgggaacaaaattagtacatttttcaaaatgttgtccttaaaatgccaacctttttgaaaagaaagcagatattttcagatattctatctgtggtttatccatatgtatatttccccctctgcttccatagaaccaatattgagcctgctgaaaataaataccatttgttctttctgagtgtgcctgcaggaagagtcttttcagcatgaattgcatatttaagtttcctgctgctttcaatccatctaggattaaccagaatttacctgtttacagtaaatgaaagggatattggatatttgatcaaggacagtcctcaggccttatagttccttctatttgttaaattttaatgtcgtttagcctctgagagtggagaacaagtttcctcgagaccagattgctctaatttatagggaagctttttgaatgaaatggagctgcaaggctagtttttatttgttttggcttaaaatgtttgctttttttctatcacttgtttgtcacaggggatccattgaatgtgtggatttttacagatccgaaaaatctgtcgatatgagatgagttggtctgtatttgctgctactattacgatctcttctctcctgggacatcatctacaaacacagttcataaaaaggaagtgattacagtgttttaagtcatgattaggctacagataagtaaataggcccaactaccttataacagtcttattttaataaaacaatttaataaatcacatttccttctaccctttattatataatttactagtttttgatcctcttttcgcctgttaatatggctcattcttggtctctacaatccttacatactacacataaaactttcagcattttgtgcctctttatgtgtacaatgaggcaagtaattttccctaaactaaagtgctctacataatactagcctcctgttaataggtgtgtttggagtgtttgtagactcttagaaccactagtaaagcccacataatgtttactagcatgttgcttttgtgattgttattactgttgtttttaagcttatagtggtgtagaggttttctcaatctgtcg

SEQ ID NO: 719806 - DNA, 1785 bp, Homo sapiens
tgaaaccagttccccatggatactgagagacagctgtgtgtgtgtgtgtgtgtgtgtgcatgtgtgtgcctgtgtgtgtgtgtaatccttaatggataatatatggaaaatatgtcaattagaaataaaatatgttactgaacaactttttttcgtcttgctatctttctctgtctagatgctgatagtcttcttagttcctatattctatttccagaattgctgaagttttatcacattttcttctgccctttattacataatttcayagtttcagaacctcttttctctctttaatatggctcatgcttggtctctctaattattacatactacacgtacaatcttcaccaaatggtgcctctttatctataaactgaggagagtcatgatacctaatctaaggtgctcagtgtaatacctcgcacctgctgatactttttaaatagtgaatgttattgttgctatgatgtacagtttcagagtttttatttgaccttgaattctgccatacgtactttatttctgccatttgatttatgaactccagttgttctttacagcccagagggtctaccctaagattgccagtgccccaccatccctatggctcactcctaagggagaacaggctgagtaaaggcagtcagattcctctgtcaggggtagtagattcagtcactcttgggttttgtgaccctctgggaacaaaattagtacatttttcaaaatgttgtccttaaaatgccaacctttttgaaaagaaagcagatattttcagatattctatctgtggtttatccatatgtatatttccccctctgcttccatagaaccaatattgagcctgctgaaaataaataccatttgttctttctgagtgtgcctgcaggaagagtcttttcagcatgaattgcatatttaagtttcctgctgctttcaatccatctaggattaaccagaatttacctgtttacagtaaatgaaagggatattggatatttgatcaaggacagtcctcaggccttatagttccttctatttgttaaattttaatgtcgtttagcctctgagagtggagaacaagtttcctcgagaccagattgctctaatttatagggaagctttttgaatgaaatggagctgcaaggctagtttttatttgttttggcttaaaatgtttgctttttttctatcacttgtttgtcacaggggatccattgaatgtgtggatttttacagatccgaaaaatctgtcgatatgagatgagttggtctgtatttgctgctactattacgatctcttctctcctgggacatcatctacaaacacagttcataaaaaggaagtgattacagtgttttaagtcatgattaggctacagataagtaaataggcccaactaccttataacagtcttattttaataaaacaatttaataaatcacatttccttctaccctttattatataatttactagtttttgatcctcttttcgcctgttaatatggctcattcttggtctctacaatccttacatactacacataaaactttcagcattttgtgcctctttatgtgtacaatgaggcaagtaattttccctaaactaaagtgctctacataatactagcctcctgttaataggtgtgtttggagtgtttgtagactcttagaaccactagtaaagcccacataatgtttactagcatgttgcttttgtgattgttattactgttgtttttaagcttatagtggtgtagaggttttctcaatctgtcg

SEQ ID NO: 719807 - DNA, 1785 bp, Homo sapiens
tgaaaccagttccccatggatactgagagacagctgtgtgtgtgtgtgtgtgtgtgtgcatgtgtgtgcctgtgtgtgtgtgtaatccttaatggataatatatggaaaatatgtcaattagaaataaaatatgttactgaacaactttttttcgtcttgctatctttctctgtctagatgctgatagtcttcttagttcctatattctatttccagaattgctgaagttttatcacattttcttctgccctttattacataatttcatagtttcagaacctcttttctctctttaatatggctcatgcttggtctctctaattattacatactacacgtacaatcttcaccaaatggtgcctcttyatctataaactgaggagagtcatgatacctaatctaaggtgctcagtgtaatacctcgcacctgctgatactttttaaatagtgaatgttattgttgctatgatgtacagtttcagagtttttatttgaccttgaattctgccatacgtactttatttctgccatttgatttatgaactccagttgttctttacagcccagagggtctaccctaagattgccagtgccccaccatccctatggctcactcctaagggagaacaggctgagtaaaggcagtcagattcctctgtcaggggtagtagattcagtcactcttgggttttgtgaccctctgggaacaaaattagtacatttttcaaaatgttgtccttaaaatgccaacctttttgaaaagaaagcagatattttcagatattctatctgtggtttatccatatgtatatttccccctctgcttccatagaaccaatattgagcctgctgaaaataaataccatttgttctttctgagtgtgcctgcaggaagagtcttttcagcatgaattgcatatttaagtttcctgctgctttcaatccatctaggattaaccagaatttacctgtttacagtaaatgaaagggatattggatatttgatcaaggacagtcctcaggccttatagttccttctatttgttaaattttaatgtcgtttagcctctgagagtggagaacaagtttcctcgagaccagattgctctaatttatagggaagctttttgaatgaaatggagctgcaaggctagtttttatttgttttggcttaaaatgtttgctttttttctatcacttgtttgtcacaggggatccattgaatgtgtggatttttacagatccgaaaaatctgtcgatatgagatgagttggtctgtatttgctgctactattacgatctcttctctcctgggacatcatctacaaacacagttcataaaaaggaagtgattacagtgttttaagtcatgattaggctacagataagtaaataggcccaactaccttataacagtcttattttaataaaacaatttaataaatcacatttccttctaccctttattatataatttactagtttttgatcctcttttcgcctgttaatatggctcattcttggtctctacaatccttacatactacacataaaactttcagcattttgtgcctctttatgtgtacaatgaggcaagtaattttccctaaactaaagtgctctacataatactagcctcctgttaataggtgtgtttggagtgtttgtagactcttagaaccactagtaaagcccacataatgtttactagcatgttgcttttgtgattgttattactgttgtttttaagcttatagtggtgtagaggttttctcaatctgtcg

SEQ ID NO: 719808 - DNA, 648 bp, Homo sapiens
tttaataaaacaggaattttattgtaggaataattaaattcccaggaccacattcctatttttgtatggtgaacaaatcctttctgcaacagtgggagttgcagctccactaaatgaagaattcaggagagaagaattcagcccacactgaaggaactattattccatcattatttttagaatctcacattttgttaggggcaaagcttacctttccattcattaataaatataattggaagagttgttcctctgttatttttttaatggagaatcataaatccttacttcccttctgcttacacagggtagactgggaagaccctgcctaagaatctgatttaacctgtggtgcagaaaagcactaattttgatgttgggaggattttgtgcacccagcaaggagcagagcactctgctgactgcmgtaatataggtaacagaccttatttggtgcatgtgtcactaggccgcccatgtgatgagaaagatatgatgccatagagaactgatctactctaaataataaagtaagtacaatgctatggtgctgagagcaatttcaaaaggtctgtgggtggagggagagcaagcggagtttagcaagatggtaggaatatggagctgtgtatgggataatatttggta

SEQ ID NO: 719809 - DNA, 1353 bp, Homo sapiens
gaagtgtggcctaattgggggagatgtttgactcaagggggttagatccctcctgaaaagcttggtgttgtccttgtggtaatgagggagttctccctctgctagttcccttaagagctatttgttaaaacagaacctggcatctccactctctctcttgcttcctctctcactgcgtcacctctgcacacactagctcctttttcccttccaccatgagtggaagcatcctgaagccctcaccataagcagatgctggtgctgtgcytcttttacagcctgtgggagggtgagccaaattaacttttctttatacattacccagcctcaggtatctcttcatagtaacactaaacagactaagacacggaattacaaattttctccacatttatctgaattatagctatgctcttagaaacacactctagtggcttgcttttaagatcatgggcatatgtgacaatgagcagaagactgaatgtaaagagcaaatagaaggtcccccacttatgatcctgggtcatgtgcaaaggaagtcacatgttagtcctcctccaatgtgtgagttcttttccacctaggttaaatatttagtccattgaggagtgggtgttggagggctggataggtgcacatgagagctcatttctgaatcttaattcctcattaaatccatggaagaaggacaactctgttcaacttcctacttcccatttgagagcaagcacctcatctttgcactcaacgtgtagttgaaagaatgacatcaatggaaaaatgttttaagttacagaaataaaaagaaccacaatctattttacaagagaataatagagcaggatgtaggggagatccgtggttttggagtcaagtaatttttgttgtaatttcaattttctaatctatcaatggatataatagcaataatactcatatcacaacactgagatagtagataaaaacaatgtcttagatatattaattgcttagtaaaaaggtatatgattattcaagatcttctactccttttaaacaatttacgtgattcttttagttaactgaagaagtgaaatgcattatatcatgcactcaaaacaggcaatagataaccctaaaccttcaaatccattatctcctcccctacttaaaacatgttttctcatctgagatccaggtcctagtgtttcccaagacccagttcaaatagcgtcacttctactttccctcctagtcctctctctcagtcaaaattatctttccctgtctctgaattctcttagcatttgaactaaacctttcttataggacttaacatattttatgtgtctctcctactgtcatatttgagta

SEQ ID NO: 719810 - DNA, 622 bp, Homo sapiens
tatttgatgctattacaactttcttcttcatgcaacgtaattcgtaagttcacaatttcactttttattttgatcacttttgttttacattgtattattactttaatctaaattctaccacacttytttaataacttgctttataaatatcaataaaggtaatttcataacgtcctaatcaagagctttatatttttcgctattttattgaaattttaaaacatgtttataaattgtaattaaaatgatatatttgagctttctcaagcttttgaatattttcaagctcgattttatttgagttattttttcaagtctttaaaaatatatttttgaagccttaaaatatttttgactctaagttattaggcttaactgactttgaaatgagcagtccatccactattcctgttcttccagagttggggacttccagtgatgctcatttcacttttgggtcgcctttgaattatgacactagatgagttggcacattgggtggtagacacatctgtggaagccattcctaccctaggacactcatccataacctgactgtacataaaaagctatgaacccataaataaaactacatgttctcttacttagctgcattctaaaa

SEQ ID NO: 719811 - DNA, 665 bp, Homo sapiens
agttaccttgatcctttcataagctactaaaatttgtacatgtttaagagtaagataaagtacagtgaatcatcattatttagggtagttatattttataaagtcatcttgaacactgaattggtgaatccagagccattgtttttaggggaaatgcaaggtaaggttaaattctcatgagcctctctcttgtacgtattctcctgatttgagccttcatgctgaagtacccatgctcacaattttagctgtggctcactgttagaaaactgttgctgaaatgttatctatgtacatgtaaggttgtctatttttgttattaaaggttgtcaggtgacagtgtgaccgtatactataaattgtagaacttcttcttttaaatatttggcaatatgactgttttgtaaaagcaaaaaacagactcctcccaagataacatgtgctctaggattcatacagaaatatatttggtgaggccacatggtttagtagaaaraaatattgagattttcaaatctgaaggcctaattaagtttaagacccagtattaatattggttataataatgcgtgactacatacaagctaataaaactttgttcactcctatttgagcttgtgtaaataagcacaaaataattctttttttttttttttgtctgtttg

SEQ ID NO: 719812 - DNA, 672 bp, Homo sapiens
ttacaatatccctctgaagtagatgtcaagataatagctaatatttactgagcgcagttgagaggctctgagctaaagttcttactttatatatatatttatataatattattaatcctcacaataactttatggggtatataatattattgtttctattctacagattaaaaaaatgagttctggagagtttatataactttcccaaagtatcttgcctaaagaacctgtgttattatccccattttagataggagagttagaactccaagagctcagttgacttgccaggatcacacacacacagggcagggctgaaaattgtggcttcatgggccacagctcaacccaccttccaacttccaccagttttctagtgcccgctaaccctgtttctcactaattggtactaaaccaagtgtgccagagtcaaggctgttgcccagcatggaaattaccccgcttttgttctcaaaaaaatcagaatccctgtcctayggacatggacagtaaattgttggggcattggattgagagagaaatggggctcttcccaggggtgataggggcaggactggggagaaacccacaaaccccagggttgcctggtagtcccagcagtgaatgagagagctggggaaagacgggcagggcttcaatgggcttcgatgg

SEQ ID NO: 719813 - DNA, 615 bp, Homo sapiens
tgcatcatgtggttaagaccacaaactatggagccagacggatagctatgatcttgggtaccttacttagtttccgtgtstcttttctcatttgtaaagtggagataattaaagtttctcccttataccactcttgtgaggttggaatgagttgctacactaaagttagctctatgcaaggttcctactcagcttgatgtaatcattagctattagtattattttgtctcctcgctcctgtttgcatatcttaccacctaggcttttagattatctttctttcctctttcactttcaaggttttctgtggtcccaacactctctttgaccttgaatgctgacttaaatccgacaatcatgaatcaactttagctgatttttgaacaggggacataagcccaggctcaattcccaggatccttattccttgcttatataagaaaggcatttagaaaagttaactcctggccaggcacagtggctcatgcctgtaatcccggcactttgggaggccgaggcaggcagatcatgaggtcaggagagcgagaccatcctggccaacatggtgaaatcccgtctctactaaaaacacagaaaaattagccaggcgtggta

SEQ ID NO: 719814 - DNA, 594 bp, Homo sapiens
gtttgtaagcacctaagcccttggattaaatcttttcctactaaaatacctagaggaattttcacaccaaagcccaactgatatacctttaaaaagccacttctccttctgargttaccacctctctttttttcagtcaaacaacactgccattattacatgctaggaacgtaaagattaactatttggttatgctttgcctacctgaaacaaaagggctatttatcatttttgtttgtcatttcacctcactacattcctttaatacagtgtactccaacaacttcttctgggaattgtgtcatcaacaggctacatatgccatgtttctaaagggggagaattaatctattgtgtttgtaatttctgcatgggggaggttcctaagatgacattgtcaattccaccaacctatgggctaccaacctatgtcaattctaccaacctatgggctctgtgaatgttactgacaatgatacaacttgaatgatcactaagtcaccacagagcgcagtacaaacaggatataaaacagaaattttggccagagtggtcttaatcccatgtctcactaggaaagaataggggagtctg

SEQ ID NO: 719815 - DNA, 1324 bp, Homo sapiens
attgtataccttacagacagatcatcaatatatgaaggagcaggacatcactctccaggggcagccatgggaagggcttcaaatctctctaactaaattggcaataaagggtttgagaagtagcatagggtatgaaagttgtaacttttggtgaaatgagtagtgctagaacacatgaggctagagagactgaatgagaacttctgccctcaatgagcaatgtgtaaggatacggtgagcccagtagtttaactttggagaaatatcctaggttagaataatctatatgttcctatgtcccttcttcttgccacgtgctgtcatttggacatttgtctgtctcaaacctcatgttgaaatctgttccccagtgttgaagatggggcctaatgggaggtgtttgggtcacattcctcatgaatgacatggtgctatcttcatggcaatgagtgagtgttcactctgtgagttcccacaagagcaggttgttagaagccctgacatctcccctctccgttgctttctctctcactttgtgatctctgcactggctgactcctcttcatcttccgtcaaagtagctgrggctttcaccacatgcctgatcttttcaccagcaaaatcaagagccaaataaacttctgttttgttaattagcctcagatgttcctttatagcaacacaaatggactaagacatcatcaaattcaaccaaaaggccaattgatccagctttgagaatattggttcatctgcttcaatgtgaaactatcttgcaaggtgcttcaccaagtgagtacttcacggagtttctagaaactggctattgcttcttgagtctgtcttcctacaacacttgtacatgtggcatagtctctttgggactggttgtcattaaccattctctctggtagttaggttgtaaggaaagaggtaagctactccttgcatgtaattgttggggaaaattagatataatcccaaagaacatgacatgcaagtgggtgaagtaaggttgaaacaggaacagcctcccttgtgggataccacctaaacacactagctgtatcatgccaccatcctgttaaataatacatttaagacaaggtaaaatcatgaatttaccaattaaactgatataaaatgaaggcatgttaaagattgtatttaatccattattaacgaggtgattgggaagctgttacaagttcaaaggagaagtcaaagaagcatacatttatatagagcaagggaattttgaagtgaatttacaaatagatgcagggatgggaagagaagtcaatagatctcccactggacagaa

SEQ ID NO: 719816 - DNA, 564 bp, Homo sapiens
tggaacktgttgtctgctatgtatagtattaatacagataatgagggctttctccagtggacataacctgcttacagcctgcgctgattctatatacacattgggatgcttctggaaaaggatgctgggattagagacagagtctgtacaacagacttttccccaatggacagccacatgggtcaagtaaggatcaattctctatttgctctttaacagaattttctagaccaactgcagctagaagttttaaaggtggcgtgcagaaccagtccaatctgtccaatattttttgtgtaagacacatagaacgttcatgcaagaactttctttagccaaattctccactataaattaatccatcttccactttactaaaacctaatgagggaaccaatgcaagtctaaagactcagaggaaaagaaatcagaagacaactagagatgtagaattaaaaagaaataattgtcagaatgtagaccaaaggaaaaagaaagatactaaaaatgataagataggcactgataagacctgtgtttctgcttttaagcagggaaagaaga

SEQ ID NO: 719817 - DNA, 644 bp, Homo sapiens
ttcagtatgtctcaagctgaactgattctttcctgccaaatcagttatcttctaactttctattaaactcctcatgattcttcattggaagcttccccataatggcttctacaacatattttgttttttaaaaattaatttaaattttgagtatataattaattcactttyaacagtaaaaggtttttctctcttctttatctgttagctccctgtatgatagtgtacacaaacactactataaatttcttataggttatctttttaaagatacatatgtatacacaaaaatgcatacttaggttagtctaaaataagttatgttccaggatctaccttatttttaaaaatacatattttttcaagagacagagactcactgtgttgcccaaatgaaatgcagtggctattcacaggcttgatcccactactgatcagcctgggtgtttggatctgctccacttctgacctaggctaattcacacccctaggcaagctggtggtcccccactccaagaggtcactatattgataccaaacttattgtggataacccaattagtatagcaaactgcagcccagagctctagggctcaaaaaatcctcccgccccagactcccaagtagcagggactctaagcacc

SEQ ID NO: 719818 - DNA, 1286 bp, Homo sapiens
aagacaggagtcctctagtccaacccttggatgctgcgtccccatcagatgggggcttgagacccttcccgcataccccagggatgaggagctcatcgcccagcacagcctattcctctgttcaacagctctgactgtgagaaccttcttctgcacactgagctgaaacagggtgcatatggagtactgctrgccccagttccactgtccgggggcagagccagcaggttggcttagcagtgtgctcagtgaggggagcctgggctccaattccaccttctcggggaagagcccagcaggccggctttgcagtatgctcggtgaggggagcctgggcccaaattcctgccttccagagtcagagcccagcaggccagctttacagtgtgctcagtgaggggagcatggagtccctataatagtgtgacccagtaaccagaaacgcaagactgcagaccactaggcaggccactcccttaacacaaatacatgccaacaccacaagagtcctgaatagctaccctggggcttccacccagctcagctccaagcatggcttttctcttctgtaaaatggggatgaaaataccaacgcatggggttggtgggaagatcaaattgagaaagcacccccatgacatgtccagtgttcacaacggtccgcttatggacaaggggatggaggtggaggaggccctgctaaggggctctgagcaaggaaaacggtgggagagaatcatgcctgcagacacttcaggggctgcacgtggagctctgattatcatcatctttgctccccacagtctctcctgtaagtccaccacgttcaaatgtggaagaagagttgaatgtgtggtaatttcaagggcagaaagtgtccttaggcttctgtaagttacctgctcgggcaggtgcacacacaggaccgagtgcaggatttgcagggctccgtgcagatgagaacacagggaccctcgttcatgcatgggcctgccagctgctggccactggctttctctcccgccagctgctggcaacatggccagacccagctgcgtgggccctggggatgtcaaggcaggtgtctgcctttccagggcctgctgcaggtgggcatccctaagggtggcaagggggaagggaaagctctcaataaatctgtgcccaaagttttgctttttccactctaaaagaagctatcagtacctactatgtgcaacggagcccttgaccttgaagcctcacagccaagtttagatattaaccaggaaagccagggatccagt

SEQ ID NO: 719819 - DNA, 1286 bp, Homo sapiens
aagacaggagtcctctagtccaacccttggatgctgcgtccccatcagatgggggcttgagacccttcccgcataccccagggatgaggagctcatcgcccagcacagcctattcctctgttcaacagctctgactgtgagaaccttcttctgcacactgagctgaaacagggtgcatatggagtactgctggccccagttccactgtccgggggcagagccagcaggttggcttagcagtgtgctcagtgaggggagcctgggctccaattccaccttctcggggaagagcccagcaggccggctttgcagtatgctcggtgaggggagcctgggcccaaattcctgccttccagagtcagagcccagcaggccagctttacagtgtgctcagtgaggggagcatggagtccctataatagtgtgacccagtaaccagaaacgcaagactgcagaccactaggcaggccrctcccttaacacaaatacatgccaacaccacaagagtcctgaatagctaccctggggcttccacccagctcagctccaagcatggcttttctcttctgtaaaatggggatgaaaataccaacgcatggggttggtgggaagatcaaattgagaaagcacccccatgacatgtccagtgttcacaacggtccgcttatggacaaggggatggaggtggaggaggccctgctaaggggctctgagcaaggaaaacggtgggagagaatcatgcctgcagacacttcaggggctgcacgtggagctctgattatcatcatctttgctccccacagtctctcctgtaagtccaccacgttcaaatgtggaagaagagttgaatgtgtggtaatttcaagggcagaaagtgtccttaggcttctgtaagttacctgctcgggcaggtgcacacacaggaccgagtgcaggatttgcagggctccgtgcagatgagaacacagggaccctcgttcatgcatgggcctgccagctgctggccactggctttctctcccgccagctgctggcaacatggccagacccagctgcgtgggccctggggatgtcaaggcaggtgtctgcctttccagggcctgctgcaggtgggcatccctaagggtggcaagggggaagggaaagctctcaataaatctgtgcccaaagttttgctttttccactctaaaagaagctatcagtacctactatgtgcaacggagcccttgaccttgaagcctcacagccaagtttagatattaaccaggaaagccagggatccagt

SEQ ID NO: 719820 - DNA, 656 bp, Homo sapiens
ttgggagactgaggcaggagaattgcttaaacccagaaggtggagattgcagtgagccaagattgcgccattgcactccagcctaggtgacagagcaagactccatctaaaaaaaaaaaaaaaaagaaaagaaaagaatgtgtcccacagttcatatccatgaaatgtgagttttcttttcactaatcctggggtcatctcatgaccccacctaatagacagtcctggtgacaatctgagtaggttacatgactttactctttagaatgctactgacatggaaatatttgacttcaggaatcctgcctgaactactaggaaatcattgctctatcctggggatccatggccctccaaattttcattacatccttcggtggcaagttartaagtttctgcttaactgcttttctagaagtcaaactttcctcagggtttaaaggcggtttgtgagttttagccatttccctcattcctgttgtggtttggcagtgcatttatgattcttcataaaaaatatgagttttaacttggcccagaacatgtggatccatctttacttaattacatagaaactaaatgataaatcactgcaataaattttatgcatcatataatatgaagctgtatttggtgaggtatgtgtgcgcttatgt

SEQ ID NO: 719821 - DNA, 618 bp, Homo sapiens
ttccatctatcattttgcattgtagcctaaaaaagtaataaagaaatatagatttcaggtaattttttttttttgagatggagtcttgctttgtcacacaggctggagtgcagtggcgcaatctcggctcactgcaacctctgcctcctgggttcaagcgattctcctgcctcagcctcctaagtagctgggattacaggtgcctggcaccatgcctggctaattttcatatttttagtagagacagggtttcgacatgttggccaggctggtctcaaactcattttcaggtaaattttaaagacatatctactctaagaatcctcttgctccttttctagttataaaaggatgtttttctctttaatacaaaattattttgtttttctctatcawtagatatttagctgataagcgtccaccagtggaattcctgaatctgtatacaactggtatccttgccaacagtgaatgcaagacttccagatcacttacaaatcaggctcttttaaaagatcttcctcattgtcttttctggaaacatttaaaaaccagtttaatcagaaccaaagacagttttattttctactgaaagaaaattaacatttcttatcaatg

SEQ ID NO: 719822 - DNA, 1503 bp, Homo sapiens
actcatcattatcaccatcacacagcagctggaaccagcagcctcaccaggcctttctcctttaataatgacaaacatggtgtgcagtctgggccacttaatcctgttctgcagatggggactctgagacataaagaggtaaagatcatgcaggtgacaaagctagctgaagattagtattatgagatatgagaatagtaactgaagggttgatttgtaaatgtgaaaaattggaaatcagccttgatttccaacaatagggtattgatgtgtaatacaaccacacagtagggtattgtatagcgactaagaatgatacagcagtatttgttgacmtgggaacatttttcacaatatgctttaaaaaaagatagataagtgcttattaataatataggtacagggactcaagtcaaagtggggatatattctaaactctggcgaccaatttcctaaaccatgtagtttttgctatagaaaacatctagctgtgggtctacttgtaatactcagtatattaccttatttcatatgccatttattttttctttatgaaaatggtgtcattcatctttattaatgtagttgaaattcataaactttctgtgtgaatcatttaatcaagaaaaatgtgttacggggatagattttatataaatgagaatgaaatgaaatgtttcattaaaatatgtaaaagttgcccagtatatcttaaggagaaatcgtatgtgtataatattattgtatttttgtaagataaaacaaatgttgtaagaccttaaaaatattgttaggagaaaaaaatacacgtatgcatagaaaaatgtctagaaggataaatgctaaaatgttcatcctggacctctgcaagatggggctatgggtgattttttaccccttcctttattgttcacctgtattttctaatttttcaataacgttcatgtgttacttatttagaaaagacaggagatgaatgtttaaagtgatggatatggtaattaccctgacttgatcatgatacaatgtatatatgcattgaaacatcacactgtaccccataaacatgtatggctattatgtattagttataaataaaatattaataagaaataaaaagataaggggggtactgggctgggagtaaggagactgcattctgacagcaactctgcctctaactgactgtgtgatcctgggcaagtcctttcctttctggttttcgagtcttcatctgtaacacgaggggttgttagcagacaggaagttccgcgagagctgggaccatgtctgttttgttctggcagtgtctgtagcacaggctatgctctgtgtatactacattaacgagtgtgtgcatgagtgaatggaattagcggctgtgatcattgggagagttttggagacatggcctgctgcagtggtcctccagtgtgttccagaagcagaagcccgggaggttgtaaggctttttctggatgctttggaaaaatcacggggcag

SEQ ID NO: 719823 - DNA, 733 bp, Homo sapiens
gcaaggaggtttcttccatggcttagggtcttatttccttccgtactggtccccacctcccagcccccatatcacatgggcatctcgcctttgctggcctggtggccccttctggttaaacttctctggcagctggccgaggtgcaacctcctgtatctggacatgagcgggctttgtcctcgcccctatcacagccagccaacagctagccagacagcctggtaaatagggcagtggaaattcagctgatgagtggagggtttccaatataaatttcccttttcccaccacaattttatagaactttgcaaagatgcacatcagcacttttgcaagttggctgtcttctgaaaagcatcaagcttgtcaaagctttaactttttatgttgttatttcaaatggtttgatcaattatcaagcacatgatgtccctgtaaccctatcctaggccataagaagagggtttgaataccagggttttagaaaagtctgtttgccacatcaaggagagttttatgtaacccttagtacattttctctttatcctgacatctcattgctatttttttttttttttttttttagtatattggagtacatttaaattctggctatacaagccaacatttctgtaaatcatctttctgccctctgttaataagtgaatctmcagcagagaggactggcttggttagctgacaactcctatgtaatgggactgaagtaagaaa

SEQ ID NO: 719824 - DNA, 676 bp, Homo sapiens
tgatgccccaaaggctaagtctgggaggaagtgaagtctttgagatactgctattgtttatgtgatcactggtgacagaaaccartgattctgacttagggtccatctcaagagaaaatcattcctagagatgcaggctttcatttttgtcagatgactgtggttgattttcccttgatagtctttaacaaaatcctcataaatcaaagatagcaaggaatcataatttctttaggcagttaataacaaacagctaggtttccagatcaaatatgaatggaaattacatctctagaagaaattcacttattccaaatgcgagctttcccaggtttatgttagtctggacaatcttaagcccttttacaagggctacaatcaacatttttgcctgggaatagctcttattaaatgggctttgtcaattacttaatgtttttaaaagttaaaacaccggttttagctttctcctatttcaatatctcatattcaatatgaaaacacagttcacataaagctccgttacctaaatgccttcacgtgtgtatttacgaagtaacagcacaaccgctggttggtttgctttatggttcttgaaaagctggataggaatggccggtatgtgccctaaaccgcactaggccctctggacaggtaagacattggccgctggaaa

SEQ ID NO: 719825 - DNA, 646 bp, Homo sapiens
ggaggctgatgcaagagaatcgcttgagcccaagagtttgaggctgcagtgagctatgattacatcactgcactccagcctgggtgacagagcgagactctgtctctaccacaaacaaacaaacaagcaaacaaacaacaaccccaaagcatggtgtctctttgtcctggaggaataggtgtttatcaccagggagtagttcatcaaaacaaggtccagatggccagaggctggggtatgggtgtcagtggggacaaagctcatttttgagaattaggccacatgattagagaagaattgactgacatccaaatgctcagaatatgaaagtagagctccttaattctccccatttaaaggcaagagtctctcaaatgtccgagagggactgaactttctcctggtaccaggaggctccaggagggctgggtgggcagggatgaaggaaagcccgtatcatcactggctgtgccctgcctcaaggtgtaccagatgagacctcaagggccctcagacctctgtattcyagaagtagtctgtttgacagtgaaggaaggaactggacaaagattccgctggagccactggtctgttaccttgtgctgtgagacaggggtccccacctctgggctgtggacagatacca

SEQ ID NO: 719826 - DNA, 1292 bp, Homo sapiens
aaaaatacaaaaattagctgggcctggtggccggcacctatagtcccagctactcgggagtctgaggcagagaatcacttgaaatcaggaggcggaaggttgtagtgagctgagatcacaccagtgcactccagcctgggtaacagagtaagactctgtctcaaataaataaataaataataatagaaataaagtgcacaataaatgtaatgcacttgaatcacctcaaaaccattcctgccaacccagtctgtggaaaaattgtcttccacgaaactgcttcctggtgccaaaaaaaaaggttggggactgctgctgtgcagtattgaccaagactggcattatcttcctgtcttcagtactcctgataacatgtgacatgcaggaaagccatgccagagactcatagtgagaatctaatcctctctgcaaccatccatggaataatggccttccacaaaactggtccctggtgccaaaatgtttggcgaccactgctgtaagaggacttaaagaagatggtcttctgaaggctcccagaaaagaaaagaggagaccttcttcaaaagctcaccatctctctcttttctccagattccctgacaccttttgggcgtggagaaggggtgtagggagtgtgcatgtgtgcatgcacacatgtgtgtgtttgtgagcatgggcacgtgcctgtgaacgtgtgctttcctgctggtccatgtctaatactcttcttgttgtgagaagaccatagcggccgtggcaacagcagggactgacattgttgagaaacatggaaggtgtgtgaattgtccatttcacactgctcctttcatgctgaccccctccctggtgataatgaaacaagaggaggatgggaatattgtgttttttgttcctgccactttctagggcagctggttgctatgcaatcttgtgaaaactgtcgtctgcaagtgagagctacctgaccacggtgccggatgctcctctatccacaggggtgtttgtttatttcacctttcaccacatcaagacctagttagattgagccaattcctccagtcttaactggggcatgggagctttggacaatgcctcccataaagtagacatccaggaaacatttattaaggatagtgatggtggtgagcatgaacaaattcttggaaacagagtggcrgtgaagactcagttgatacatctctgcccatcagatttaaataggaagaattaaactgatggattatattagtatttggaggtttcttttttaaattttttaaattttattt

SEQ ID NO: 719827 - DNA, 2431 bp, Homo sapiens
ccttgcttctgagagagcatagttgcaaagacacagaaaagaatgcaaaaaactctccatttggaggcagttgacaagcagggcactgacactgcccttcactgacatcctccctctaccctaatcatccccctttcccagcatccctgaaaaagcagagtgacagccaagtgtgtggttaaccaaaagacaaagaagccagaaggagcagtgaaattgcttgggttcagtttcaaagaactgttaaaaaaaactatatatatcatatttagaataaagccaaatggagagttagaagataaaaataaacaaaaggacttgttttagtccttataagtccttttcaatatgtgcatttgtgatttcagcaacatttcatccacagttggatagatttcttatttgttcttctactaaatttgtatgcaggaccatctcgtgaacaaaactaaataaatctctgtatgtataatgtagaaattggtgataagtttctacttgtacattttaaatataaaaagtatatttgtattgttaacatcttcccttaggaaattttgttctattttagccctaagtaaaataggctccagcaataagctgcatttttttttatcataacctaaacaatattttaggtgttaaactctcttacaaatgctatttttgtttacacactatayatgtcattaagtatctaagtccagaattaaaatatgagaatgctactctcatgtggcaccatgaatctctctttaatagcacttagcagtaccagatttcaattgatttttaaatttctaattctaattaaagatggcagagtaaccgcctgtgtgtatcttctctctttcctaagaccccactaaaaccaaagaaaaggaaaacataagatctgaactcagaagagcaaagtacagaagtggacacatcagctgttgacagacatttaatagccttttggaggatggaaagcaggtggattaggagtgactgactgagacaggcagaagtggataccgaggggaagagattcagtatcccctcactttaaaggacctcaataggtgcttcaatgcatggggctgacagcaagaggctaagctgaccatcagtgtactcaaaaataagtccattagtcaccattcccatccatattcagagagtccatgcttccataaaaaaggtacaatgctgggagaaagtctccaatatgaaagagaccaaaataaataaacagaaaagatagaactagagaatggagaaacaatgacaaggaacagaaaagcacctaaacataccaataatagtagtactactcaaaaaggagagaaagagaaggagaaagagataatgattagcacttacaatatgccaggtacctaaagtttatatgtacttcctcatgagttttatatatgtgagatcaaatagagaatgaatacactcacctgcacacataaacacacatatataatctcattaagtctttgataatagggacagtaagggaacaagacaaagtttcataaggtcatcgtcaaatactcttaaaaaaaaataccacacatcaaatccaggtaataaggatcctcaaacaatgctgttaacctttctgctatgatacttctcagagagacatatgtacagataatacaaatgctatgataaaaaaatcaatcagacaataatacaaaagcattcttaaattttttaatagctaaaatcaatttttcctaaaaaaaaaactcagaaaattccaaaagcaaagataaagagatgaaaattatgaaagcaaacagaaaatacttagagaaacaatccagatgtccccgaatcctatttcagagataaagaacaactacaaaaagcagagtaaagataccaccaaagaaagaatacatatccaagatcagaaagacttgaattcagttagtgcccagaaacacgggatgaagagcagacctacaccaaggtgtttcctcatggaattcaaattttttgggataacaaaaagaaaattgtgagagctttgaaaagccaagggaaacaaatattaacatgtggaaaaacaaataaaacaattttattatacttatcaaaagtaacactgtatgctaaaaaccaatggactcatgcttttaaaagtctgaaaaagatttccacacccaacaaaactatcaataaagcatgagacttagcaaatatatcagatcctgcctaaaaacgtttatttttttgttttgaatattttatttatttcaatagcttttggagtacaaatggtttttggttacatggatgaattgtatagtggtgaagtctaagattttagtgcacctgtcacccaagtactgtactcaaaacttttattttcattaacacaattatttaataatttaccagaggatatgctatagcaaaataaaag

SEQ ID NO: 719828 - DNA, 794 bp, Homo sapiens
ttttattttattgcgcagtctatttttacatttgtttcaagagcatttgtaattgcttcctggagcatttttatgatagctgttttaaaatttttatctaaacaccccaacatctgtgtcatctcagtttggcatctgtcaatcacatttttatatgattttggattgtcctatttcttaatataatgagtaattttgggctgtattctagatattttgaatattatgttgtcagactgattcctatgtaaagctattttggcagctcgtcaaccatgtaagttcaaaatgcacgtccagctcacttttgtggctcatgattcaaatgtcaatstagttaagtctgcagttctgctgttgaggttagtgacacttgtgtaccaacctagatgacaggagtataccctatcgtctctagcaatggctagagtggggaaggcaggggcactcattactgcaggggatagaagacagagttccatgcactgacacagctggggatggggagtcatcttgttccgcagaggagatggatttacaattctgcccaccagctccagagagcaagggtgcttcctcatatctgtggtgtcatgggaggtgagtaacaggaaggtggaagtcagagttgacctacaggctctacgtaggaaggatacagcctcacatgcagagcaaagagatggaagaaagaaagggttccacccacaagtgctactgctgcaacacctgttgtggcggagggtaggtgtagtttttttcatggtgtttacctcaagaacagatagatgttc

SEQ ID NO: 719829 - DNA, 1090 bp, Homo sapiens
gtttccatgactttgctatttattactagtgctgtgataaacatatgagtgcaggtgtctttttgatataacagtctcttttccaggggtgggattgctggattcagtggttgatttttagttctttgaraaatctccatactgttttccatagaggttgtactaatttaccttcacagcaacagtgtataagcattcccttttctctgcgttctcaccaacatctgttgcttttaaaatttttaataaaaaaatgaaatattttgtagagtatatgcctgattggattccttcaatttaccaaccgtaaatttaatagcaatctttgaactcagtgtactactctgtattgagttttattttgtccatctttggaggaagaaacagtgtcacaaatattatttggcctttgttttccagcttccattgtgattcagaaatggtggtgtcacatgaatccgtgtttggaaggagaggattgtaaagtgctgccagattactcaggttggtcctgtagcagtggcaataaagtcaaaactacgaaggcaagtatagacaaaatgcaactacaatttacaagttatcaactgtggggctttctccccttgattttattctgccatcaagaacacattattatgtgttaataaacctgcttgggcagtgctaccttacggatttggcctttttgaaaagcgcatttcccggcatcattctgtgtgtcagattttatagaacagtgatttggtgggagaattcattattttaggcagggctactaaattcatttcagcttcttcacaagcccgatttaaagtaaaggtttcagagtcgacaggccaatgtatcaaaacaccatgacaagaatccacatccagatgatttactcaagtagaaatacctattgctttaaaggagatttaatggttggagattcttattcaagacttagaagccaacgcttttctccccaagtggtcgtcttttcaattctcactgttgctgaagaacaccattgtctacccagtcctccagccagaaacctaccttcttcctatgttcagttggttacattgtccttaggattttt

SEQ ID NO: 719830 - DNA, 1090 bp, Homo sapiens
gtttccatgactttgctatttattactagtgctgtgataaacatatgagtgcaggtgtctttttgatataacagtctcttttccaggggtgggattgctggattcagtggttgatttttagttctttgagaaatctccatactgttttccatagaggttgtactaatttaccttcacagcaacagtgtataagcattcccttttctctgcgttctcaccaacatctgttgcttttaaaatttttaataaaaaaatgaaatattttgtagagtatatgcctgattggattccttcaatttaccaacmgtaaatttaatagcaatctttgaactcagtgtactactctgtattgagttttattttgtccatctttggaggaagaaacagtgtcacaaatattatttggcctttgttttccagcttccattgtgattcagaaatggtggtgtcacatgaatccgtgtttggaaggagaggattgtaaagtgctgccagattactcaggttggtcctgtagcagtggcaataaagtcaaaactacgaaggcaagtatagacaaaatgcaactacaatttacaagttatcaactgtggggctttctccccttgattttattctgccatcaagaacacattattatgtgttaataaacctgcttgggcagtgctaccttacggatttggcctttttgaaaagcgcatttcccggcatcattctgtgtgtcagattttatagaacagtgatttggtgggagaattcattattttaggcagggctactaaattcatttcagcttcttcacaagcccgatttaaagtaaaggtttcagagtcgacaggccaatgtatcaaaacaccatgacaagaatccacatccagatgatttactcaagtagaaatacctattgctttaaaggagatttaatggttggagattcttattcaagacttagaagccaacgcttttctccccaagtggtcgtcttttcaattctcactgttgctgaagaacaccattgtctacccagtcctccagccagaaacctaccttcttcctatgttcagttggttacattgtccttaggattttt

SEQ ID NO: 719831 - DNA, 1920 bp, Homo sapiens
tttagataaatattttatgttagttactctaggaatggtgtggaggggggctttgctggaactagaatttaataagcagctattatatgccaggttcttataatctcattgaatcctcacaataatcttagacttcattatctccaatacatggctgaggaatagagacttagagaaattaagtgattcagcaagattacacagttggtaagtataatagtaagacaggaattaaaatgctgcctggtatgcaaaccccaatttttccaactatatcaccatgttgcacaaaatccaaaatgaaacgtaaacaacccatgcttcatgactaatacatggatgctcttataaattaagatagaagtcagtgttgatataagaggaatatgtaaaatggggccaacattactatacacactaccctatacagcaaataacatagagaaaccccaaatactttcactattgagttcatatcccatggctctttgtaaagagaaactacttactcttaaattacagtgtccatctttgtcaacatcattactacttgaagtgatgttttcatgctattcttccttttctatctgcttattatttatttatttatttatttattggcgtgtgtgaggagtggggagctgtctagcggagaaaccaaactagtaatcaaatgtctcaaactacattaccaggtcattaagcctaagttggaagtattaggctttatcagctgctattgtacacatgaggcacattatataaccaatcaaatgctattaagtcactttgaaggacatcactattttctcaaaatcaaactaccctctaagcaagttggttagaaaaaaaatagtcttcagagtgttatagctggaactatgtagagcaagaatacatctttgcattgtttgttttgtgtctgtatgcccacttcagggattcaatattcccactttatagatgagaaaacttagggtcatgaaaaggaacgacaagtacactttcacggagtgtrtgaatctcagacttggggcccttgcatccaaatctgttgattcatatcacttaatcctttctctttatgctttagaaagataaaaacaataatttagagtgtattttcaaagatcaaagcatttataaatcaacaaggcaatagaggaagccattttttccatgtttttacaaggatattgtagatcttttaactttctaagatagcaaaaaataaaagcctgtggttctcattatccccaatgctaataactaaatataaacatattaataacacagtgtgctggagacatgaacagaactacctagattctgccacaacagtgttctccaaagtgggttctggggaacactaatcccataagatattcttttattgttcctataagtttgtgaaacactgaatattttattctcttcatgcagacttctaacctctctgacatataaaagttttgatacatcttgcaatgcaaaagacctgtttaaccttatttaaatcagagtttttctaaataataaaaattaaaaaaaagggatagttgaatctcagtgattgtgagcccagaaaattttatagcatttctagattcaactccaacagaatacttaaatcaaaagtgaaaccatctttgacaaacctgacaaaaacaagaaatggggaaaggattccctatttaataaatggtgctgggaaaactggctagccatatgtagaaagctgaaactggatcccttccttacaccttatacaaaaattaagtcaagatggattaaagacttacatgttagaactaaaaccataaaaaccctaaaagaaaacctaggcaataccattcaggacataggcatgggcaaggacttcatgtctaaaacaccaaaagcaatggcaacagaagccaa

SEQ ID NO: 719832 - DNA, 1920 bp, Homo sapiens
tttagataaatattttatgttagttactctaggaatggtgtggaggggggctttgctggaactagaatttaataagcagctattatatgccaggttcttataatctcattgaatcctcacaataatcttagacttcattatctccaatacatggctgaggaatagagacttagagaaattaagtgattcagcaagattacacagttggtaagtataatagtaagacaggaattaaaatgctgcctggtatgcaaaccccaatttttccaactatatcaccatgttgcacaaaatccaaaatgaaacgtaaacaacccatgcttcatgactaatacatggatgctcttataaattaagatagaagtcagtgttgatataagaggaatatgtaaaatggggccaacattactatacacactaccctatacagcaaataacatagagaaaccccaaatactttcactattgagttcatatcccatggctctttgtaaagagaaactacttactcttaaattacagtgtccatctttgtcaacatcattactacttgaagtgatgttttcatgctattcttccttttctatctgcttattatttatttatttatttatttattggcgtgtgtgaggagtggggagctgtctagcggagaaaccaaactagtaatcaaatgtctcaaactacattaccaggtcattaagcctaagttggaagtattaggctttatcagctgctattgtacacatgaggcacattatataaccaatcaaatgctattaagtcactttgaaggacatcactattttctcaaaatcaaactaccctctaagcaagttggttagaaaaaaaatagtcttcagagtgttatagctggaactatgtagagcaagaatacatctttgcattgtttgttttgtgtctgtatgcccacttcagggattcaatattcccactttatagatgagaaaacttagggtcatgaaaaggaacgacaagtacactttcacggagtgtgtgaatctcagacttggggcccytgcatccaaatctgttgattcatatcacttaatcctttctctttatgctttagaaagataaaaacaataatttagagtgtattttcaaagatcaaagcatttataaatcaacaaggcaatagaggaagccattttttccatgtttttacaaggatattgtagatcttttaactttctaagatagcaaaaaataaaagcctgtggttctcattatccccaatgctaataactaaatataaacatattaataacacagtgtgctggagacatgaacagaactacctagattctgccacaacagtgttctccaaagtgggttctggggaacactaatcccataagatattcttttattgttcctataagtttgtgaaacactgaatattttattctcttcatgcagacttctaacctctctgacatataaaagttttgatacatcttgcaatgcaaaagacctgtttaaccttatttaaatcagagtttttctaaataataaaaattaaaaaaaagggatagttgaatctcagtgattgtgagcccagaaaattttatagcatttctagattcaactccaacagaatacttaaatcaaaagtgaaaccatctttgacaaacctgacaaaaacaagaaatggggaaaggattccctatttaataaatggtgctgggaaaactggctagccatatgtagaaagctgaaactggatcccttccttacaccttatacaaaaattaagtcaagatggattaaagacttacatgttagaactaaaaccataaaaaccctaaaagaaaacctaggcaataccattcaggacataggcatgggcaaggacttcatgtctaaaacaccaaaagcaatggcaacagaagccaa

SEQ ID NO: 719833 - DNA, 1020 bp, Homo sapiens
ttggtgttgaggccttacataaactttcctgttcaacaactcaatccctgtcagcacaggctgctatccctctaggcatcaaagcacttggcatgtttttagagagtaatttcaaggtagttattgtaattgttgctaataaacacactacattgggcacaagctggactaggaaagagtgtcataaaaagaaatctgtaacgataagggattgtaaattgctaacgaatatcctaacaaaataaagcttttattaaaattaakaatctctttctcttatgaaagaactgggaaggattattttagctttacttggcataggctcttcatgataagaggagtgtatatatatgaattttgagggcagcatccagagcttggaaaaggtccagagaagagcaaatgcaattatcaataggttagaaaattggccctttaacaaaaggttaaaggagttggatgcatttagcctggagtagaagcaatttaataactgttaaagagctgttattaaggaggacactgaccaatgttctctctccccatcgaggacacaaataaaaggaattgtttaaactggaagagaagagagggatttagattaaatattaggaaacatttcttaggagtgagcatcattaaagaaaaaaatgccataagctataaccagttcctgaggaaggctaaggactctgtgtctcgggatattagtgtagtgggcacaacacaggctttgaactcagacagaactgcttttgaatctcagttcttgcctcggctaacataaataaaaggatcttaaaaattcctccactttgtagattttttggggaatgtggaacatagtatttggacacgcatttaggtgataaaggtgataaataaacattattttcccctttaactactgtactgttgcttgagattttacagtacacaggttaggcaatgtattcttgtcagtactgattatttttctttgttttgcgaggatttggcttttattttttattgaaaaat

SEQ ID NO: 719834 - DNA, 1020 bp, Homo sapiens
ttggtgttgaggccttacataaactttcctgttcaacaactcaatccctgtcagcacaggctgctatccctctaggcatcaaagcacttggcatgtttttagagagtaatttcaaggtagttattgtaattgttgctaataaacacactacattgggcacaagctggactaggaaagagtgtcataaaaagaaatctgtaacgataagggattgtaaattgctaacgaatatcctaacaaaataaagcttttattaaaattaagaatctctttctcttatgaaagaactgggaaggattattttagctttacttggcataggctcttcatgataagaggagtgtatatatatgaattttgagggcagcatccagagcttggaaaaggtccagagaagagcaaatgcaattatcaataggttagaaaattggccctttaacaaaaggttaaaggagttggatgcatttagcctggagtagaagcaatttaataactgttaaagagctgttattaaggaggacactgaccaatgttctctctccccatcgaggacacaaataaaaggaattgtttaaactggaagagaagagagggatttagattaaatattaggaaacatttcttaggagtgagcatcattaaagaaaaaaatgccataagctataaccagttcctgaggaaggctaaggactctgtgtctcgggatattagtgtagtgggcacaacacaggctttgaactcagacagaactgcttttgaatctcagttcttgcctcggctaacataaataaaaggatcttaaaaattcctccactttgtagattttttggggaatgtggaacatagtayttggacacgcatttaggtgataaaggtgataaataaacattattttcccctttaactactgtactgttgcttgagattttacagtacacaggttaggcaatgtattcttgtcagtactgattatttttctttgttttgcgaggatttggcttttattttttattgaaaaat

SEQ ID NO: 719835 - DNA, 1695 bp, Homo sapiens
agccctggcaagatagaaccaagaagactgtctacccattttccctgattctcatcatgctcgtaaacaaaagaagaaggaaacacaaaaggacattattttggatcttggatatggcatcgcatctgtcctctaaggacaattgcagaattggtcctcttttgttgcttcctggaagacacagcaagatggagagaaaacagaacaaggcttgtgtcccattctgagcaccacaagttcactccaggtccatggtcataggctgactaggcaaagtagctcctatcaaggatgtctcatgccataagttaatctgatcccccatacaccactgacagctgtttgcagcaattgcagatcccttactttagcttggtctttttctgagcaaggtccacctggcatgtcacactcagacctatcttctagccagggccctactctagcttcataaattgggcccttgacttgataacacacagttttgaccgttcgcaggccctgagaactgtagcttaagcactgttcctggctactcccagcccctggctgccttggtgagaccatcacaccctcccactggctcctcggctatctggctcccggcttgggcagatcctcccaaagcagggctgtggtcaaaaggaaagcaaatagaggcttaaaaattcagctatgagattaaaattaaaaatgaaccctgtttcctcttcctgggatatgtcagtcaaaaatagaagtagtatatccctatagaacctcttgacaaatccagtgtgtgtctaaaacagtgytgaaatcaaatctataacagtttcacaaaccacgtgcttgttctttctccaagaattcttttagcatcaaaaataagtaaaacattgttctgggtgttgtggaaaaaaacaaagatgaataatgtgttctgcctttatggaatttacaatccaactcaggaaataagatacaagtgctgtagttccagcaaagtagaagcatagaaaaataggatctttaggacgggagatttctgcaggatcatccagggttatagcctaaacttgagcacctccagtgatagataactcacaacggttaacattaaaccatttcatctttgaagtactctggatggtggacttttttttacacgaaatttaactacgtgtttgtggcttctgccaatatgtccacactggagtctcacaggaaaatccaagtattctctgctagccatgacagccatcaattttttaagtgaaatcaagttgattaagaaagtaaagtaataaaagaataaaagaatggctaccccagaggcagagcagctaattatttaaaactattcattactctccccaaccctgcaaaattcttctctttttcagatctctttttctaattctttgaatcatattttatgttacatagttgattacaattataattacatgacaattataatcactctgtttatatttgtcttaattctgttcagtttgcctaaccttttgagaatatgaaaatcattacaatgtccatatacgagacatggtttaattagagtagggaaaaaatgagctttctcctcccttttcttaagtactatattaatatagcattcacttcttctttttttttttatttttttgaggcagagtcttgctctgtgtcccaggctggagtgcagtggcacaa

SEQ ID NO: 719836 - DNA, 654 bp, Homo sapiens
cctcaacaagtatttgttgaataaacattaaacaaatggaattctagtaaaaatcaaaattaagtttggaaataattttaaagagcatctaatccaactctccatccaaggctttgtaaatagttatttacaaagtattgtatttagtgaaygttttacttctttgtttctgtcatagcgtctaagctgacaatgccataatatcagaattaagagaaaccttggatgttataggtgagaacctgagatctagggaggtgacatgacttacccattgtcatccatcaacaaggagccaaagctgaatctagaacaaaagcagtaatcaacataaataaggtacccctacactctgtctagagagtgataagaaagaaaagatgtggaagagtaagagaggtcaagagagcaagaatgttttgatgagtgtgtagcttacttaattgtaaagttgatatttgagcaaagtcctgatgaatataaggaagttagtcaactggatgagccttcaggcaaaaatgacatctagagcaaaatacttaaagcagagtgggccttattgtgttgtagaaacacctaagaagccattgtggctagaaaagaatgaccatgggtaaaggcagtaggagggaaagaaagataattaatagagcc

SEQ ID NO: 719837 - DNA, 471 bp, Homo sapiens
gagtggatcagtctaaacaaaacacgtgcacagggggctcctccaaagagcatgatcggccaccactgggtgccccgtccctcacccaaagtagctggggaggggtggggggacgaggccagggagggggctgggagtcttgggtttcttcctggaaatcctaccctcaccacccacctgtgagccagtgggagacatgaatctcgctggcaggaactcgggccagctcagccgttttcagggatgttaatgaaatgcgggagcacttgtcctttcagacagcrgccccttttatttgggaatgaaaagctgcattagtctgaatgaggtttggaggcctcataaatccggcgctggctgcctcgtgggggagcagggagcctaggcctggctggtgggtagacttgtttaccaacaatgcgaaaagccaggattggcggctcccaatgcccggaggagatgcggctggag

SEQ ID NO: 719838 - DNA, 635 bp, Homo sapiens
agggctgaaaactgggggtttcaataagtgaaaatgggaacacaaatttgaggctccatgaatataattctaattgggcataatcctttgtttagggattttcttgttttatggtaataatttgagtcaaaatttttgtgtgagtttggttatttctgtaggatttaaatttttatcagtaactaaatattttacccaatgtgctgtgataggggtgtgctgtcaacacagaatgcaaagttccaatgtaggcgttgaacgtgtggctcacgcaaagaatctgatattccaactgaagcgaaatttattgagaaataaggaagggctgctagtctacaattctctgttttctgtttctgattttttttttgtttttktttttcttaaaaaaggactccgagatttccccaggaatttatgagaattgcttgtagtaatttaggatggaggttagaaataagaaaggattgctagtctataattccctgtgtttcctgtttctgtatttttttttcttaaaaaaggactccaagatttcctcgggaattcgtgaaaattgtttgtagtaatttaagatggaagttagtgaatgtaacatgaatgaggaattggaagctctaacaggtgtgggattt

SEQ ID NO: 719839 - DNA, 628 bp, Homo sapiens
aacatttattttgtaagtaatgttaatgatattctcagagctctgtgtttattgtttaacactgccatcatttattgatgactaacggccaataaacagtgcttcttgcctttactctggcttctagtcagtatttacggattaggtccattagtcttccttttgaaagccattgagacaatgcagctggtacccaactgaagaagacatgcaaaaaacattatctgccactcaggtaaagacaaagaagtgaaattgtaaggaagatgtgcaattgcaaccacaagaagcactaaaatgtaagtactgtaatgacctaatgaatatttctgaatatatctaatcatgtgacttacctttttattccagcttttagaatactaatcacaaatagatcccatgttatcaaatgtggttctataagagagtatgggaatacagttgttgagaccacattaaggaaaaaaatgctcagacatttaagaatgtaaaagacwtgcagaaataaaaggaatgataagaaaatttaattaccggaaatatatggtaaaaggaagatggcacacgattcagagaaatgcagccacagccatgtcctttataaaaaatgtttgcttttataaaaaat

SEQ ID NO: 719840 - DNA, 612 bp, Homo sapiens
taatgtctcatgttaaagtctcagacagcctgcatgtagtcaaatcctcccagtagcattaactccagatggctgctccctccttcatcaaactctatgccccttgtcttctgtgattccacattctcctgattttcctctaagtttctgttccttcttagttttcttaacagcatcctgctcctctctccaatttctttcctttgtcatcaacactcactgagtaggtcattcaatcccatggctttaagtatcatctaattgcttatggttattgttgcctgtctctagcccaaactgctctcctgatctctacagtcacatatttcagmggctttcctgacatcacaatgtggatgtataataggtatatctagctactcaagactaaaacagagcttacggtttttctcaaaatcttttctcagatttttttttaaatcaagttttataatgtcaggaaaataaaacaacaaaaacctcaaaaccaaaaccaaagcaagcaagtaaccaatcaaccaaccaaacaaaaaaatcccaagaacaccatggaaaatggccaattagaagccgctagtgtgtgctgcttttcacagagagaaataaaagggg

SEQ ID NO: 719841 - DNA, 563 bp, Homo sapiens
aaaggaaagagttgtgagtatttaacaccctccaaacctccaaaatggggaccattaactttattgaaagtacattaaagaaatatataagaagaaactgacaaaatcacattttattttcattttttttgtaaataaatagagagggggtcttgctatgttgaccaggcctcaagtgatcctcccatcttggcctcccaaagtactaggattacaggagtaaaccaccatgcctggctgacaaaataacatttttaaaaggaaatgaatgctctctttcaatcttaaattgagcaaaaggacaaagagcagaactgaaatttgtattctacagagagttctcattcttttcatgtattcattaaaaaaaaatctgcaaaaktgatcatatactaagctccaaatagaatctcaataaatttcaaaaagtaacaattctacttgccatattctctaactataaaaataaaatcagaaattaacaatacaagacaatgacaaaataaaattttaaatggaaccgaaatataaaataatcttaaccatctggtcacagaggtaat

SEQ ID NO: 719842 - DNA, 968 bp, Homo sapiens
tagtaaacctcaaatttgtttcaatcttatttttttcgttttcctcaacggcttttttcttagcttgttctttcagtttccctatgtgtaacatttctaatatatcaatctcttgctcactaaactgcttttaccttcttccttcctacttttattattttcctatcttaaattcttcttcaagttgtcaaaggatagtatcaaacgaaaaaagtgttaaagtactacattttaatattggttttaaaatatttatttgttaacaaaatcacatgaaataatatcagttttgtattattagtcaatttaattattaataattgtgtctttgctaagataaccctggatacagataaaataactctccacatcttgaattttctgtcagaaaaacaacataccttaagaatcatattgttcaaaatcccaagttttcaggtaataagtactattggcgttattggtaaataacccaaataaattcccagttgatatgccttccttctgattacattttggagagcagttaattcttcaaagaaggaaacttaacgagacattgtgtgtgtaatggaaatgtgatgtacatgagtttatgcttacaaaataatcaataactacaatgtaaaatcarcactcaatccttgtaagaccacagtatgaaaatttctactttccttcaaaaagggtttgtaaatgattttaaaagaagaaacagcagcctcgactcttagaaaacttaactagataaatttgcacattacaagtcttaaaactagaaaccatattattaactgtgaaactatataattagtttctttgtgagctttcaattttttgctagataaaattaaaactgccaccaaaaaatgaggccattatgaacatgacaggtcatttgttgagaaaagggttatgtagaaatagcatctgataatttgttggaaatattagcatatagatggcta

SEQ ID NO: 719843 - DNA, 968 bp, Homo sapiens
tagtaaacctcaaatttgtttcaatcttatttttttcgttttcctcaacggcttttttcttagcttgttctttcagtttccctatgtgtaacatttctaatatatcaatctcttgctcactaaactgcttttaccttcttccttcctacttttattattttcctatcttaaattcttcttcaagttgtcaaaggatagtatcaaacgaaaaaagtgttaaagtactacattttaatattggttttaaaatatttatttgttaacaaaatcacatgaaataatatcagttttgtattattagtcaatttaattattaataattgtgtctttgctaagataaccctggatacagataaaataactctccacatcttgaattttctgtcagaaaaacaacataccttaagaatcatattgttcaaaatcccaagttttcaggtaataagtactattggcgttattggtaaataacccaaataaattcccagttgatatgccttccttctgattacattttggagagcagttaattcttcaaagaaggaaacttaacgagacattgtgtgtgtaatggaaatgtgatgtacatgagtttatgcttacaaaataatcaataactacaatgtaaaatcagcactcaatccttgtaagaccacagtatgaaaatttctactttccttcaaaaagggtttgkaaatgattttaaaagaagaaacagcagcctcgactcttagaaaacttaactagataaatttgcacattacaagtcttaaaactagaaaccatattattaactgtgaaactatataattagtttctttgtgagctttcaattttttgctagataaaattaaaactgccaccaaaaaatgaggccattatgaacatgacaggtcatttgttgagaaaagggttatgtagaaatagcatctgataatttgttggaaatattagcatatagatggcta

SEQ ID NO: 719844 - DNA, 1454 bp, Homo sapiens
ccccgcaggtagtaaatataaattgaattgagagagcatcattttcagtgtttgggtatggggttatggaagaaaagtgtcgtattttttcttatctttttaaaaatttttaatgtctaagacatcaagaaaatagaattggtattgagagaaactgactattttaaaggtgactgtaattgcacataggtcaattttaaacaatgacaaaaacaatttttaaaatgttaaacattcaaaatcttatatattaacataaaaatattttaaaaatgagtctatttcacaatatattgcacaaagtccaaatatgccaacatgtactaaccgcttttcctacagaaataccaggtattggtatattcattagctcatttataaatttattcactccatgtatttattcatttgataagcacttaaggagcttgggagatacaaagatgaaacagactcagaggtttctaatctgtaataaaacgattaaactcaactatatccactggaacaggctcacatacctgtacatagtttatttctagattataatatgaaattcacccatttgtgtaatagaaactgtataaatataatttatatattctcatactatacttttatcattttgtatgatcatatattttttagtgttatattacttatatttatgccctatgtaaaaagaactcaaatgcataattctagtaaggcaaataagaagccaggatctaaaaatgtgcatgaatttatagtatgaacattgtatgaaagcggtaattttttttttttttttgagacaagagtcttgctctgttccacagggtggagtgcagtggcatgatctcagctcactgcaaccttcgcctcccgggttcaaacgattctcctgcctcagcctcctgagtagctgggactacaggttcatgcaactgyacctggctgatttttgtatttttagtggagatgggatttcaccatgttgcccaggcttggtctctaactcctgacttcaagtgacctgcctgccttggccacccaaagtgctgggatttatgagcccagcctattaaagcatttttaattctctaacaaccatttggcatgaccagaatcctgaagttaaaaggagaaataagaattttacttgttctgtgctccattctttatcggatagatgtttggttccatgcatacagttcttcaacagtgaagaaccacagcaaagccataattactgcaaataattttgacaagaaacatgacaatgttagatcaaagaaaaagatggctctgccacatgacctctcagcagaaattctgttttcctgtcttctattctctttcacctcttggcataagaccatagagacagcactggcatgccaagttgaaattcataagtgataacttgataaagtgtaattatgacttgtatttttccttgttaaggttgt

SEQ ID NO: 719845 - DNA, 618 bp, Homo sapiens
tatccatctcccttatccattagttcatccatgctccaggctgctcaaagcctcagaccacttccactgtgacaaatgtatgccaaacagaggtagtccttgatttattatgtcttgggactgacatctatagtctccaagtggatttcaggagggaaaaacatctactctacagaaaaccctccctatgtcaggacaagtactgaaaattctgtttttgtttgtcatggaacttagtggttttactgggtaagacttaagaggctctgatttccttcagaatgggacagctggataatactattgtcctgttttctttccataayttacacatacctattaaggtattagtgaaaaagcataccgggccacttatattacatttatacagacagttaaggggccctacaaacaccctgtcatcttcccttcctacaggaaatgctgcaaagactagttaggctgtcagtaactgtgttgctcttaaataggagaattttctgcaaataaattccttaagagactgcacacagagaaagccagcaaatgctcacctaaaattctgaggatgctttctgcactaaaataagtgtcattttcttgaatctattcactgtg

SEQ ID NO: 719846 - DNA, 1294 bp, Homo sapiens
cagggctaaagtaggctgaggagtccatttaaaaggagaattgtattttaacaagctatcagaaaaaaataacaatcaaaagctgaaatagatgagaaaaaagaatagaaaacagaaaagaagatgtgagagaattaacagagttaatctgtttttaatggctaaaaaacttgagcagtctctaaaaaatactgatttttttatagagggaggaataaacaatatcagaaatgaaaagtaataaaagataatataaacaataaactatgaaaatatggtaaaaagaacattcttagaaatgtgtgaattattaaaagtgacttaagtcagtattactatcagtctgttaagaagagattggagaaatagaaaattagaataatcctaataatgttttttaaaaaaataagttagctgttgaagattttccaaagcaaatatcatacctagagcattttaccagcaagttctatgaaccttcaaggaatcaataacctcgatatattactacaatttctatggaacagaaaggggagaaatacttctacaaattttttacaagtctaacttttgatactgacaccaaagagacaccagaaatgaaaaataacaggccaatcctaatcattcacatatcagtgaatgattatatattgtcattcaactaaaattgcaaatcaaacacagcaatgcccaaaaaagcaaatacaaaatgacgaaattgtgtttatctcaagaatataaagttggttgaacatcagaatccagaaatgtaagtcaacacagctacagttcaaagaaagaaaagtctacatattcatctcaatatatttggtaaaaagtgttctttaacattcagcatcacttcataataaaaactttttaaaaacagtaaataaaatacaacttcatcttgataaagggtatctacaaaaaaaaaccttacagcaattatcttttcaataatgaaatattaaaattattccctttgaaatgacacacaraaaatgcccactatcacttccttacaacattaactttgattgtgagtcaatgcagtaagtctagataaaagataacacataaatggcttgtaaataaagaaataaaacatccattattcacggacattttatgcatagaaaacttaagcatttccaaattattaaaataaagtacaccacttttaaatacaacaaattagaaaaatgcaattttaaaatatatcctttacaaataaaaaaggttggtggtacctaagaataaatctaatattaagatgtgcaaatccttt

SEQ ID NO: 719847 - DNA, 609 bp, Homo sapiens
cacatgcctaagagacagactctatgggtactgagtcatgctaatagtggcaaaacctgacaaacaataagcatcattttcaaatattttaaacatttcacataaaaatttacttttagcatacattgcagccatcaaggaagcctaaagtaaggaaaacctcagtgaaatatgatgaagttaataaaaagaaatagccatcattttatttgtttaaattgccactacctctcatataattatgtacaatatataacataggataattaagtcaaactgtgtacctacagatatggagagscttttgttttaggaaaaagtaaaatgtaaattaactggtaaagatgagcttttcaatctataaggcatagacacttttccttagtggatttgaaaaggttgttataaatctgaaaataagatagtttttctataataaatggtaaaaaacactttcacatcttaaccttatcatagtatcacaatgctggaatgtttatactaggaaataagtaagctaattcaattataaatttcagtagaggaaaggatgaaggttaaaaaacactatctattcaaatccttagtcatgaggttgaattcattgaa

SEQ ID NO: 719848 - DNA, 1131 bp, Homo sapiens
ttgtccagaaaccatcttaatgatagttttattagttttgaaaattttgaatagtggttattgtttgttgtcataaagctaaaaatcaggtttcagttatgattaccaggtaaaatagagctaaatgagtatatgtgtgcacatctgtgtggatgtttgtgcatgtggatgctatttaacttgactttctagattttctattcgtttttgtttgtttgtttgtttgttttggagacagaatctcactctgtcgcgcaggctggagtgcagtggtgcaatctcagctcactgcaacctccgcctccagggttcagctgatatcttctgcctcagcctcccragtagctggggttacaggcgcccaccactatacccagctaatttttgtatttttagtagagacagggtttcaccgtgttagccgggatggtctcgatctcctgaccaagtgatccacctgtctcggcctcccaaagtgctgggattacaggcatgagacaccactcccagcctcccctccatagttttaaattgtacacttctcaatctccgtttaccatctcctccttttaatacctcaacttcatcaatcttttgacttctgttaagttcttcaatccattttatcctattattttcactgtttattaacccatgatgagtactcatactttacattccatggtaaatcattataatcatattattacatatacattaatccctttgcttcattttagttcttcatacgtgtgtagtaaaaccactgtctttttaaaatccattttaaaaacaggcaaggatgactttgcccatggctactgcaatagaaaagagtctgtagctaggtctgagtgcaactccactgaacaaaagggtcttggagtgtttatgagtggagttggggggcagaggtcatggagaacctgtgtttgctaaagggcctcacctaaaggaaaaggagactttctcaactcttcaggaaaagaagtagtttacaacttggagcaaggtgtccacttaagttaggttctcatcctctcacagaggctgggagacagggacattaccttccttgagagtgctttggcctttcgaaataatgcctcccacgtccttgagaaaaacatt

SEQ ID NO: 719849 - DNA, 498 bp, Homo sapiens
tattattattattattatttgagatggagtctcactctgtcacccaggctggagygcagtggcacaatcttggctcattgtaacatcagcctcctgggttcaagccattttcttgtctcagcctcctgaatagctgggattacaggcacccaccaccacatccagctaattgaattatagaaatcttattggctactaatggggaataggttttcttgaagagtcaatcagaaataaagggatattttattttagctagaaagagatgataatttttttttctgaaagttttggtatttctttatttcaaccattttctaactttaataaggtagttaccgtggagataaataaattaagccatctaaaataccagcgttcatctgttaaacgtctatcttttgctgattaagtgaattgtttgatactcaacttggattttatatcgtagacttaaaataatcattgatttctgaaaagttaaaaataattggatta

SEQ ID NO: 719850 - DNA, 498 bp, Homo sapiens
tattattattattattatttgagatggagtctcactctgtcacccaggctggagcgcagtggcacaatcttggctcattgtaacatcagcctcctgggttcaagccattttcttgtctcagcctcctgaatagctgggattacaggcacccaccaccacatccagctaattgaattatagaaatcttattggctactaatggggaataggttttcttgaagagtcaatcagaaataaagggatattttattttagctagaaagagatgataatttttttttctgaaagttttggtatttctttatttcaaccattttctaactttaataaggtagttaccgtggagataaataaattaagccatctaaaataccagcgttcatctgttaaacgtctatcttttgctgattaagtgaattgtttgatactcaacttggattttatatygtagacttaaaataatcattgatttctgaaaagttaaaaataattggatta

SEQ ID NO: 719851 - DNA, 1168 bp, Homo sapiens
tcttgcctgacttatgtacagtgagcagttgaacctgtgtctgattacacttggtcttgtaaaaaggtacccttctctttgctcctaattcaccatatgtatttctcttattgtatattggctttgtgctaagaagcctgaggcctttgaatgtcctaataatgctctaataattttttaatctctacctaaaatactgtctagtatctaattattcatgccttaaaaatttttgagtgccaactaactccatggccattttctatgcactacatacgtatggatttattgagagcctacatcatgtccatcactgtgcttactttaccatgctaagcaccagttatayaggaaaaaaaacaagtacatatgaatatatatacataaaatatataaatatataattataggttggtggaaaagtaattgcagctttgccattaaaaataatggaaataatttaaattgcttctgccccaacctaatatatacatgtgaatatatgtatataaatatcagtaagttaaacaaacagtaataggtataagtatagacattaatgtattaaatacgagtggtttcatggtaaagcagattaaaggtatggagctgggtgggtgctcctagtgggtgatcaaggaaaagaacactagcgaagtgatatttgagcagaggctttataagagagtattttaggcagagtttatagcaagagcaaagccaagaagataaaatattttttactggttgaataataacacagaagcctgagagaccaaactgcttctttaaaaggaagccagtgggtgcagataactttagatgtagtcacaggcagggcaagtggaattgtagaacaagggtaaagattttggctttttttctttttttttgagatggagttttgctcgtgttgcccaggctggagtgcagtggcaccatctcggctcactgcaacctctgcctcccgggttcaggcgattctcctgcctcaggctcctgagtagctaggattacaggtggcctccaccatgcctggctaattttttgtatttttagtagagacagggtttcaccatgttgggcagactggacttgaattcctgacctcaggtgatctgcctgcctcagcttcccaaagtgctaggattacaggcgtgagccaccg

SEQ ID NO: 719852 - DNA, 1168 bp, Homo sapiens
tcttgcctgacttatgtacagtgagcagttgaacctgtgtctgattacacttggtcttgtaaaaaggtacccttctctttgctcctaattcaccatatgtatttctcttattgtatattggctttgtgctaagaagcctgaggcctttgaatgtcctaataatgctctaataattttttaatctctacctaaaatactgtctagtatctaattattcatgccttaaaaatttttgagtgccaactaactccatggccattttctatgcactacatacgtatggatttattgagagcctacatcatgtccatcactgtgcttactttaccatgctaagcaccagttatacagraaaaaaaacaagtacatatgaatatatatacataaaatatataaatatataattataggttggtggaaaagtaattgcagctttgccattaaaaataatggaaataatttaaattgcttctgccccaacctaatatatacatgtgaatatatgtatataaatatcagtaagttaaacaaacagtaataggtataagtatagacattaatgtattaaatacgagtggtttcatggtaaagcagattaaaggtatggagctgggtgggtgctcctagtgggtgatcaaggaaaagaacactagcgaagtgatatttgagcagaggctttataagagagtattttaggcagagtttatagcaagagcaaagccaagaagataaaatattttttactggttgaataataacacagaagcctgagagaccaaactgcttctttaaaaggaagccagtgggtgcagataactttagatgtagtcacaggcagggcaagtggaattgtagaacaagggtaaagattttggctttttttctttttttttgagatggagttttgctcgtgttgcccaggctggagtgcagtggcaccatctcggctcactgcaacctctgcctcccgggttcaggcgattctcctgcctcaggctcctgagtagctaggattacaggtggcctccaccatgcctggctaattttttgtatttttagtagagacagggtttcaccatgttgggcagactggacttgaattcctgacctcaggtgatctgcctgcctcagcttcccaaagtgctaggattacaggcgtgagccaccg

SEQ ID NO: 719853 - DNA, 1834 bp, Homo sapiens
  misc_feature 587, 588, 589, 590, 591, 592, 593, 594, 595, 596, 597, 598,599, 600, 601, 602, 603, 604, 605, 606, 607, 608, 609, 610,611, 612, 613, 614, 615, 616, 617, 618, 619, 620, 621, 622,623, 624, 625, 626, 627, 628, 629, 630, 631, 632, 633: n = A,T,C or G
  misc_feature 634, 635, 636, 637, 638, 639, 640, 641, 642, 643, 644, 645,646, 647, 648, 649, 650, 651, 652, 653, 654, 655, 656, 657,658, 659, 660, 661, 662, 663, 664, 665, 666, 667, 668, 669,670, 671, 672, 673, 674, 675, 676, 677, 678, 679, 680: n = A,T,C or G
  misc_feature 681, 682, 683, 684, 685, 686: n = A,T,C or G
gctatataataacaaaatacatagaaattaaactgtaattaaaattctgaaaatagccataacagttgatgttaagaaggaaaattatgagtacgtttttccatctttctttttttctgcattgctaactttctgtgttagccactagctatttaagaatggttttaaaataacgtaattgttaaataacagtttagaaacactctacacaaaaatacagtataatcagacattttgcagtgagatccctaaaaaaagtatcattttgtgagaagaaagaaagtcagaccattttgactgctgcacaatatcccactatgtaaagctactccagtatattagtctattgtatttacctgacaattttttaggttgtttagactttttgttttgttttgttttgagacagagtctcgctctgtcacccaggctggagtgcaatggcgtattcttggctcaccgcaacctctgcctcccaggttcaagtgattctcctgcctcagcctcctgagtagctgggattacaggcccataccaccatacctggctgatttttgtatttttagtagagacggggtttcaccatnnnnnnnnnnnnnnnnnnnnnnnnnnnnnnnnnnnnnnnnnnnnnnnnnnnnnnnnnnnnnnnnnnnnnnnnnnnnnnnnnnnnnnnnnnnnnnnnnnnnggagtgtagtggcgcgatctctgctcactgcaagctctgccttccgggttcacgccattctcctgcctccgcctccctagcagctgggactacaggtgcctgccaccatgcttagctaatkttttgtatttttagcagagactgggtttcaccatgttagccaggatggtcttggtctcctgacctcgtgacccaccagcctcggcctcccaaagtgctgggattacaggcgtgagccaccgtgcccggccctaggtactatttattaaatgacagttggatgctagacagttcttaccctgtatagacactacctcatttagctttatccttaccaaaaccttttgaagaaccactatcttattgtctccttattacagatgagaatttattattgttttcaatttgtagataaggggctaaataccttcctaaaagtacagagcaaaaataccagtacttacttaactctgaaaatcatgcctttaagcatcatgtgtgaccccagtgcttcttttatcatcccactctggcctcaggatatcacaggtgcagatgtaatgctataatttatccaggtgtattagtccatgttcatgctgctgataaacagatacctgagactgggcaatttacaaaagaaagatgtttaattggacttacagttccatatggctggggaggattcccaatcatgtcagaaggcaaagaggagaaagtcacatcttacgtggatggcagcgggcaaagagagagagagctagtacaggaaaactcccatttttaaaactatcagatctagtgagatccactcactatcatgagaatactgcaggaaagatccaccttcgtaattcaatcacctcccaccaggttcctcccacaacatgtggaaattgcgagagttaaaattcaagatgagatttgggtggggacatggccaaaccatataattttgcccctggcccatcccaaatctcaagtcctcatatttcaaaaccaatcatgccttcccaacagttccccaaagtcttaacttatttcagcattaacacaaaagtccacagttcgaagtcttatttgggagaaggcaagttccttcctcctatgagcctgtaaaatcaaaagcaagttttgtacttcttaga

SEQ ID NO: 719854 - DNA, 1834 bp, Homo sapiens
  misc_feature 587, 588, 589, 590, 591, 592, 593, 594, 595, 596, 597, 598,599, 600, 601, 602, 603, 604, 605, 606, 607, 608, 609, 610,611, 612, 613, 614, 615, 616, 617, 618, 619, 620, 621, 622,623, 624, 625, 626, 627, 628, 629, 630, 631, 632, 633: n = A,T,C or G
  misc_feature 634, 635, 636, 637, 638, 639, 640, 641, 642, 643, 644, 645,646, 647, 648, 649, 650, 651, 652, 653, 654, 655, 656, 657,658, 659, 660, 661, 662, 663, 664, 665, 666, 667, 668, 669,670, 671, 672, 673, 674, 675, 676, 677, 678, 679, 680: n = A,T,C or G
  misc_feature 681, 682, 683, 684, 685, 686: n = A,T,C or G
gctatataataacaaaatacatagaaattaaactgtaattaaaattctgaaaatagccataacagttgatgttaagaaggaaaattatgagtacgtttttccatctttctttttttctgcattgctaactttctgtgttagccactagctatttaagaatggttttaaaataacgtaattgttaaataacagtttagaaacactctacacaaaaatacagtataatcagacattttgcagtgagatccctaaaaaaagtatcattttgtgagaagaaagaaagtcagaccattttgactgctgcacaatatcccactatgtaaagctactccagtatattagtctattgtatttacctgacaattttttaggttgtttagactttttgttttgttttgttttgagacagagtctcgctctgtcacccaggctggagtgcaatggcgtattcttggctcaccgcaacctctgcctcccaggttcaagtgattctcctgcctcagcctcctgagtagctgggattacaggcccataccaccatacctggctgatttttgtatttttagtagagacggggtttcaccatnnnnnnnnnnnnnnnnnnnnnnnnnnnnnnnnnnnnnnnnnnnnnnnnnnnnnnnnnnnnnnnnnnnnnnnnnnnnnnnnnnnnnnnnnnnnnnnnnnnnggagtgtagtggcgcgatctctgctcactgcaagctctgccttccgggttcacgccattctcctgcctccgcctccctagcagctgggactacaggtgcctgccaccatgcttagctaattttttgtatttttagcagagactgggtttcaccatgttagccaggatggtcttggtctcctgacctcgtgacccaccagcctcggcctcccaaagtgctgggattacaggcgtgagccaccgtgcccggccctaggtactatttattaaatgacagttggatgctagacagttcttaccctgtatagacactacytcatttagctttatccttaccaaaaccttttgaagaaccactatcttattgtctccttattacagatgagaatttattattgttttcaatttgtagataaggggctaaataccttcctaaaagtacagagcaaaaataccagtacttacttaactctgaaaatcatgcctttaagcatcatgtgtgaccccagtgcttcttttatcatcccactctggcctcaggatatcacaggtgcagatgtaatgctataatttatccaggtgtattagtccatgttcatgctgctgataaacagatacctgagactgggcaatttacaaaagaaagatgtttaattggacttacagttccatatggctggggaggattcccaatcatgtcagaaggcaaagaggagaaagtcacatcttacgtggatggcagcgggcaaagagagagagagctagtacaggaaaactcccatttttaaaactatcagatctagtgagatccactcactatcatgagaatactgcaggaaagatccaccttcgtaattcaatcacctcccaccaggttcctcccacaacatgtggaaattgcgagagttaaaattcaagatgagatttgggtggggacatggccaaaccatataattttgcccctggcccatcccaaatctcaagtcctcatatttcaaaaccaatcatgccttcccaacagttccccaaagtcttaacttatttcagcattaacacaaaagtccacagttcgaagtcttatttgggagaaggcaagttccttcctcctatgagcctgtaaaatcaaaagcaagttttgtacttcttaga

SEQ ID NO: 719855 - DNA, 1834 bp, Homo sapiens
  misc_feature 587, 588, 589, 590, 591, 592, 593, 594, 595, 596, 597, 598,599, 600, 601, 602, 603, 604, 605, 606, 607, 608, 609, 610,611, 612, 613, 614, 615, 616, 617, 618, 619, 620, 621, 622,623, 624, 625, 626, 627, 628, 629, 630, 631, 632, 633: n = A,T,C or G
  misc_feature 634, 635, 636, 637, 638, 639, 640, 641, 642, 643, 644, 645,646, 647, 648, 649, 650, 651, 652, 653, 654, 655, 656, 657,658, 659, 660, 661, 662, 663, 664, 665, 666, 667, 668, 669,670, 671, 672, 673, 674, 675, 676, 677, 678, 679, 680: n = A,T,C or G
  misc_feature 681, 682, 683, 684, 685, 686: n = A,T,C or G
gctatataataacaaaatacatagaaattaaactgtaattaaaattctgaaaatagccataacagttgatgttaagaaggaaaattatgagtacgtttttccatctttctttttttctgcattgctaactttctgtgttagccactagctatttaagaatggttttaaaataacgtaattgttaaataacagtttagaaacactctacacaaaaatacagtataatcagacattttgcagtgagatccctaaaaaaagtatcattttgtgagaagaaagaaagtcagaccattttgactgctgcacaatatcccactatgtaaagctactccagtatattagtctattgtatttacctgacaattttttaggttgtttagactttttgttttgttttgttttgagacagagtctcgctctgtcacccaggctggagtgcaatggcgtattcttggctcaccgcaacctctgcctcccaggttcaagtgattctcctgcctcagcctcctgagtagctgggattacaggcccataccaccatacctggctgatttttgtatttttagtagagacggggtttcaccatnnnnnnnnnnnnnnnnnnnnnnnnnnnnnnnnnnnnnnnnnnnnnnnnnnnnnnnnnnnnnnnnnnnnnnnnnnnnnnnnnnnnnnnnnnnnnnnnnnnnggagtgtagtggcgcgatctctgctcactgcaagctctgccttccgggttcacgccattctcctgcctccgcctccctagcagctgggactacaggtgcctgccaccatgcttagctaattttttgtatttttagcagagactgggtttcaccatgttagccaggatggtcttggtctcctgacctcgtgacccaccagcctcggcctcccaaagtgctgggattacaggcgtgagccaccgtgcccggccctaggtactatttattaaatgacagttggatgctagacagttcttaccctgtatagacactacctcatttagctttatccttaccaaaaccttttgaagaaccactatcttattgtctccttattacagatgagaatttattattgttttcaatttgtagataaggggctaaataccttcctaaaagtacagagcaaaaataccagtacttacttaactctgaaaatcatgcctttaagcatcatgtgtgaccccagtgcttcttttatcatcccactctggcctcaggatatcacaggtgcagatgtaatgctataatttatccaggtgtattagtccatgttcatgctgctgataaacagatacctgagactgggcaatttacaaaagaaagatgtttaattggacttacagttccatatggctggggaggattcccaatcatgtcagaaggcaaagaggagaaagtcacatcttacgtggatggcagcgggcaaagagagagagagctagtrcaggaaaactcccatttttaaaactatcagatctagtgagatccactcactatcatgagaatactgcaggaaagatccaccttcgtaattcaatcacctcccaccaggttcctcccacaacatgtggaaattgcgagagttaaaattcaagatgagatttgggtggggacatggccaaaccatataattttgcccctggcccatcccaaatctcaagtcctcatatttcaaaaccaatcatgccttcccaacagttccccaaagtcttaacttatttcagcattaacacaaaagtccacagttcgaagtcttatttgggagaaggcaagttccttcctcctatgagcctgtaaaatcaaaagcaagttttgtacttcttaga

SEQ ID NO: 719856 - DNA, 1834 bp, Homo sapiens
  misc_feature 587, 588, 589, 590, 591, 592, 593, 594, 595, 596, 597, 598,599, 600, 601, 602, 603, 604, 605, 606, 607, 608, 609, 610,611, 612, 613, 614, 615, 616, 617, 618, 619, 620, 621, 622,623, 624, 625, 626, 627, 628, 629, 630, 631, 632, 633: n = A,T,C or G
  misc_feature 634, 635, 636, 637, 638, 639, 640, 641, 642, 643, 644, 645,646, 647, 648, 649, 650, 651, 652, 653, 654, 655, 656, 657,658, 659, 660, 661, 662, 663, 664, 665, 666, 667, 668, 669,670, 671, 672, 673, 674, 675, 676, 677, 678, 679, 680: n = A,T,C or G
  misc_feature 681, 682, 683, 684, 685, 686: n = A,T,C or G
gctatataataacaaaatacatagaaattaaactgtaattaaaattctgaaaatagccataacagttgatgttaagaaggaaaattatgagtacgtttttccatctttctttttttctgcattgctaactttctgtgttagccactagctatttaagaatggttttaaaataacgtaattgttaaataacagtttagaaacactctacacaaaaatacagtataatcagacattttgcagtgagatccctaaaaaaagtatcattttgtgagaagaaagaaagtcagaccattttgactgctgcacaatatcccactatgtaaagctactccagtatattagtctattgtatttacctgacaattttttaggttgtttagactttttgttttgttttgttttgagacagagtctcgctctgtcacccaggctggagtgcaatggcgtattcttggctcaccgcaacctctgcctcccaggttcaagtgattctcctgcctcagcctcctgagtagctgggattacaggcccataccaccatacctggctgatttttgtatttttagtagagacggggtttcaccatnnnnnnnnnnnnnnnnnnnnnnnnnnnnnnnnnnnnnnnnnnnnnnnnnnnnnnnnnnnnnnnnnnnnnnnnnnnnnnnnnnnnnnnnnnnnnnnnnnnnggagtgtagtggcgcgatctctgctcactgcaagctctgccttccgggttcacgccattctcctgcctccgcctccctagcagctgggactacaggtgcctgccaccatgcttagctaattttttgtatttttagcagagactgggtttcaccatgttagccaggatggtcttggtctcctgacctcgtgacccaccagcctcggcctcccaaagtgctgggattacaggcgtgagccaccgtgcccggccctaggtactatttattaaatgacagttggatgctagacagttcttaccctgtatagacactacctcatttagctttatccttaccaaaaccttttgaagaaccactatcttattgtctccttattacagatgagaatttattattgttttcaatttgtagataaggggctaaataccttcctaaaagtacagagcaaaaataccagtacttacttaactctgaaaatcatgcctttaagcatcatgtgtgaccccagtgcttcttttatcatcccactctggcctcaggatatcacaggtgcagatgtaatgctataatttatccaggtgtattagtccatgttcatgctgctgataaacagatacctgagactgggcaatttacaaaagaaagatgtttaattggacttacagttccatatggctggggaggattcccaatcatgtcagaaggcaaagaggagaaagtcacatcttacgtggatggcagcgggcaaagagagagagagctagtacaggaaaactcccatttttaaaactatcagatctagtgagatccactcactatcatgagaatactgcaggaaagatccaccttcgtaattcaatcacctcccaccrggttcctcccacaacatgtggaaattgcgagagttaaaattcaagatgagatttgggtggggacatggccaaaccatataattttgcccctggcccatcccaaatctcaagtcctcatatttcaaaaccaatcatgccttcccaacagttccccaaagtcttaacttatttcagcattaacacaaaagtccacagttcgaagtcttatttgggagaaggcaagttccttcctcctatgagcctgtaaaatcaaaagcaagttttgtacttcttaga

SEQ ID NO: 719857 - DNA, 1834 bp, Homo sapiens
  misc_feature 587, 588, 589, 590, 591, 592, 593, 594, 595, 596, 597, 598,599, 600, 601, 602, 603, 604, 605, 606, 607, 608, 609, 610,611, 612, 613, 614, 615, 616, 617, 618, 619, 620, 621, 622,623, 624, 625, 626, 627, 628, 629, 630, 631, 632, 633: n = A,T,C or G
  misc_feature 634, 635, 636, 637, 638, 639, 640, 641, 642, 643, 644, 645,646, 647, 648, 649, 650, 651, 652, 653, 654, 655, 656, 657,658, 659, 660, 661, 662, 663, 664, 665, 666, 667, 668, 669,670, 671, 672, 673, 674, 675, 676, 677, 678, 679, 680: n = A,T,C or G
  misc_feature 681, 682, 683, 684, 685, 686: n = A,T,C or G
gctatataataacaaaatacatagaaattaaactgtaattaaaattctgaaaatagccataacagttgatgttaagaaggaaaattatgagtacgtttttccatctttctttttttctgcattgctaactttctgtgttagccactagctatttaagaatggttttaaaataacgtaattgttaaataacagtttagaaacactctacacaaaaatacagtataatcagacattttgcagtgagatccctaaaaaaagtatcattttgtgagaagaaagaaagtcagaccattttgactgctgcacaatatcccactatgtaaagctactccagtatattagtctattgtatttacctgacaattttttaggttgtttagactttttgttttgttttgttttgagacagagtctcgctctgtcacccaggctggagtgcaatggcgtattcttggctcaccgcaacctctgcctcccaggttcaagtgattctcctgcctcagcctcctgagtagctgggattacaggcccataccaccatacctggctgatttttgtatttttagtagagacggggtttcaccatnnnnnnnnnnnnnnnnnnnnnnnnnnnnnnnnnnnnnnnnnnnnnnnnnnnnnnnnnnnnnnnnnnnnnnnnnnnnnnnnnnnnnnnnnnnnnnnnnnnnggagtgtagtggcgcgatctctgctcactgcaagctctgccttccgggttcacgccattctcctgcctccgcctccctagcagctgggactacaggtgcctgccaccatgcttagctaattttttgtatttttagcagagactgggtttcaccatgttagccaggatggtcttggtctcctgacctcgtgacccaccagcctcggcctcccaaagtgctgggattacaggcgtgagccaccgtgcccggccctaggtactatttattaaatgacagttggatgctagacagttcttaccctgtatagacactacctcatttagctttatccttaccaaaaccttttgaagaaccactatcttattgtctccttattacagatgagaatttattattgttttcaatttgtagataaggggctaaataccttcctaaaagtacagagcaaaaataccagtacttacttaactctgaaaatcatgcctttaagcatcatgtgtgaccccagtgcttcttttatcatcccactctggcctcaggatatcacaggtgcagatgtaatgctataatttatccaggtgtattagtccatgttcatgctgctgataaacagatacctgagactgggcaatttacaaaagaaagatgtttaattggacttacagttccatatggctggggaggattcccaatcatgtcagaaggcaaagaggagaaagtcacatcttacgtggatggcagcgggcaaagagagagagagctagtacaggaaaactcccatttttaaaactatcagatctagtgagatccactcactatcatgagaatactgcaggaaagatccaccttcgtaattcaatcacctcccaccaggttcctcccacaacatgtggaaattgcgagagttaaaattcaagatgagatttgggtggggacayggccaaaccatataattttgcccctggcccatcccaaatctcaagtcctcatatttcaaaaccaatcatgccttcccaacagttccccaaagtcttaacttatttcagcattaacacaaaagtccacagttcgaagtcttatttgggagaaggcaagttccttcctcctatgagcctgtaaaatcaaaagcaagttttgtacttcttaga

SEQ ID NO: 719858 - DNA, 2256 bp, Homo sapiens
  misc_feature 1323, 1324, 1325, 1326, 1327, 1328, 1329, 1330, 1331, 1332,1333, 1334, 1335, 1336, 1337, 1338, 1339, 1340, 1341, 1342,1343, 1344, 1345, 1346, 1347, 1348, 1349, 1350, 1351, 1352,1353, 1354, 1355, 1356, 1357, 1358, 1359, 1360, 1361: n = A,T,C or G
  misc_feature 1362, 1363, 1364, 1365, 1366, 1367, 1368, 1369, 1370, 1371,1372, 1373, 1374, 1375, 1376, 1377, 1378, 1379, 1380, 1381,1382, 1383, 1384, 1385, 1386, 1387, 1388, 1389, 1390, 1391,1392, 1393, 1394, 1395, 1396, 1397, 1398, 1399, 1400: n = A,T,C or G
  misc_feature 1401, 1402, 1403, 1404, 1405, 1406, 1407, 1408, 1409, 1410,1411, 1412, 1413, 1414, 1415, 1416, 1417, 1418, 1419, 1420,1421, 1422: n = A,T,C or G
tctcacatatatatattggaaagcaactatactgacatcctaatacaaattatctctttacagatgagaatctacagtggaaaatgattatgtaataaattcaatgctctaaaccagttaaaagagccaaggcaaaattgcactcccttcatttcaagttcgggattcgtttttgtttgtttctccgtttctgttttagttatacagcttaggttataagacagttcgttctcaccgtaggtaagcgaatataattctcactccgcaaaaagagctatgaargaacaatcacttacaaatttttttttcagacaaataaaataaatattgagtccctcttccatcggactggcagaaaagtacatatctgtcactattggtgttccctctccattcctatttttgagcttttcaaagcaagaccatttgagaaagcatcccatggttccacgttgtttcatataggttcctcttgagatgctcacaaactaagtctgtataattaagggttctgtggcactcaagacacctgaagaatgaaaatagttctatttattttccatctgctttagcatttttgaaggcataaatctagttccgtatcttggaaaatctgtgttcctcaaatctatcttgacacttggggaaaactctcctcctttctctattcctgtctatatcctttaaaggccttgacatttcccttcttcctttctggcacatcaagcatcatttcttcagcttggatattcacaatggcaggaagaggaattgtgtttagtttcttctggtaaccttacaatttgcccagaggctaagggacacatatggtctggaaactgtagcaactttattagaagaagtggaggagaagcagtgatatcaataaattatcgtatcaaaactttccatggcttcctttattattttatttagggctgccatggttctctttatctgttgcttactgaggagaacatgctattttctgctgattaggctcacataatagaatggataatacaattgtttagtaggtggtaagatttagtggaaagaacacaaggtataaaatcatatgtgctatgtttgcattccagtttacgcatctattagctgtgttagctttaaaataatacttaaatgagtcataattcttcatttgtggaatagtgaaaacaattccagaattatggtgattttgtgagaacttggtaggcatccagtatttcctatctttcctgtatttctttccatctacttcaaatttgaggtagttaatagcatggactcagtataactgattagagcaaaatgtgattnnnnnnnnnnnnnnnnnnnnnnnnnnnnnnnnnnnnnnnnnnnnnnnnnnnnnnnnnnnnnnnnnnnnnnnnnnnnnnnnnnnnnnnnnnnnnnnnnnnncctcaaatttagctgctaaactatctaatggtagtctattaaaaagatagaattatagactttgactctagggatgctgaatcactagctgccatagggtctagaaagttgcattttaaatagatatctcaggtgataatgggttaaatagaccctataatgctctgtgaaacacctatttgttagataaattgatttagaaccactaaaatctcattagaacaggtgagtattagagaagtatagaataaaagagattggtagggatcactcaaaaaatccacaaaaggattctgagaagtcctagcaatgtcatttaactacagctcatcataagctgagatatgaataataaaagattgttgaatttaaccaagttcattctgttctttttcatgaggaaagtgaattacaccactaattcctttgattaaagtttttcttgtttatttgttttcttttttgatatgaatatctctacacatagaaatcatttctttcattgttttctgaaaaagacaaagacaaatgcagatgaagaacagttgttctatacattcttttttttttttgagcagagtttcactcttgttgcccaggttggagtgcaatggcacaatctcagcttgccacaaactctgcctccaaggttcaagcaattctcctgcctcagcctccccaatagctgggattacaggcatgagccaccacacctggctaattttgtatttttagtagagacggagtttctccatgttggccaggctggtctcgaactcctgacctcaggtgatccacccacctcggcctcccaaggtgctgggattacatgca

SEQ ID NO: 719859 - DNA, 2256 bp, Homo sapiens
  misc_feature 1323, 1324, 1325, 1326, 1327, 1328, 1329, 1330, 1331, 1332,1333, 1334, 1335, 1336, 1337, 1338, 1339, 1340, 1341, 1342,1343, 1344, 1345, 1346, 1347, 1348, 1349, 1350, 1351, 1352,1353, 1354, 1355, 1356, 1357, 1358, 1359, 1360, 1361: n = A,T,C or G
  misc_feature 1362, 1363, 1364, 1365, 1366, 1367, 1368, 1369, 1370, 1371,1372, 1373, 1374, 1375, 1376, 1377, 1378, 1379, 1380, 1381,1382, 1383, 1384, 1385, 1386, 1387, 1388, 1389, 1390, 1391,1392, 1393, 1394, 1395, 1396, 1397, 1398, 1399, 1400: n = A,T,C or G
  misc_feature 1401, 1402, 1403, 1404, 1405, 1406, 1407, 1408, 1409, 1410,1411, 1412, 1413, 1414, 1415, 1416, 1417, 1418, 1419, 1420,1421, 1422: n = A,T,C or G
tctcacatatatatattggaaagcaactatactgacatcctaatacaaattatctctttacagatgagaatctacagtggaaaatgattatgtaataaattcaatgctctaaaccagttaaaagagccaaggcaaaattgcactcccttcatttcaagttcgggattcgtttttgtttgtttctccgtttctgttttagttatacagcttaggttataagacagttcgttctcaccgtaggtaagcgaatataattctcactccgcaaaaagagctatgaaggaacaatcacttacaaatttttttttcagacaaataaaataaatattgagtccctcttccatcggactggcagaaaagtacatatctgtcactattggtgttccctctccattcctatttttgagcttttcaaagcaagaccatttgagaaagcatcccatggttccacgttgtttcatataggttcctcttgagatgctcacaaactaagtctgtataattaagggttctgtggcactcaagacacctgaagaatgaaaatagttctatttattttccatctgctttagcatttttgaaggcataaatctagttccgtatcttggaaaatctgtgttcctcaaatctatcttgacacttggggaaaactctcctcctttctctattcctgtctatatcctttaaaggccttgacatttcccttcttcctttctggcacatcaagcatcatttcttcagcttggatattcacaatggcaggaagaggaattgtgtttagtttcttctggtaaccttacaatttgcccagaggctaagggacacatatggtctggaaactgtagcaactttattagaagaagtggaggagaagcagtgatatcaataaattatcgtatcaaaactttccatggcttcctttattattttatttagggctgccatggttctctttatctgttgcttactgaggagaacatgctattttctgctgattaggctcacataatagaatggataatacaattgtttagtaggtggtaagatttagtggaaagaacacaaggtataaaatcatatgtgctatgtttgcattccagtttacgcatctattagctgtgttagctttaaaataatacttaaatgagtcataattyttcatttgtggaatagtgaaaacaattccagaattatggtgattttgtgagaacttggtaggcatccagtatttcctatctttcctgtatttctttccatctacttcaaatttgaggtagttaatagcatggactcagtataactgattagagcaaaatgtgattnnnnnnnnnnnnnnnnnnnnnnnnnnnnnnnnnnnnnnnnnnnnnnnnnnnnnnnnnnnnnnnnnnnnnnnnnnnnnnnnnnnnnnnnnnnnnnnnnnnncctcaaatttagctgctaaactatctaatggtagtctattaaaaagatagaattatagactttgactctagggatgctgaatcactagctgccatagggtctagaaagttgcattttaaatagatatctcaggtgataatgggttaaatagaccctataatgctctgtgaaacacctatttgttagataaattgatttagaaccactaaaatctcattagaacaggtgagtattagagaagtatagaataaaagagattggtagggatcactcaaaaaatccacaaaaggattctgagaagtcctagcaatgtcatttaactacagctcatcataagctgagatatgaataataaaagattgttgaatttaaccaagttcattctgttctttttcatgaggaaagtgaattacaccactaattcctttgattaaagtttttcttgtttatttgttttcttttttgatatgaatatctctacacatagaaatcatttctttcattgttttctgaaaaagacaaagacaaatgcagatgaagaacagttgttctatacattcttttttttttttgagcagagtttcactcttgttgcccaggttggagtgcaatggcacaatctcagcttgccacaaactctgcctccaaggttcaagcaattctcctgcctcagcctccccaatagctgggattacaggcatgagccaccacacctggctaattttgtatttttagtagagacggagtttctccatgttggccaggctggtctcgaactcctgacctcaggtgatccacccacctcggcctcccaaggtgctgggattacatgca

SEQ ID NO: 719860 - DNA, 1092 bp, Homo sapiens
tcatgaagcaaagccttaatcaaccctctctcccaaatcttgctggtgttgtaaacacttcagtttcttctagtcccaccatgacccagataccttgcaaaaacaaaataaaaacatagtccaatggatctttaaacaaatgtgttgtgaaaatatttagatggagcatacccaagtaccgctttaaccaagaggaagaagacaccttactcaaaggtgggtgcttcttgagtgactgctcagagctctgtttctcccctccccctccaagcccttgccttttgcccacctcctcggctgctttgtggacattcacatcgtcttaaccttgaactgcctacaccccaagcggtgatttctcccaatggccctccagaaagcccttgaaacctggtctggattcgatgccttcccatcacccaaaattcacttcccagtggcatattaagtacctctccttttttccctctttcactgtccattattgcgtctgaaatgatgcctacatcgtttccatctgcctggagagcatgaagatcttctgtgtgtgttggctgacaggctccttcagacctcttctaaagcccatcttgaaagaaccgtttatcacctctagtctctaccctgatttaatgtggttccaaagttcgcctctattagtgaacatgtctctacaacgatttccctttatcaacccctgcccgcccttcctcttctttctgcctacctcaagaaaacctatttacatatgcatttatgtatgtgtgtgtatatacacacacatacatacatccatatgtaatatatatttctatgttttgaccttaaaggggataagcataggaaaatgagacaaatgtcacacacacacacacacacacacacacacccctcatattcggatattcgcagtgtgcagacccgattgattataaattyccctgcccacgatcagcaggcgtcttctcccatttaccttcaaagccagagccaaagagagcaatgaccttgcagagaaattcatcacctgcgagaaagactgcccctcctagagcgcaggatgggacagagacaagagcaacaggcaaagga

SEQ ID NO: 719861 - DNA, 618 bp, Homo sapiens
ttcattgtatataacaaagcaacttatttttgtktgttgattttatatcctgtaacatttctgaattcatttattagttatataattttttgtgaaaggatttctgtttcttcactcacagaaataatttgtctctcacagttactgctcaaagactgattataggccacccactcaattggcttttcctccaatatactgaattgtaatacttcatttgcatggcctatataatagaaaatcatattttttgtatttaatctcctgctttcaggtaatgtggacacctttttgtgtgtgaccttcttaatcagagaaagtaatgcaaagtactgaaactgaaagcttaggttaattcgagactgaagcccggtataattcactgatcattgtaaaactctgcgtaggaaatgtaactgggatgtctctttctgtaaatagattagggaacaaatggcaaattattcgccatatcactaatgctcttttcagtcaaggcttcaaggcttatccctgctggtctaccgattctcttgtggttacttgggtccaggaagaaaaggtgttcaattgtgtttgagtctatcttatgaacagcttattgctgagtctgcacaa

SEQ ID NO: 719862 - DNA, 626 bp, Homo sapiens
tatcagatccaggagtctttgtgcagagactatggggttttctaggtatagaatcatatcatctgcaagagaggaagtagtttgacttcctctctttctatgtggatggcttttatttgtttctctttttatattgctctggctaggacttctctattttcagttttttgagtaaccttcatactgttctccataacggctgtgctagtttacattaccactaacaatgtttaagagtttctttttcttgcatcctcaccagcacttgttattttttgtcctttaggtgatagtcattgtaactggggtgagatgatagctcatttggttttgattttcaagttattgacaattagtgatggtgagcagttttttcatacactgttggscatttgtatgtcatctttcaagaaatatctatatagatgatttgcccattttaaaatgggatcatttagtttttgctgttgagttgtttgagttccatgtatattctggatattaataccctattggatgaatcgtttgcaaatatttcctccatttcctccattttcttctagtagttttatagttccaggtcttacagttaagttattttgaatttatttttgtatatggcaaga

SEQ ID NO: 719863 - DNA, 521 bp, Homo sapiens
cccattgtgcaggaatacacttagtgacaatcatgacagtaagtgtatttttttgtacttgctaaaatgttgcaaatatataggcttaaaaatttatcagttgcctctgcaaaataaagctcagcagtattttcttctttgaatttactgtgatttaatcatactgaaataatttgaaaataaatttccaaataataatttggaagtccacgggaattcttttaaatcaagaatattctgggttatttagcagatttgaaattattgatcagattttcattattgtttggccaacctttcttgtagaacacctcagtttgggataaaggaaactgaagaaatatttaktaactcgttgagcatccaaaatagatggctcttggccagtatattctctgtggccaggaaaggagaaaataaatgcacattcgttgatcacagagattgaaaaagacaagaaatgggtaatcaggaaaagcctgggttctccttcccctgagacttggtaggtgagagaccca

SEQ ID NO: 719864 - DNA, 2277 bp, Homo sapiens
atcagctcccctgcagtcaggttattgagttacacagacatataatacaaatgtattataacataaatatactaagtaggtattatgggtcagataatgtaaatgtatctgtaaaggtccacttttttggaaagagaaattcacagagaagggaaatgagcagtcacccccaaagtgtctattttatggtgtttgagagtaaaatggtatataagaatgagatggccaggcatggtggctcacgcctgtaatcccagcactttgggaggccgagccgggcggatcacctgaggtcaggagttcgaggccagcctggccaacatggtgaaacccagtctctactaaaaatacaaaaattagccggttatggtgcacacctgtaatcccagctactcgagaggcggaggcaggagaattgcttgaacccaggaagaggaggttgcagtgagccgagatcacgccactgcactccagtctgggcaatagagcaagactccgtctcaaaaaaaaaaaaaaaaaaaaagaatgagacagcatcgtttctaacaagtgcaccagagtgccaaaagatgatctgtgtagccagacatttttaggcacagtggctcatgcctgtaatcccaacactttgagaggccaaagcgagtggatctcttgagcccaggagttcgagaccagtctgggcaacatagtgagacctcgtctataaaaaaaaaaaaaaaaaaaaaattaggtgggcatggtggwgtgcccctgtagtcccagctacttgggagactgaggtaagactatcacttgagtcccaaaggtcgaggctgcagtgagccatgactgtgccactgcactccagcctgggcaacagagagaggccctatctcaaaaaaaaaaaaaagaaagaaaaagaaaaagattattttcagtgtctactcagagcattcagaacattttgtgtggttgtatgatcagtatagtctagaagctagccagacatttgaaaacctgtgattatttttctttcttttcttctccaataaattaattggtttagcagtatatagccacaacctcagtgttgcattagtctgtgtaggtaattaatacatcctgaagtaaactattcacgcctgtaatcccagcactttgggaggccgaggtaggcagattgcctgtggtcaggagttcaagaccagtgtggccaagctggtgaaaccccgtccctactaaaaatagaaaaaaattagctaggcgtggtggcatccacctgtaatcccagctaattggaaggctaacacagaggaatcacttgaacccaggaggtggaggttgcagtgagctgagatggtgccactgcactccagcctgggcggcaaagcgagactctgtctcaaaaaaaaaaaaaaaaaaaagagagagagaagtagttgaacaaccaagacacacaaaattattaatagttgaaaataacgtggccgggcgtggtggctcacgcctgtaatcccagcactttgggaggccgaggcgggcagatcacaaggtcaggagatcgagaccatcctggctaacacagtgaaaccccgtctctactaaaaatacaaaaaaaaaaaaaaattagccgggcatggtggcaggcgcctgtagtcccagctggaggctgaggcaggagaatggcgtgaacccgggaggcaaagcttgcagagagccgagatcatgccactgcactccagcctgggcaatagagccagactccatctcaaagaaaaaaaaaaagaaaaaaaaaaaggaaaagaacgtaatgagagacctgcctggagtatttatattttaaagagaaggaacaccaaaagagatagcacctcaccttgaaatgttatttcatcttgaaataacatttccctgttgcagaagtattgatatgtggctgatgggtgttggaattttctctcgtcatgccacagcagtgaccacctattctgactcactggcttcatgttgagctttcaaaacaagggctagaaaaagttaaagatatggttgtgagtccatggatcaccgcagtgaagttgtgtgaagaaaagtgctttactcagtccgagagatgaaatttccaggcattgtcagtcaatttggctagcatgcaatgattttttgataatttaccttccatagcaatgtgacttaaaagtttgaagaggaatttcttggaattgtccaaaaatatttattttaatatataaagaaccagttatttgtgtcctgactgatttggagggaatttcc

SEQ ID NO: 719865 - DNA, 1453 bp, Homo sapiens
tgggagaaccagaccacagaaggtcagtggtatggattccaactcagaagacgacttcaaataagagatgaggttgtagcatattcttgaacaggagaggggaatccagctgtaatatctgttatcattgacaaggtctactagacaacaaatgttagatacattattgtatatataatgcagaaataacacattacatatctttaaaaatgatatagcttagttttcattagtgtttaatacaaacgtccattttacagtcaattgctctttaagtatctcttttacatttttctcttccttcttttcaagagcaattttaagagagaatcagaataggcagagagttaaaagaaaggttaatgaaaatggggagactctgctaatgtatttccttgggcaaattgcagaacactggcacaatcagtcggattgtttgcagcctccaggttgctgcctgtaggtaactggggatgagccattctctgtgctgagtgcctttcttgcagtgtgatgtgtcaggctgttccagctccaatgttggctttcctgtggggcgctcatcactgtcactcatactacaaagatgttaccaagtcagaaaggggaaaaagcccccaaaaacaacaacaacaaaaaacaacaaaaagctccacgatgcatgtttctagaatgtattttgtttacacataggtattaraagtttaaaatgaataacaagagacctactgtccgaaaacattgttacatacattatttttatttaatcataaaaccaaatgtaacttttcttgctaaaatgtctcctgtaagtataaagtaaggtacatttttgtttgaaagatgacacattttgtaaaacaaaaaactttaaaatctttccttttgcttccaggtccctaattttccttgctcaccacataattggcacattttccactgtgatctagaagttgaatgaaattcttgttttaacatttaccagtaaactttattcatttgggaaatgataagaggtacttagcgtcagttattggtgatccaagtactaagctctgcactccataatttacatgatatgtaacagaaactatgcaaacaagtcactatgtccatttatgaatgaagaaatactcaaagatgttaaatgcctcattcgaggtcacattataagacagtaagtaagcttgtatttgacccaaattctacacacccaattacattgcactcaatacaatttttttttttttttttttttttgagaggaattctcttcttaactgtgaattaccacttccccacgactcagttaagtcaactgtgcggtctgagacttctctctttcttagtgcacataagctatggaggcatgatttctttttattacttctggtttctacttttgagtagttttaatttcttaatttatacaaatttcggttgtcacacataa

SEQ ID NO: 719866 - DNA, 586 bp, Homo sapiens
atttcaccacgttggccaggccagtctcaaactcctgacctcaagtgatttgtcttccttggcctcccaaattgcttggattaaaggtgtgagccaccgcacgttgccaaaaaatacttatttttctttatttactacttacatgtatgcccaaacctcagtgatatcrtttggatctgtatccccacccaaatctcatgttgagatgtgatacccagtgttggagatgaggtccggtgggaggtatctggactatgggagcagattcctcaagaatggcttgggccatccccttggtgatgagtgagcttttgctccaagttctcatgagatgtggtcaattaaaaaagtgtgtggcaccaccctgcttacacacacacacacacacacacacagacacacacactctttctctcttgttcctgctctggccatgtgaggtgtctgctccccttttgctttctgccatgactggaagctccctgaggtctccccaaaagccaagcagatgccagcaccatgcttcctgtacagcatgcagaactgtgagccaattaaacctcttttcttcataaattatgcagtc

SEQ ID NO: 719867 - DNA, 1073 bp, Homo sapiens
tatctccctgtcataattaatcaagttattgcttgtctactttctctgctaaactataaatcccttgtttaccaccactatatycctagtagctggtacaataacttgcacatggagaacaccaggaactcctcattgaaagggaatagcaagctcaagctcagtttgtataggcaatacacaactgacttcacaaattgagttagacttgggttgacttcagagttcaaatttaacggtgtcctctctccctaatctcctggatcctcttcccaggaattcctaagaaacttcactagccttttgtggtagcctcttccgatatttaaactgtttttgttatagaaagataaatataaaatgatttattaaaagttgattaattatttgatttagaagttaagagagaagatgagtagtggttctttgctgttttggcacagaacactgaaagcctgataaaatgtatcaatcatcccttccctattcctctcaaaataaaaataggcaatatgcaataacattttatatttaattttatattaagtttccaggggttgattttacccaggttaagaaatcttgtgcaagcaactttaagtaacaaatcaaggacagaattttctatgtagtctgactgtgaaagggaaatttctgacatgggtttggaaatatagattatagcagctgactgtgaaagggagatttctgtcatgagtttggaaatatagattatagcaggtatttgaatagagttgtttcattcaacttcgttttgttataacatagacaagggaaaaaattgattccccacagaggccactgtttgtgtggagtttgtatgttctctccacgtctatgtgagttttctccagatactcagattttctcttacccctccaaagatgtgcaccttatgtttactggcctgtctgaatggttccaggctgagtgactgtgggtgtgagtgtgcatgcaccctgtgatgggacagcatactgtccaaggctggtgcctacttggtgcctgaactgccagaataggctctggccacctgcaaccctgaactggag

SEQ ID NO: 719868 - DNA, 627 bp, Homo sapiens
aaaactgtcttcaaatattagaaagacttgtcataaaatattcatattctgaacggccctacagagcagaaccaagtagaagttaagagagacagatttcagtttggtttaaaaaagagctttttaaactttcagagctagctcaagatggactatgctcttttagtaggtggtgatatttttgtcactctggtgtgcttcagtgatttaacaagtactgggttgaaatcccagtgctcagcacccaaaaaattgttttagcttggaataaagaacacttgatcagaagatatcagtcatctatctctagccacagactcccatctgagggccctgggatgcttttctgtatgttcactctctgacacagaagtgaaacgtccatctggtctaccatttgatgtaccctaacaatctggwactccaaagtgcagtgtgctgggaaaattggttttggtctccaggggatctctcccctttctctactataattaacatcacaaggatttatgctaaattcatcatagtttcctatagctaactgcaaaatgtagacagactaactttctgatgaataagaacacttttgaggaaccatggaagtttcctcttaatgatctttcctgt

SEQ ID NO: 719869 - DNA, 946 bp, Homo sapiens
ttgtgtgaagagggcaatatatttttgttttcttaagacttttttttaaataattacactactctatatttatcatttgttcatttaaaagcaacttataaaacatgaccttttaaagtccataagtttacatgatgcttttttaatgtaattttatgaggaataatgtacttaattttgacatttaaaataattatactgcactatagacacaagctctaattatgcttctgaacaatatttgcttttcataatcaagcataatattttaagagtattttcatgagataaaaggaaaaaaattaagtagccagatatgttcttattattttccttctttctttccaaatattctcaaagtggataagtcactcctcaagcatggcaaatataatatttgtagcaaaaagacttgaatttttagagatggcaggactgtgattgggtaacactgtcttagaacattctttcacaaggaacagaatcttaaacaagttcaagaaaatgcagtgtattagggagataccaatttaatggactccaaagtgaagtcacaactccagacataaggaaaggcaggagctgggtagccacaggggcctcagcagcaaatgttcatagactctgactctcacagcctaccayaaacagtgtgagacagtgagtctgactgttttggtccaggttatgtatgactgactccttcaggccaggctgtactcttgattaaattagagtggtcagggatatgaacagaggcaggatttggaggaaaacttatcttcttagaaggtgagtggaaggagaaaataattggcatatatagtgcatttgttaaaataattaaaacttggatcatgcaaagataaaagttatcagttgcttcaaatatagctccaaaatttctgtgccaacatttgaattaatctcagtaaaagatcaaaga

SEQ ID NO: 719870 - DNA, 352 bp, Homo sapiens
tttayatgtgttatgttgtaaaacatgtgaaccatgacttctggagtatagaaagcatccaacagagagaggtagacagagcttaatgacacaggaagaagataaatgatgaaagtaaagtcatggagaaggcagcacatgtagaatgattcacctttgccgagagatagaaacaccaccaatgccaccccaatattttcaggaaaaaggagagaagttgttcctggcagatgcaggtaggtgtatagatttggtcctgagaacataatgggcatttctttgaatgatttccattctccatgtaaaatgtaaggcaagattgcatgtgcaagtgaggaggaaaaaggtaggg

SEQ ID NO: 719871 - DNA, 1090 bp, Homo sapiens
tcactttttgcttcttgaaggagtgtatggccagcttatgccttgctgactccatgacatgatgagagtcaggcttacgaagacagatcccattaattttttttctccagtcataccttttgtctctcacccagtgcctctctcttcattcccatttccatcaaatcttggtcacaggatatgctgactccttctactatttactgcattatgtttttattaactcattgtaagtcatagagtcatgtgtagattttaactatctatgaagggcaagattaagtctaggctgtcatctttcctcattggaaattgagctaattcatcatgttgcagtttacagttagatactcttttgacccagcacctggttctcttgtacactcccggagytgaatcctcttcttggcacagatactacattctcagaaaccagagttccctgcatttacctccttttgcttaaatagagatgcatagctatgcttttatagttcaatacataattcattgaataaatacttcaacccattcaaagaacaacttccaggagtacagcaactggaaatcaggtcatgtccaggcatttatcagaaacaaatggttgaattagttgtatgaatttcaaaatttcagagccaatttttatgatatggagaagcattttgatacaacataaagatgaaatgctcttctcttctccatacaaatgagcttgaagtaaggtaaaggggaaattgcatttaatagcttaacactcaaaggacactacatttttacttctgagattgttaaaactgattccataatattttgttaattttctcactgaggaaatggaaatgaagattgaatcctagattgattaataaatatccaaagctgcttattacttttagaatttcagttcattgaaatcaggtacaatgtctgatttttggttattaatcaaatatttctggttttttcaactttatacttcaaattatatatctccttccttcttcatcttccttatttcataactcgggggacaaattctaaaagcctcactggcttagtcatcagaatttgtaatcgaaaggaactt

SEQ ID NO: 719872 - DNA, 1090 bp, Homo sapiens
tcactttttgcttcttgaaggagtgtatggccagcttatgccttgctgactccatgacatgatgagagtcaggcttacgaagacagatcccattaattttttttctccagtcataccttttgtctctcacccagtgcctctctcttcattcccatttccatcaaatcttggtcacaggatatgctgactccttctactatttactgcattatgtttttattaactcattgtaagtcatagagtcatgtgtagattttaactatctatgaagggcaagattaagtctaggctgtcatctttcctcattggaaattgagctaattcatcatgttgcagtttacagttagatactcttttgacccagcacctggttctcttgtacactcccggagttgaatcctcttcttggcacagatactacattctcagaaaccagagttccctgcatttacctccttttgcttaaatagagatgcatagctatgcttttatagttcaatacataattcattgaataaatacttcaacccattcaaagaacaacttccaggagtacagcaactggaaatcaggtcatgtccaggcatttatcagaaacaaatggttgaattagttgtatgaatttcaaaatttcagagccaatttttatgatatggagaagcattttgatacaacataaagatgaratgctcttctcttctccatacaaatgagcttgaagtaaggtaaaggggaaattgcatttaatagcttaacactcaaaggacactacatttttacttctgagattgttaaaactgattccataatattttgttaattttctcactgaggaaatggaaatgaagattgaatcctagattgattaataaatatccaaagctgcttattacttttagaatttcagttcattgaaatcaggtacaatgtctgatttttggttattaatcaaatatttctggttttttcaactttatacttcaaattatatatctccttccttcttcatcttccttatttcataactcgggggacaaattctaaaagcctcactggcttagtcatcagaatttgtaatcgaaaggaactt

SEQ ID NO: 719873 - DNA, 644 bp, Homo sapiens
aggtaacattttattgcaactgaatttatttcaaaaattattagttttggctgggcgcggtggctcacgtctgtaatctcagcactttgggaggccgaggcgagtggatcatgaggtcaggagatcgagaccatcctggctaacacggtgaaaccccatctactaaaaataaaaaataaatwaaaaaaaatttagccaggggtggtggtgggcacctgtagtcccagctactccagctacgcaggagaatggcctgaacccgggaggcagagcttgtagtgagccgagatcctgtcactgtactccggcctgggcgacagagcgagactccatctcaaaaaaaaaaaaaaaaaaaattattagttttttgttagaccattctcagtctaccttcttcattacaaaactatattgttttactcatgcagattgaccttacagaagcacaggaaactgtaccttcacgatgtctacatctggatgcagagaatgaagttcttcaacttcaacagacattattctctatgaaagcaatacaaaagcaatgtgaaacactacagaagaataagaagcagctgaaacaagaagtagtaaacctcaaaagttatatggaaagaaatatgttagaacgtggtaaagctgaa

SEQ ID NO: 719874 - DNA, 644 bp, Homo sapiens
aggtaacattttattgcaactgaatttatttcaaaaattattagttttggctgggcgcggtggctcacgtctgtaatctcagcactttgggaggccgaggcgagtggatcatgaggtcaggagatcgagaccatcctggctaacacggtgaaaccccatctactaaaaataaaaaataaattaaaaaaaatttagccaggggtggtggtgggcrcctgtagtcccagctactccagctacgcaggagaatggcctgaacccgggaggcagagcttgtagtgagccgagatcctgtcactgtactccggcctgggcgacagagcgagactccatctcaaaaaaaaaaaaaaaaaaaattattagttttttgttagaccattctcagtctaccttcttcattacaaaactatattgttttactcatgcagattgaccttacagaagcacaggaaactgtaccttcacgatgtctacatctggatgcagagaatgaagttcttcaacttcaacagacattattctctatgaaagcaatacaaaagcaatgtgaaacactacagaagaataagaagcagctgaaacaagaagtagtaaacctcaaaagttatatggaaagaaatatgttagaacgtggtaaagctgaa

SEQ ID NO: 719875 - DNA, 644 bp, Homo sapiens
aggtaacattttattgcaactgaatttatttcaaaaattattagttttggctgggcgcggtggctcacgtctgtaatctcagcactttgggaggccgaggcgagtggatcatgaggtcaggagatcgagaccatcctggctaacacggtgaaaccccatctactaaaaataaaaaataaattaaaaaaaatttagccaggggtggtggtgggcacctgtagtcccagctactccagctacgcaggagaatggcctgaacccgggaggcagagcttgtagtgagccgagatccygtcactgtactccggcctgggcgacagagcgagactccatctcaaaaaaaaaaaaaaaaaaaattattagttttttgttagaccattctcagtctaccttcttcattacaaaactatattgttttactcatgcagattgaccttacagaagcacaggaaactgtaccttcacgatgtctacatctggatgcagagaatgaagttcttcaacttcaacagacattattctctatgaaagcaatacaaaagcaatgtgaaacactacagaagaataagaagcagctgaaacaagaagtagtaaacctcaaaagttatatggaaagaaatatgttagaacgtggtaaagctgaa

SEQ ID NO: 719876 - DNA, 644 bp, Homo sapiens
aggtaacattttattgcaactgaatttatttcaaaaattattagttttggctgggcgcggtggctcacgtctgtaatctcagcactttgggaggccgaggcgagtggatcatgaggtcaggagatcgagaccatcctggctaacacggtgaaaccccatctactaaaaataaaaaataaattaaaaaaaatttagccaggggtggtggtgggcacctgtagtcccagctactccagctacgcaggagaatggcctgaacccgggaggcagagcttgtagtgagccgagatcctgtcactgtactccrgcctgggcgacagagcgagactccatctcaaaaaaaaaaaaaaaaaaaattattagttttttgttagaccattctcagtctaccttcttcattacaaaactatattgttttactcatgcagattgaccttacagaagcacaggaaactgtaccttcacgatgtctacatctggatgcagagaatgaagttcttcaacttcaacagacattattctctatgaaagcaatacaaaagcaatgtgaaacactacagaagaataagaagcagctgaaacaagaagtagtaaacctcaaaagttatatggaaagaaatatgttagaacgtggtaaagctgaa

SEQ ID NO: 719877 - DNA, 644 bp, Homo sapiens
aggtaacattttattgcaactgaatttatttcaaaaattattagttttggctgggcgcggtggctcacgtctgtaatctcagcactttgggaggccgaggcgagtggatcatgaggtcaggagatcgagaccatcctggctaacacggtgaaaccccatctactaaaaataaaaaataaattaaaaaaaatttagccaggggtggtggtgggcacctgtagtcccagctactccagctacgcaggagaatggcctgaacccgggaggcagagcttgtagtgagccgagatcctgtcactgtactccggcctgggcgacagagcgagactccatctcaaaaaaaaaaaaaaaaaaaawtattagttttttgttagaccattctcagtctaccttcttcattacaaaactatattgttttactcatgcagattgaccttacagaagcacaggaaactgtaccttcacgatgtctacatctggatgcagagaatgaagttcttcaacttcaacagacattattctctatgaaagcaatacaaaagcaatgtgaaacactacagaagaataagaagcagctgaaacaagaagtagtaaacctcaaaagttatatggaaagaaatatgttagaacgtggtaaagctgaa

SEQ ID NO: 719878 - DNA, 644 bp, Homo sapiens
aggtaacattttattgcaactgaatttatttcaaaaattattagttttggctgggcgcggtggctcacgtctgtaatctcagcactttgggaggccgaggcgagtggatcatgaggtcaggagatcgagaccatcctggctaacacggtgaaaccccatctactaaaaataaaaaataaattaaaaaaaatttagccaggggtggtggtgggcacctgtagtcccagctactccagctacgcaggagaatggcctgaacccgggaggcagagcttgtagtgagccgagatcctgtcactgtactccggcctgggcgacagagcgagactccatctcaaaaaaaaaaaaaaaaaaaattattagttttttgttagaccattctcagtctaccttcttcattacmaaactatattgttttactcatgcagattgaccttacagaagcacaggaaactgtaccttcacgatgtctacatctggatgcagagaatgaagttcttcaacttcaacagacattattctctatgaaagcaatacaaaagcaatgtgaaacactacagaagaataagaagcagctgaaacaagaagtagtaaacctcaaaagttatatggaaagaaatatgttagaacgtggtaaagctgaa

SEQ ID NO: 719879 - DNA, 644 bp, Homo sapiens
atctgcaattctgttttcccaaatacctgtgataccagtgaaaaactgttataaatttctttctgattttcatacaagttaaaatgcaaataatatattattttgcacaacttaatttttgtttgttcgtgtatcagtaggccatcaacttctcctcatgtcaatttacatggcttccttcattctttccaaaggctgaaatgtattcagttacaagctgaaacagaaattgctaagttcctcctagggtgaatgccattaagctttggtacttcataatttcaatttttaaaaattatgtaatttttatcatataaaactctatgcttacattaatctatttctacatgctatattcttaaaattagaatttctagttaattaaatagaatttctagttaattaaatacatttcaaagttkatatatgctgtgtgtattagtccatttttatgctgctcataaagacatacctgagactgggcaatttacaaaaaaagaggtctattggacttatagttccacatggctggggaggcctcacaatcatggcagaaggtgaaaggcaaggaggagctagtcacattttacatggatggtggcaggcaaagagagagagattttgcagggaaattccccctataa

SEQ ID NO: 719880 - DNA, 610 bp, Homo sapiens
aaatcatataacaccctgttgggataataataaaatctctttggaagcaattggtgagtaaaagataaaatagaagartatgtgttcttagagtagcctctctacctgtagaagtgtgaagaagttctaacacatcttcgtggaaatataaacagaactgttcatataattgataataaaaaatagaaaaaactcgaatgctcattagaaagaaaatgaataaatgatgtcatattcatacctgcaataaaatggagttatctgtatctgtacagataatttccatcaacattatttaaaatgaaagtctaatatcagttttataaattatataaacattcattcaaaagaaattatcaacatgcaatgtaaaatgtcatattgtatatttttatatgtaaatacgtagaagttatatgttgccataagcattgcctctccctctctgtgatgaacaaaatgaatataaggtactaaatttctcagagaaaaacaggaataatatcaaggtgagtatcttgcgtgtttcactttgatctgtagtatttcgcttcttaagaaattaatctgaagtaaaccttataaatgttaatattttaaaaattgaata

SEQ ID NO: 719881 - DNA, 610 bp, Homo sapiens
aaatcatataacaccctgttgggataataataaaatctctttggaagcaattggtgagtaaaagataaaatagaagaatatgtgttcttagagtagcctctctacctgtagaagtgtgaagaagttctaacacatcttcgtggaaatataaacagaactgttcatataattgataataaaaaatagaaaaaactcgaatgctcattagaaagaaaatgaataaatgatgtcatattcatacctgcaataaaatggagttatctgtatctgtacagataatttccatcaacattatttaaaatgaaagtctaatatcagttttataaattatataaacattcattcaaaagaaattatcaacatgcaatgtaaaatgtcatattgtatatttttatatgtaaatacgtagaagttatatgttgccataagcattgyctctccctctctgtgatgaacaaaatgaatataaggtactaaatttctcagagaaaaacaggaataatatcaaggtgagtatcttgcgtgtttcactttgatctgtagtatttcgcttcttaagaaattaatctgaagtaaaccttataaatgttaatattttaaaaattgaata

SEQ ID NO: 719882 - DNA, 889 bp, Homo sapiens
ccccactccaagacagggatccagaccatgctggagagagcaaggccatggctgatgagacatctgaagtgcctcgggcaacactgcaaagctgcgggaggctatgccaggggaagctgctggctgctgggtgctgctggtcactgcatgctcatgaattgggagctggagaaggtgacctcagcaggatctggtccctgcaaaaactattatgtgtgggccagaggctatggaaagctgtggcctgcaggacccaggtgtggaaaactttgcctacccaagagctgagcgccacagaaagtgggtgctgcgcttgtctcctcctgtgtctcttcagcgccctctattgatgaggccgaggacgggatttctagcaagatgggcttctataagcaatgaagatggaagtcaactgaactgtgtagtttacctgtcagatcytaaagccaaaggggaaaaccttactcagtggatgtgagctcccactcaaggaagttgctccttggtcttactactctaggcttcaaagatggtaggaggggccgggcgcggtggctcacacctgtaatcccagtgctttgggaggccgaggtgggtggatcacctgagatcgggagtttgagagcagcttggccaacatggagaaaccctgtgtctactaaaaagacaaaaattagccgggcgaggtcgcgcatgtctttagttccagctacttgggaggctgaggcaggaggaccacttgaacccgggaatcaatgcaaaatgatttattatgtgatgacttaaaatctgttgaaatgaaactgatctgtttcatctccaaagagcagactgcagaaatttgagagggacatcagagttatggtgagaaacaggtggatgagtggca

SEQ ID NO: 719883 - DNA, 889 bp, Homo sapiens
ccccactccaagacagggatccagaccatgctggagagagcaaggccatggctgatgagacatctgaagtgcctcgggcaacactgcaaagctgcgggaggctatgccaggggaagctgctggctgctgggtgctgctggtcactgcatgctcatgaattgggagctggagaaggtgacctcagcaggatctggtccctgcaaaaactattatgtgtgggccagaggctatggaaagctgtggcctgcaggacccaggtgtggaaaactttgcctacccaagagctgagcgccacagaaagtgggtgctgcgcttgtctcctcctgtgtctcttcagcgccctctattgatgaggccgaggacgggatttctagcaagatgggcttctataagcaatgaagatggaagtcaactgaactgtgtagtttacctgtcagatcttaaagccaaaggggaaaaccttactcagtggatgtgagctcccactcaaggaagttgctccttggtcttactactctaggcttcaaagatggtaggaggggccgggcgcggtggctcacacctgtaatcccagtgctttgggaggccgaggtsggtggatcacctgagatcgggagtttgagagcagcttggccaacatggagaaaccctgtgtctactaaaaagacaaaaattagccgggcgaggtcgcgcatgtctttagttccagctacttgggaggctgaggcaggaggaccacttgaacccgggaatcaatgcaaaatgatttattatgtgatgacttaaaatctgttgaaatgaaactgatctgtttcatctccaaagagcagactgcagaaatttgagagggacatcagagttatggtgagaaacaggtggatgagtggca

SEQ ID NO: 719884 - DNA, 1489 bp, Homo sapiens
atcagaatctcattctgttgccaggctggagtgcaggggtgtgattatacctcatggcagccttgaactcttgggctcaagcaatcctcccacctcagcctcctgagaaactgggactataggtatgtatcaccatgtccagctaatgtaattttttttttttttttttgagatggagtccctctctgttgcccaggctggagtgcagtggcgccatctgggctcactgcaacctccgcctcccaggttcaagctattcttctgcctcagcctcccgagtaactgggattacaggcaagagccaccatgcctggctaatttttgtatttttagtagagatggggtttcaccatgttggccaggctggtcaccaactcctgacctcaggtgatccacctgccttggcctcccaaagtgctgggattacagtcgtgagccaccgctcctggccaagaccatgtttcttaaaaaacaaacaaacaacaacaacaaaacaaatatctatatctatatctatatatctatatmtatagatatagatatatatacacacacacacataagcagagggacaggaaccaagaacatcacacgatttcacatcctagggtcctccagagctcagattatagatggatggccgggagggggtgtctaccactctaatttgttaatcaccagagaatcgcttgaacccgggagacggaggttgcactgagctaagattgcgccattacactccagcttgggcaacagagcgagactacatctcaaagaaaaacaaaaacagcttggctaaaaagaccagctcggccttgccaggagtgtccacaagggggcagtcgaacatttgcttacgagttccccaagggcgaaagatcggtttttaacctcattcaggaacggaagatggaatctcgggctttgacggtcgataaattagaaataagatccttgcacaaagccagaacccttgaagggctgcaatcactttgtaaggaagaccagtaaacttcccactggccagggaggcaaccgggaagctcatctcagctgttgccttggctgggaataaaacaaggtttcctaatctccaggcgggcaaggagcctaaatcagtctattccgtgggaaattcaagctgatacattatcataaaaattaatcccaggctgtttctatatcatggtctgagtttttgtcctcctattccaataaatgtgttgaaacataatcatcaatgtgatactatggaggggggtgattagatcatgaaggtagattccttataaatggaatggcgtctgtataaaagaggcttcagggagttccctcacgccttccatcatgtgagaacacgtgagaatgtgcaatctgtgaaccaggaaacaggtcttcaccagataaagaacctgagagtgacttgatcttagacttcccagcctccagaactttgggaaataaatttctgttgtttacaagccactca

SEQ ID NO: 719885 - DNA, 690 bp, Homo sapiens
tcagcagcatgaytgaatcacacaagacaagaaatatcttcaaaatgctgtataaagaagaatgttattattcaaaaataggtcaaagattcagagaatgttccaagacaaaaatctcactaaagtaacttctaagatatacttaaagaagatagaatatgacctaagaaggaagtcctgataggcacaagcaaatggtgagaaaataaatctttaaacacttggtaaattaaaaataatttattgaatcaattattttctccttataaatatcatcactattgtgtggcttaaagtaacactcatttattatctcacaatttatttagaccagaagtctaggaggctcaactgggtactctgcttaaggtcttactgagcaaaagttgagatggggctggggctgcacttctcctctgggaaatcagagtcctctttccttaagttctctggttgctgcagaattcatttccttcttatgctttccatgcaagtcccttacttcttcaaactagcaacatttcatgggaagtttcctgtgcttgcaatctcttacttcttctgctgcatttcacaggctccagtcagagaaagttctcagcttttaaggatttatataattttattgggaccacccagaaaaccatggtaatctccctattttaagttctataacttaaaacatctaca

SEQ ID NO: 719886 - DNA, 594 bp, Homo sapiens
ggggattcaccatgttagccaggatggtctccatcttctgatcttgtgatccgcccaccacagcctcccaaagtgttgggattacaggtgtgarccattgtgcctggccatgaatttttaaaaattaaaattatatcaagtatcttctcagtctatagtagaataaagccagaaaataataacaatactatacaaatacatgggaattaagcagcatggctaattacccggctccagggtgattagagtaggtagacagtggccacagagtatgagagcccaaaaggaagtggttggtacattcacttaattagctgttcaaaacagattttcaaaacaaaacaaagcaaaaaacatagtcacctcactttttattgttgactttgataatttgtgtcttctattttttctttttcagcctcagtagatttatgaacgctattgattctttcaaaagcctacctttcagttttgttgttttactctattctgtcttgaattttgcagattcttactataatgcttaatagttcttttattctgctcgtttggcatttattttgctctttaaaaatattacattgaaagcttaga

SEQ ID NO: 719887 - DNA, 594 bp, Homo sapiens
ggggattcaccatgttagccaggatggtctccatcttctgatcttgtgatccgcccaccacagcctcccaaagtgttgggattacaggtgtgaaccattgtgcctggccatgamtttttaaaaattaaaattatatcaagtatcttctcagtctatagtagaataaagccagaaaataataacaatactatacaaatacatgggaattaagcagcatggctaattacccggctccagggtgattagagtaggtagacagtggccacagagtatgagagcccaaaaggaagtggttggtacattcacttaattagctgttcaaaacagattttcaaaacaaaacaaagcaaaaaacatagtcacctcactttttattgttgactttgataatttgtgtcttctattttttctttttcagcctcagtagatttatgaacgctattgattctttcaaaagcctacctttcagttttgttgttttactctattctgtcttgaattttgcagattcttactataatgcttaatagttcttttattctgctcgtttggcatttattttgctctttaaaaatattacattgaaagcttaga

SEQ ID NO: 719888 - DNA, 670 bp, Homo sapiens
tcacaggaaatgtttatgtactgggcctatgacaaaggctccctgtgtcacttagccaagaattaaactgtttttggagagtttcttttggatatgtgaaatgagttccaaatagctatatttcagccagtaagttagcaatagttatattctttttttaataaaatgagaaatatgtacataacgtatgtgaaataatagtactgttgtacatacaacatagcacgctcaacaaaaatgcttaggttaaataatttgaaattaatcacagttttggtaactgctggcaatgaggtggtatctatttcctacaaaaaatgtctttcctcatattttgtatttgcttttgtagttaccaaatttcaggtggaactgaagaaaccaccaaaccaattctaatccataaaacacagtctacaggtttgggactgtcttcaaacttgaaatttaaattcaatgactttggaaatatttcttatttcacaagagacrcaactcttgcacaacaatagttctagtgactacagttaaaaaagttgagaaaaaatgttataactgaaaattttctacaatgttatggattgaatgtgtatgttccctcaaaattcaaatgttgaaatcctaactctcagtgtagctctatttggaataagaatcaactaaagttaaa

SEQ ID NO: 719889 - DNA, 2703 bp, Homo sapiens
tcaccaaaagatcagtcagcaagatgaatattttaatgcaacatttaaaacataacgtaggaaaatccaagataaacaaaatgtcaacattttaaagaaaggaaggatcagtagtactgatttttccttttgcttcagatttcattatagcttggcatggcactatcaacaaatatgtatttaatttactatcttcattttacatttaaagagacagaaatactaaagaattgcatgacttgccatgatcacacattagtgttgtactgaggacagtgatatcaggcagcctggcaccagagtccttacacttaatccctacactagaaatgaaatcattttaacggtttacttttaataagctacgttttacctcaaccctggtatttcccctgtagactgtggtaatgataatatttgtattcttttttttctctgcccatgacattattaccttccttgtagtgtaaggtggtatgtattactgtttaagagtattaaacacagacakagcattaaattttaaagactcttcatgcacctgttctcctggttagcaagataattctggtcaataagatggtgaaggagaggttgatcattctcttatagaaaagagatacagaacttactctggggaaatacagcaatataaaaaataatgtgtttaaaacataataacactggaaggagatcatgttctttgcagcaacatgaatggagctggaggttattatcctaaataaactaatgcaggaacataaaatcgaataccacatgttctcatttataagtggaagctaaacattgagtatacatgaacacaaggaaggggataatagacactgaggccttacctaaaggtggagggttgaaggaggatgaaggttaaaaaactataacacttactgagtactctgcttattacctcgtctctactaaaaataaaaaaaaaagccaggtgttgtggtgcacgcctgtaatcccagctactattacctggctgacaaaataacctgtacaccaaacccttacaacacactattaacctacataacaaacctgaacatgcacccttgaacctgaaacaaaagttaaaacaaaaactattttatttatataaaatatttgagcacagaggaaatctatagttacaaattatctcattatgtaactaaaaacaacttcatagtatgaatttgtacttgttaattgtatctgaaataatatatgaaaagtaatagtaaaacttcatttgaccattacatgtgtttagcaaaaatataaatcttatatttatttttatgtatttgaaatacaaaataaatagtaagtttactatatgtttaaaatgcatagagggaagtatagtgtttaaaactaattatgataattagattttcgtatattaatttgccttgttagttaatttttatgcctaaccacatcctttctactaagtacatgtatttgagggctaatcttattttagttgatcaacctaaaacattctcaaatgccccatcagtattgcattatatttaagaagagaaccaaaataaatcatgttatttattgtgtgagactcaacaatcccaatgtttcttgtttctgtttcaatttatgaaaagacctgaataccatactgtagagtgttagacaaaaaaaattagtgagtgatacttgttaaagcactgtaaggcgaactttatcaggatcattgtgataggtctgtaaggaggagaagattgagcttaactcctaatacagcatggacaaatgggaatttatagacaagaaagagtagagaagagggtgtcagtagacggaaaatcactaagagaaaaaaatcaagggtaaaggaatgtgtaagtctgttttgtgttgctatgaaggaatatctgagacttgatactttattttaaaaaataagtttatttggctcatgattctacaggctataccaccataataccagcatctccttggcttaagctgaagcctcagaaagcctttactcatggcagaaggcaaagggggagcaggcatctcgcatgatgagaaaaggagcaagagagaagagaggtgccaggcttttttaaataaccggctctcctgtgaactaatagagtgaaaactcacacatcaccaaggagatggcaccaagccaatcttgagggatccccccctatgaccaaaaacctcccaccagaccccacctccaacactggggatcacatttcaacatgagatttggaggggacaactatctaaaccatatcaggaagattctggctaaacagacctaacaggattctttctgaagatagaccagagtgatcacatatcacttggaggatggtggaggatgaaaaacccagttagatatctaagataatcagacgtcaagaatggagagttcttggtaaactgatttagcaaggttcctggccaaaactggattttacaagaaagtgcataggtaggcctaggagaaggttgagaagctcactcaacttttgctgagaggataaactttgtcaacaatcatcaaaaatttgaaactccttaatctattttttcactccaaagagggtttttcctataatttcacagttcactctatagatgttttaattttcttggtgtctaaattatttttgtgtattagtctgaagtgttcatcagaaatagtttcattta

SEQ ID NO: 719890 - DNA, 2703 bp, Homo sapiens
tcaccaaaagatcagtcagcaagatgaatattttaatgcaacatttaaaacataacgtaggaaaatccaagataaacaaaatgtcaacattttaaagaaaggaaggatcagtagtactgatttttccttttgcttcagatttcattatagcttggcatggcactatcaacaaatatgtatttaatttactatcttcattttacatttaaagagacagaaatactaaagaattgcatgacttgccatgatcacacattagtgttgtactgaggacagtgatatcaggcagcctggcaccagagtccttacacttaatccctacactagaaatgaaatcattttaacggtttacttttaataagctacgttttacctcaaccctggtatttcccctgtagactgtggtaatgataatatttgtattcttttttttctctgcccatgacattattaccttccttgtagtgtaaggtggtatgtattactgtttaagagtattaaacacagacatagcattaaattttaaagactcttcatgcacctgttctcctggttagcaagataattctggtcaataagatggtgaaggagaggttgatcattctcttatagaaaagagatacagaacttactctggggaaatacagcaatataaaaaataatgtgtttaaaacataataacactggaaggagatcatgttctttgcagcaacatgaatggagctggaggttattatcctaaataaactaatgcaggaacataaaatcgaataccacatgttctcatttataagtggaagctaaacattgagtatacatgaacacaaggaaggggataatagacactgaggccttacctaaaggtggagggttgaaggaggatgaaggttaaaaaactataacacttactgagtactctgcttattacctcgtctctactaaaaataaaaaaaaaagccaggtgttgtggtgcacgcctgtaatcccagctactattacctggctgacaaaataacctgtacaccaaacccttacaacacactattaacctacataacaaacctgaacatgcacccttgaacctgaaacaaaagttaaaamaaaaactattttatttatataaaatatttgagcacagaggaaatctatagttacaaattatctcattatgtaactaaaaacaacttcatagtatgaatttgtacttgttaattgtatctgaaataatatatgaaaagtaatagtaaaacttcatttgaccattacatgtgtttagcaaaaatataaatcttatatttatttttatgtatttgaaatacaaaataaatagtaagtttactatatgtttaaaatgcatagagggaagtatagtgtttaaaactaattatgataattagattttcgtatattaatttgccttgttagttaatttttatgcctaaccacatcctttctactaagtacatgtatttgagggctaatcttattttagttgatcaacctaaaacattctcaaatgccccatcagtattgcattatatttaagaagagaaccaaaataaatcatgttatttattgtgtgagactcaacaatcccaatgtttcttgtttctgtttcaatttatgaaaagacctgaataccatactgtagagtgttagacaaaaaaaattagtgagtgatacttgttaaagcactgtaaggcgaactttatcaggatcattgtgataggtctgtaaggaggagaagattgagcttaactcctaatacagcatggacaaatgggaatttatagacaagaaagagtagagaagagggtgtcagtagacggaaaatcactaagagaaaaaaatcaagggtaaaggaatgtgtaagtctgttttgtgttgctatgaaggaatatctgagacttgatactttattttaaaaaataagtttatttggctcatgattctacaggctataccaccataataccagcatctccttggcttaagctgaagcctcagaaagcctttactcatggcagaaggcaaagggggagcaggcatctcgcatgatgagaaaaggagcaagagagaagagaggtgccaggcttttttaaataaccggctctcctgtgaactaatagagtgaaaactcacacatcaccaaggagatggcaccaagccaatcttgagggatccccccctatgaccaaaaacctcccaccagaccccacctccaacactggggatcacatttcaacatgagatttggaggggacaactatctaaaccatatcaggaagattctggctaaacagacctaacaggattctttctgaagatagaccagagtgatcacatatcacttggaggatggtggaggatgaaaaacccagttagatatctaagataatcagacgtcaagaatggagagttcttggtaaactgatttagcaaggttcctggccaaaactggattttacaagaaagtgcataggtaggcctaggagaaggttgagaagctcactcaacttttgctgagaggataaactttgtcaacaatcatcaaaaatttgaaactccttaatctattttttcactccaaagagggtttttcctataatttcacagttcactctatagatgttttaattttcttggtgtctaaattatttttgtgtattagtctgaagtgttcatcagaaatagtttcattta

SEQ ID NO: 719891 - DNA, 615 bp, Homo sapiens
gagacatttgctttcctggacattttctgttcattttacatttgctcaatgaaaaaaatcaggttgcaatacatatataaatagaaaacacagagagacataaatattttttaaaaagaatcagaaacatatgccccaaaatgctaatatgattacatctgggtggttaatatttattttctgtttctattctctttgtgtttccccaaatttgcttgttgacagcacatgtgcattgcttttggccaataaatgtttggcttatttaaagagttatcttgatgatagccaggtgtggtggctcacacttgtaatcccagaactttgggatgccaaggtgagcagatcacctgaggtcaggagttcsagaccagcctggccaacatggtgaaaccccatctctattaaaaatacaaaaatcagtctatcttaaaaaaaaaaattagctaggtgtggtggcacgtgcctgtaatcccagctactcaggaggctgagacatgagaattgtttgaacctgagtggcggaggttgcagtgagccaagatcatgccactgcactccagcctgagcaacagagcgagactctgtctcgattaaacacacaaacacacacac

SEQ ID NO: 719892 - DNA, 622 bp, Homo sapiens
tcaaaataaagagccttactgacatctaccataaatcctctgctgtaaccaggtagagtataaataactccataaaaagagagtaatgctgtcttgcrtttgcacagcactttacagtttagaaagtatttgcttgccatgtccctttcgatcctcctgataggcttgcggggtaggaaggagaggtactgtcatttccatcttcctggtgggaaacaaacatttggagaagttgggtgacttgccccaaggtgacacaatagtgaagggttcaaaccaggacttagttagtttgggtgtcagaatgggtcagagtgggtttgtcttagttagtttgggctgtgtattagtctcttcttgcattgttataaagaaatacctgagactgggtaatttataaagaaaagaggtttaattggctcacagttttgcaggctgtacaggaagcatagctgaggaagcctcaggaaacttacaatcatggcagaaggtgaaagggaagctggcatgtcctacatagctggagtaggaggaagagagcaaaggggaaagtgctacacacttttaaacaaccagatcttgtgagaactcactcactgtcatgagaacagcaaggggcaag

SEQ ID NO: 719893 - DNA, 622 bp, Homo sapiens
tcaaaataaagagccttactgacatctaccataaatcctctgctgtaaccaggtagagtataaataactccataaaaagagagtaatgctgtcttgcgtttgcacagcactttacagtttagaaagtatttgcttgccatgtccctttcgatcctcctgataggyttgcggggtaggaaggagaggtactgtcatttccatcttcctggtgggaaacaaacatttggagaagttgggtgacttgccccaaggtgacacaatagtgaagggttcaaaccaggacttagttagtttgggtgtcagaatgggtcagagtgggtttgtcttagttagtttgggctgtgtattagtctcttcttgcattgttataaagaaatacctgagactgggtaatttataaagaaaagaggtttaattggctcacagttttgcaggctgtacaggaagcatagctgaggaagcctcaggaaacttacaatcatggcagaaggtgaaagggaagctggcatgtcctacatagctggagtaggaggaagagagcaaaggggaaagtgctacacacttttaaacaaccagatcttgtgagaactcactcactgtcatgagaacagcaaggggcaag

SEQ ID NO: 719894 - DNA, 622 bp, Homo sapiens
tcaaaataaagagccttactgacatctaccataaatcctctgctgtaaccaggtagagtataaataactccataaaaagagagtaatgctgtcttgcgtttgcacagcactttacagtttagaaagtatttgcttgccatgtccctttcgatcctcctgataggcttgcggggtaggaaggagaggtactgtcatttccatcttcctggtgggaaacaaacatttggagaagttgggtgacttgccccaaggtgacacaatagtgaagggttcaaaccaggacttagttagtttgggtgtcagaatgggtcagagtgggtttgtcttagttagtttgggctgtgtattagtctcttcttgcattgttataaagaaatacctgagactgggtaatttataaagaaaagaggtttaattggctcacagttttgcaggctgtacaggaagcatagctgaggaagcctcaggaaacttacaatcatggcagaaggtgaaagggaagctggcatgtcctacatrgctggagtaggaggaagagagcaaaggggaaagtgctacacacttttaaacaaccagatcttgtgagaactcactcactgtcatgagaacagcaaggggcaag

SEQ ID NO: 719895 - DNA, 587 bp, Homo sapiens
tgaggagacggggtcttactatgttgcctaggctggtcttggactcctgcattcaattgaccctcctgccgcgacctcccaaagtactgggattataggctttagccactgtgcccagcctaaaacttttgagaaagaatgcttcttgttgattgtctcccctctctattaccttagtgtctggcatatagtaggtgcttgaaagcacttgtttagtgcctaagccaggggctgacaaccttactgtaaaggcccagatagtggattatttgaggctttgggggccatgtgctctcttgcaaccatgcaaccctgccgttgtagtrcaaaagcagccacagacaatactttatttataaactctgaaattggaatttcatataattgtcatgtaatgacgtattattccttttgtctttttcccactaactatttaaaatgtaagaactagctgggcgcagtggctcatgcctgtaatcccagtactttgggaggccgaggtgggcggatgacctgaggtcaggagttcgagaccagcctggacaacatggtaaagccctgtctctactaaaaatacaaaaattagc

SEQ ID NO: 719896 - DNA, 626 bp, Homo sapiens
tcccaagtagctgggattacaggcacctgccaccacacctgactaatttttgtatttttagtagagatgaggtttcaccatgttgsccaggctggtttcaaactcctgacctcaagtgacccacccacctcggcctcccaaaatgctgggattagaggtgtgggccacttgccccggcctaaaacatttttttcctttttgatgaaacagagtctcactctgttgcccaggctggagtacagcagcaagatcacggctcactgcagccttcatctcccaagctcaagcaatcttcctgtctaagcctttcaagtagctgggaccacaggcctgcgccaccattcacagcatttttttttttttttttttttttggtagaaacagtgtcttgctatgtggcccaggctggtctcaaactcctgggctcaagcgatcctcccgtctcactctcccaaagtgctgggattactggtatgagtcaccgtgcccaactattttcacaactttttaagaacacaaattctcagcttgtaaaccatataaaagcaaataatctgctaagccctgctataaatgaaggatcaatagtgtggcggcaaaaagctaagcagaagataagatgtatg

SEQ ID NO: 719897 - DNA, 626 bp, Homo sapiens
tcccaagtagctgggattacaggcacctgccaccacacctgactaatttttgtatttttagtagagatgaggtttcaccatgttggccaggctggtttcaaactcctgacctcaagtgacccacccacctcggcctcccaaaatgctgggattagaggtgtgggccacttgccccggcctaaaacatttttttcctttttgatgaaacagagtctcactctgttgcccaggctggagtacagcagcaagatcacggctcactgcagccttcatctcccaagctcaagcaatcttcctgtctaagcctttcaagtagctgggaccacaggcctgcgccaccattcacagcatttttttttttttttttttttttggtagaaacagtgtcttgctatgtggcccaggctggtctcaaactcctgggctcaagcgatcctcccgtctcactctcccaaagtgctgggattactggtatgagtcaccgtgcccaacyattttcacaactttttaagaacacaaattctcagcttgtaaaccatataaaagcaaataatctgctaagccctgctataaatgaaggatcaatagtgtggcggcaaaaagctaagcagaagataagatgtatg

SEQ ID NO: 719898 - DNA, 1197 bp, Homo sapiens
ggcctgtttatttaccccgtatgtcactttcctttatctgtaactggaaaatgtgtacgaagagcttaatacaatgactgatacacagtgagttctccataaatgttagttattattttaatattacagcatctgtggaaacagtgggtttatatttcagcgtcctgagaaacactcatcctgaacaaygggaacattggccacatccgccattgtcaattttaaataaaagatatgatgactagttggtgagttgatcttgtaagacttttacagatacccagaacggctctacttcttcatattccactttttagttttaaaagtttaaggagatctctgtgatccctgaagaattgtgtgcaaagcagcattaagacgaaaatcttttatatttgtgttgtagcttggaaaactagcgcgtggtctgttttgttccactggctcctaaggttcaggtattaacataaatacagcccattaacacttgttcctctctgtcaggacataaattaagtctgcaggtgttccatgaagctgtacccttggtactaattaagccttgataattaggtttgttaaattcaggactttaagcttatattccctccttgggctaccaaaacggagatgtgcaatatacaagccctcctgacttttttttttttttttttttttcctgcagagagcgttgctgctccttctctattttatttctttattactgtttttttaaatgaaggagtcagtaacaaaccgttcatcattttgccagagtagggtgtaaaccttcatgcagacctgtacatttgtttatgacgagattaaagtcttttctcctcctgttttgtgtcagctcagacactgaaggggaaagtttccagcctggtttctccatacactgaacatgttgaaatctatgccttaagcccaaatgagctgtcactcaagtatgcacgctcatattattaaaaactgtgcatgtaatttgctgggcacccaaataatttgttttttatttttccttaaaaatgagactttctgttaggaaagtgattcatgaaacagtgaagatcctgcctcacaactttcaagaaacccacagaggtccctattcacataagaattttctaagcagaggttccaatttggatatttcgtggccttcaggttatttgtaaccagtacacaaaccac

SEQ ID NO: 719899 - DNA, 1197 bp, Homo sapiens
ggcctgtttatttaccccgtatgtcactttcctttatctgtaactggaaaatgtgtacgaagagcttaatacaatgactgatacacagtgagttctccataaatgttagttattattttaatattacagcatctgtggaaacagtgggtttatatttcagcgtcctgagaaacactcatcctgaacaacgggaacattggccrcatccgccattgtcaattttaaataaaagatatgatgactagttggtgagttgatcttgtaagacttttacagatacccagaacggctctacttcttcatattccactttttagttttaaaagtttaaggagatctctgtgatccctgaagaattgtgtgcaaagcagcattaagacgaaaatcttttatatttgtgttgtagcttggaaaactagcgcgtggtctgttttgttccactggctcctaaggttcaggtattaacataaatacagcccattaacacttgttcctctctgtcaggacataaattaagtctgcaggtgttccatgaagctgtacccttggtactaattaagccttgataattaggtttgttaaattcaggactttaagcttatattccctccttgggctaccaaaacggagatgtgcaatatacaagccctcctgacttttttttttttttttttttttcctgcagagagcgttgctgctccttctctattttatttctttattactgtttttttaaatgaaggagtcagtaacaaaccgttcatcattttgccagagtagggtgtaaaccttcatgcagacctgtacatttgtttatgacgagattaaagtcttttctcctcctgttttgtgtcagctcagacactgaaggggaaagtttccagcctggtttctccatacactgaacatgttgaaatctatgccttaagcccaaatgagctgtcactcaagtatgcacgctcatattattaaaaactgtgcatgtaatttgctgggcacccaaataatttgttttttatttttccttaaaaatgagactttctgttaggaaagtgattcatgaaacagtgaagatcctgcctcacaactttcaagaaacccacagaggtccctattcacataagaattttctaagcagaggttccaatttggatatttcgtggccttcaggttatttgtaaccagtacacaaaccac

SEQ ID NO: 719900 - DNA, 1197 bp, Homo sapiens
ggcctgtttatttaccccgtatgtcactttcctttatctgtaactggaaaatgtgtacgaagagcttaatacaatgactgatacacagtgagttctccataaatgttagttattattttaatattacagcatctgtggaaacagtgggtttatatttcagcgtcctgagaaacactcatcctgaacaacgggaacattggccacatccgccattgtcaattttaaataaaagatatgatgactagttggtgagttgatcttgtaagacttttacagatacccagaacggctctacttcttcatattccactttttagttttaaaagtttaagkagatctctgtgatccctgaagaattgtgtgcaaagcagcattaagacgaaaatcttttatatttgtgttgtagcttggaaaactagcgcgtggtctgttttgttccactggctcctaaggttcaggtattaacataaatacagcccattaacacttgttcctctctgtcaggacataaattaagtctgcaggtgttccatgaagctgtacccttggtactaattaagccttgataattaggtttgttaaattcaggactttaagcttatattccctccttgggctaccaaaacggagatgtgcaatatacaagccctcctgacttttttttttttttttttttttcctgcagagagcgttgctgctccttctctattttatttctttattactgtttttttaaatgaaggagtcagtaacaaaccgttcatcattttgccagagtagggtgtaaaccttcatgcagacctgtacatttgtttatgacgagattaaagtcttttctcctcctgttttgtgtcagctcagacactgaaggggaaagtttccagcctggtttctccatacactgaacatgttgaaatctatgccttaagcccaaatgagctgtcactcaagtatgcacgctcatattattaaaaactgtgcatgtaatttgctgggcacccaaataatttgttttttatttttccttaaaaatgagactttctgttaggaaagtgattcatgaaacagtgaagatcctgcctcacaactttcaagaaacccacagaggtccctattcacataagaattttctaagcagaggttccaatttggatatttcgtggccttcaggttatttgtaaccagtacacaaaccac

SEQ ID NO: 719901 - DNA, 2181 bp, Homo sapiens
tggccaggctggtctggaactcctgaggtcaagcaatctacctgcttctctctcccaaagtgttgggattacaggtgtgtgccaccatgtgtggctatagaactttttaatgtgccaaggtctgtgttcagtgttttcttattcctcatctgacttagttctcaaagtccttgcctaaggtattgctgtcctcaccgtcctatggggagataggtcactttcccaagtctgggcagccagcagcagggctaagatcaccactcagaccctgtgwttttatttttcatctcctcacatctggcgctgaatgtcaggaccttcctggcctctgggaaagacacaggatggctgttttgagaggagtgtgaaatacatgaaggcaggacttccacacacctggacgtgaactagaggtgaggtggggaaagacaggaagtagatcagtgttgcccagaccctaccttttccaactagggtgtggaccatccttcagagcttggcctccaagttggaacccgtgtataccactgacagtgtttcctgggatggtgatatttatcaagtgcagaggcccagacacagagagcttgaggacctttgtgtgagacagtgaaaccctcaaaggcaagggctctgtttcatgagttttctatctcctgctgctgtctcggtgggcctgtttgagttgacctgtcccgtcggtattagcaactggcaacagtgggtttttgttaaatacggcaaatattaagagtcgtctctgggcattttagtttattcattcatttgttcatttattccacagggatttattatgcatttactgtgtactaactaatggggagatagcaatgaaggcagactaagtgtctttgttctagtgcagccatatagtcagtgaatgaatgagtgagcaagatacaggagagaagtgaggtatggcccattataccagataaagtgatagagaggggctggcgaggagagcagtctaatttcaggaaagtcagaaaagtctttaaggaaactgaaggctgagctgccagggccagccacgtgggtactggagagtgggaggcccagtcagggggaatgctggcttagcacaactgaaaaatacaaaggtagaatatgaagtgtaatgacatggtttagattgaaatctgatgtggatggaaaggttttgtggcctttcagcccaaggtttgaaaaagaaatggaatttctaaatggagtgggtagccacaggagggctttagacaggacagtggccccgctggattttctgcccattgacttgggctcgaagtcacgtccatgttgctattacagatgcctcccagaacagtttatataatcatcaacgtatattcatggagcatcttctgtctgctagacacagaattgggtgttgggctttaaagatggatgaaaggcagtacctggtctagagaggctgctacctggatggtgtgtttgccatcctcagtaatgtgtgtcccttacagatgatgcccaatgactctacaattgctgggatactttttagaattttctttttgtgcattacttttgattcttggttctttctttggcattagctcaccagtggcaaatatgtatcctttaagggtggacttaattttttgagaaatggccaaaagtttgtttcaagtctagtctgatgaataaagcaggagatttatttttggcaaaagtggcaaataaagagggctgatttttgtatatggctactgaaatggcttagaatgccattttatcacatggtcaaattattcaatgatcaaatatcgaattattaaaaattatcaaaaggaagttccctgaaacatgaaagtgtttgggctttgtaggtacccaagtctactgggaaaaatccccatttctgggtaacccagccccttttaatgacaacttcagttctccaaattccacttccccttttagcctgcctcccttccgtcatccttcatcaaggtgacataggtctggcgatctttttggcatagacgtgtggacgttgtttttgacatttgtacatgcttttgctcaagttgaaggcccaagtttacccaattcgactgcccccacccagatagaatattcatggttagaccataaactacataactggaaattttaaatctatttttatatgca

SEQ ID NO: 719902 - DNA, 605 bp, Homo sapiens
tggattgtgaagagggactttgttcccsctcagtcttgtctctgcctccgtaaaggagtaagttaaaaaagaaagtttctttttttaaaaaaaagccttactgctcaataaatccctgtggaaaaaaaaaaaagagggggaaaaaggaatgcacattagtcttccattaaaaatagatcaaaaaagtacccaaaagagaaaaccccataacaatgaaataaattaggataatccaactggaggcctgcaaatgagtttgctaaatgttatattttctcaagccacttagatttttaactccctgtttctgcctgaagcaataaaggcaggaacgctgtcattagcttcaaacaccattttttaagcccctagctgcatttgttatttttctcttcccccccttagctgtatccctgcatttattacagcgcaggtgcatcttgcttttgagtgctaactgagatgaaaggagtgaggaaacgctctcttcttcttgcaggggagggctggcaaattcagtgaatgcagagtcggctgggagcctttcggctggaaagctcttcctctgatgagctgtctgttacagattttcagggatggccctt

SEQ ID NO: 719903 - DNA, 639 bp, Homo sapiens
ttttttccactttcaaatgtataacaaaatagaactttatatttccagatggactgcctggaacccggggagtggctcagctaccaggcyccagtggcccttgtcttgttatttcctccattagagacctggcgtataattgtgggagggagaagccagtggagcagtcaggggactccctggctgtttctgtgtctggtcttatgggtctgggcactgaattcagtcacaaaccctagcatgctcctttgctacctcaggggacaaagtcaagaaaataacactaggattgccaccctgctctctctctctctctctttttttttttttctttttgaggaagggtctctctctgtcacctggctggaatacaatggtgctatcttggcccactgcaccctccatctccctggttcaagggattctcgtgcctcagcctcccgagtagctgggattacaggggcacatgccaccatgcccagctaattttgtatttctagtacagacagggtttcaccgtgttggccaggctggtctcaaactcctgacctcaagtgatccaaccgcctcagcctcccaaagtgctgggatgacaggtgtgagccaccacacccagccactctctttcaactagaacag

SEQ ID NO: 719904 - DNA, 639 bp, Homo sapiens
ttttttccactttcaaatgtataacaaaatagaactttatatttccagatggactgcctggaacccggggagtggctcagctaccaggctccagtggcccttgtcttgttatttcctccattagagacctggcrtataattgtgggagggagaagccagtggagcagtcaggggactccctggctgtttctgtgtctggtcttatgggtctgggcactgaattcagtcacaaaccctagcatgctcctttgctacctcaggggacaaagtcaagaaaataacactaggattgccaccctgctctctctctctctctctttttttttttttctttttgaggaagggtctctctctgtcacctggctggaatacaatggtgctatcttggcccactgcaccctccatctccctggttcaagggattctcgtgcctcagcctcccgagtagctgggattacaggggcacatgccaccatgcccagctaattttgtatttctagtacagacagggtttcaccgtgttggccaggctggtctcaaactcctgacctcaagtgatccaaccgcctcagcctcccaaagtgctgggatgacaggtgtgagccaccacacccagccactctctttcaactagaacag

SEQ ID NO: 719905 - DNA, 639 bp, Homo sapiens
ttttttccactttcaaatgtataacaaaatagaactttatatttccagatggactgcctggaacccggggagtggctcagctaccaggctccagtggcccttgtcttgttatttcctccattagagacctggcgtataattgtgggagggagaagccagtggagcagtcaggggactccctggctgtttctgtgtctggtcttatgggtctgggcaytgaattcagtcacaaaccctagcatgctcctttgctacctcaggggacaaagtcaagaaaataacactaggattgccaccctgctctctctctctctctctttttttttttttctttttgaggaagggtctctctctgtcacctggctggaatacaatggtgctatcttggcccactgcaccctccatctccctggttcaagggattctcgtgcctcagcctcccgagtagctgggattacaggggcacatgccaccatgcccagctaattttgtatttctagtacagacagggtttcaccgtgttggccaggctggtctcaaactcctgacctcaagtgatccaaccgcctcagcctcccaaagtgctgggatgacaggtgtgagccaccacacccagccactctctttcaactagaacag

SEQ ID NO: 719906 - DNA, 639 bp, Homo sapiens
ttttttccactttcaaatgtataacaaaatagaactttatatttccagatggactgcctggaacccggggagtggctcagctaccaggctccagtggcccttgtcttgttatttcctccattagagacctggcgtataattgtgggagggagaagccagtggagcagtcaggggactccctggctgtttctgtgtctggtcttatgggtctgggcactgaattcagtcacaaaccctagcatgctcctttgctacctcaggggacaaagtcaagaaaataacactaggattgccaccctgctctctctctctctctctttttttttttttctttttgaggaagggtctctctctgtcacctggctggaatacaatggtgctatcttggcccactgcaccctccayctccctggttcaagggattctcgtgcctcagcctcccgagtagctgggattacaggggcacatgccaccatgcccagctaattttgtatttctagtacagacagggtttcaccgtgttggccaggctggtctcaaactcctgacctcaagtgatccaaccgcctcagcctcccaaagtgctgggatgacaggtgtgagccaccacacccagccactctctttcaactagaacag

SEQ ID NO: 719907 - DNA, 639 bp, Homo sapiens
ttttttccactttcaaatgtataacaaaatagaactttatatttccagatggactgcctggaacccggggagtggctcagctaccaggctccagtggcccttgtcttgttatttcctccattagagacctggcgtataattgtgggagggagaagccagtggagcagtcaggggactccctggctgtttctgtgtctggtcttatgggtctgggcactgaattcagtcacaaaccctagcatgctcctttgctacctcaggggacaaagtcaagaaaataacactaggattgccaccctgctctctctctctctctctttttttttttttctttttgaggaagggtctctctctgtcacctggctggaatacaatggtgctatcttggcccactgcaccctccatctccctggttcaagggattctcgtgcctcagcctcccgagtagctgggattacaggggcacatgccaccatgcccagctaattttgtatttctagtacagacagggtttcaccgtgttggccaggctggtctsaaactcctgacctcaagtgatccaaccgcctcagcctcccaaagtgctgggatgacaggtgtgagccaccacacccagccactctctttcaactagaacag

SEQ ID NO: 719908 - DNA, 1160 bp, Homo sapiens
tgcgcaaacctacttttgatttccacgtccggaatatttctagctctgcctgtctctccacttcacagccatttggttcctagaaggtggaatattccgctgttacatctgggactttcctggaatctgtcaacacccatcctgcaagtttggttgctggcatttgggacatttatacatgcataggcaataacaaagtcggacaccgcccctgccaggcataagggaactttgagatgtgttcagatttcagagaccctgacatgaaagaatttagagatgcacctgaaggtcaaggatcagactggcactttcaagaagtcattcaatagaagcaacgcttgtttccacctttcaatgtataagttaaaaacatcagttaataacgataatgaaagagtccttcatgcatgctgagcactgtgctagccgcttacctacacacatcaaagtcatctaatttttactattacacctattgtatatactaagaaattgagtcttaactacatcgattaactcctctaacagctcccagatcataggtggtagagccaagatttgaacacagaatgacttcaggtgtggccaatcccctctgtttctatttctcttagtccctcagtgaaaaaatctttaaaactgactgtcttccaagttccttctacaaacacatgtggagcatcttctgtgaaggcagtaggctctgctctgggcccgagtacaaagcgtgaaaacccacagacccttcactcaagaagctcagagcccagtggagaagggagaagagcagccaacaccttagatcagagagaatgaactgatgtgcagtccaacatgtcctgggtcccagcagaagagaaaaacgtccccattttactcatggtgcagttttcttaaagaatgttggaggctaggccgggcgcgatggctcatgcctgtaatcccagcactttgggaggccgaggcgggcgggatcacctgaggtcaggagttcaagaccaccctgaacaacagggagaaaccctgtctttactaaaaacacaaaattagctaggtatggtggcgcatgcctgtawtcccagctactcgggaggctgaggcaggagaatcgcttgaacccaggaggcagagattgctgtgagctgagatcgcgccat

SEQ ID NO: 719909 - DNA, 636 bp, Homo sapiens
tggaaccatcccaaatgcccatcagtcaacaagtggataaagaaactgtggtatatrtatacacaaaggaatactactcagccataagaaggaatgaattaacggcattcacagctacctgaatgatatcggagactattattctaagtgaagtaactcaggaatgggaaacatcgtatgttctcactgatatgtggtagccaagctatggggacacaaaggcataagaatgatacaatggactttggggacttggggggaagggtgggagagggcaagagataaaagactacaaatagggtgcagtgtatactgctcgggtgatgggtgcaccaaaatctcacaaatcgccaccagaaaacttactcatgtaatcaaataccacctgtaccccaataacctataaaaaatagaaaaataataaaaaattaaaaaagaaacataacaaaacacaatataggaactttgattaatacttatttgggaaaaaatgtctataaataaagacatgcctgaggccaggcgcggtggctcacgcctgtaatcccagcactttgggaggctgaggcaggtggatcgcgaggtcagatcgagaccatcctggctaacatggtgaaaccccgtctctactaaaaa

SEQ ID NO: 719910 - DNA, 636 bp, Homo sapiens
tggaaccatcccaaatgcccatcagtcaacaagtggataaagaaactgtggtatatatatacacaaaggaatactactcagccataagaaggaatgaattaacggcattcacagctacctgaatgatatcggagactattattctaagtgaagtaactcaggaatgggaaacatcgtatgttctcactgatatgtggtagccaagctatggggacacaaaggcataagaatgatacaatggactttggggacttggggggaagggtgggagagggcaagagataaaagactacaaatagggtgcagtgtatactgctcgggtgatgggtgcaccaaaatctcacaaatcgccaccagaaaacttactcatgtaaycaaataccacctgtaccccaataacctataaaaaatagaaaaataataaaaaattaaaaaagaaacataacaaaacacaatataggaactttgattaatacttatttgggaaaaaatgtctataaataaagacatgcctgaggccaggcgcggtggctcacgcctgtaatcccagcactttgggaggctgaggcaggtggatcgcgaggtcagatcgagaccatcctggctaacatggtgaaaccccgtctctactaaaaa

SEQ ID NO: 719911 - DNA, 636 bp, Homo sapiens
tggaaccatcccaaatgcccatcagtcaacaagtggataaagaaactgtggtatatatatacacaaaggaatactactcagccataagaaggaatgaattaacggcattcacagctacctgaatgatatcggagactattattctaagtgaagtaactcaggaatgggaaacatcgtatgttctcactgatatgtggtagccaagctatggggacacaaaggcataagaatgatacaatggactttggggacttggggggaagggtgggagagggcaagagataaaagactacaaatagggtgcagtgtatactgctcgggtgatgggtgcaccaaaatctcacaaatcgccaccagaaaacttactcatgtaatcaaataccacctgtaccccaataacctataaaaaatagaaaaataataaaaaattaaaaaagaaacataacaaaacacaatataggaactttgattaatacttatttgggaaamaatgtctataaataaagacatgcctgaggccaggcgcggtggctcacgcctgtaatcccagcactttgggaggctgaggcaggtggatcgcgaggtcagatcgagaccatcctggctaacatggtgaaaccccgtctctactaaaaa

SEQ ID NO: 719912 - DNA, 853 bp, Homo sapiens
cttagtgattcagaaagcagaaagtgattcaagtgactgaagagagggtaaagatgaattttggaggctgtgggcatttgtgaggttcagtctctgcagctctgtcaacagcagctctcagctaggaggaagtagagcccgaatgagcctttgctgaggcccccagccctcaaggactggccaccagtgagctgctaaccaatggaacctaacaaactgatctcggtttgttttttttgtcttttgttttgtttgttttgtttttttgttttgcctcactgcagtcatataacaaagaacccacataattcaggaactatcactctattaatctgcactctacagtawctccatcaactgccagtttaatacgaaaataaatcctctctcaattttattttatttatttatttttgagacagggtgtcgctctgtcacccaggctagagtgcagtggcaccaacatagctcatggtagccttgacttcccaaggtcaagcaatcttcccacctcagcctccagagtaactaggacttacaggcaggcatcatcatgcccagctaattattttaatttcttgtagagatgaggtctcactacgttgcccagactggtctcaaacccctgggctcaagagattctcctgccttggcttcccaaagagctgggattacaggcatgagccaccacatccagccctgtctcaattttaaaggtgatatccgactggcaattaaattatcatttcttagccctcatcctaacattccaagctaatatgcagaagaaatgaaggacagatgctgcagtatgaagatggttaaactgtttaaccatcccagacctccagct

SEQ ID NO: 719913 - DNA, 476 bp, Homo sapiens
aaaaaaaaattagccgggcgtggtggcgggtgcctgtagtcccagctactcgggagactgaggcaggagaatggcatgaacctgggaggcggagcttgcagtgagccgagatcatgccactccactccagcctgggcaatagagctagacgccgtctcaaaaaaataataataataaaataaacattagccaggtgcggtggcaggcgtctgtaatcccagctacttgggaggcagaggttgcagtgagccaagattgggccgctgcactccagcctgggcgacagagtgagactccatctcaaaaaaaaaaaagcatgggtacagtaggagcaggattaaataaatayatgcagctgggcgcagtggctcatggctgtaatcccagtactttgggaggctgaggcgggtggaggttgaggtcgggagttcgagacaagcctgaccaacataaagaaaccctatctctactaaaaa

SEQ ID NO: 719914 - DNA, 1957 bp, Homo sapiens
  misc_feature 1774: n = A,T,C or G
actcaactcactaggatgaactaatgtttactttttatagaactgactttttaatttgttagaaaatgatcatctggcacatttcttaagcatgactctttcttttctggtacttgtcttctattttggccttttaggatcctactgatgctttaggctccactttgataaaaggaaaacctgaatccttccttgtaaacayaccatgtagttttgctttttgaatatacttctagcacttgccacaatgtgtaacatttatgtaggtttgtcatatgttttatcgtatgcttatcatacgttctgccttatcttatatgcatatttgttttatttcttcaggtgaagggcagagattggcacttgtatctatttgtatcccctatagcaccttatactgtgccttgtaggaattcagccaatttttgtaggatgaagtgtataaaagatactgaagcaaccagccattcacattaacacttgtgtacataaaacaacaactgattgagtataggtctaaaacaccaccaagttctccatgatatgaaatgaacaacagttttggatgtcttctgtctctacacaaacacaatgttcttatttcttttgtacttcagtgctgagtactttacccatagtcagctcatgcttcaggggtggatggatagttgaatgacttaaggcaataaaagacaggagagagagagagcatgatgcagggaatttggaaggcctcttaggtgatggagaactggagtcggatttgaaggaccagtagaacttggataggcagaggagaggggaaggcatttcagattggagagcttagtataaaaggcacaatcaagaagcctcaggccattgtaataagaatgctagtgacagcacgtagccgtgtgagctctgagaaagatgggaacagaggcctcattatttcgcattttgtttcctcctcttctgtgagcagcatgtggtcagtcagtccactgggatttgagcttgttgttgaatctctgttctgcacttactagctacatgaccttgggcagttactgtatctttttaagcctcagtttcctcacttgtaaaataaggatattatccacttcaaagggtagttgtaaggagtgataatatgtacaaagtccccagcatagtcctagacttgcaacatttgtttctttcaaaaacaaggtaaggcttctttaattgtaggaatagatttttgccataatttatttatgcatgatgtgagaaatgtgaagtagcttaatttttttccgtctctctgtaaaaatagaacataaatcatatttgtgcttttgtttctaataaggtgaagaaagcaagggtgcctggaaacatgtgactctgactgtactgttccactgaaatttcattagtatgccctgataaccagacaacagaggcagagagcacagaccacgttgttattcagttcagacattggcatgtttcgcttcatcttccagaagattcaaatatagcctgtcttctctttcctttcctggcctctgaggctcagacgcctctcctgttccttttgtgagctgcacaaatctgctttcaccctaacttgcagtttgtgatccaaagctgttaagattgaaacacagtccccctccttccttacacccactcttctctctgagtctgatcctccctgcttatttcttatcttattgtcagaatctgaagccagatttcagggtgtctttctgtttcccttttccatacacctcccaaatagctnatttatttcctactcccttagtccaggttcttaactttggttgaactagtgcaatagggacatcaaaatggctttccatttctacttgcactccccactcctgtcttctgccaagacgttttttttctaagatgtgaaattgatcatctaatgcttgctttcagtagttccaaaatacctaca

SEQ ID NO: 719915 - DNA, 668 bp, Homo sapiens
gtaggggttgggttgaatctgtagattgctttgggtagtatggacgtgctaacaatactaagttttacaatccatgagtatgggatgtctttccatttacttgagtcttctttactttctttcagcattgttttatagttttcagtgtacacactttcgtgttctgagttaggtttgtatctaagtattttattcttttggatgctattttgtcatatgtatctttatgctctggatttttcatcttgctacaaatggcttaatgatgtatcacattatcccttcaatgaattagccccattgagggaacagaattcttcatcatagcgaaaacataaagtcctttatgaatatgtgtggatcctggagtttcaggcaatgtgacagctgtgggagactctagaaattactccatataggcctcctattcccttatgtcttggttagcccmgtcagtgaatatgtgatggattttttttgtttttggtcatctctacttcagactccctatataattttattattttatatgaacttcaatataatccccttcagattatttatgaaatatcttccaaaggaacatactaactctgaaacattctgtgcatagggcagctattagcaaggtcctggttgatgtggcatggattataagtgtggtggca

SEQ ID NO: 719916 - DNA, 668 bp, Homo sapiens
gtaggggttgggttgaatctgtagattgctttgggtagtatggacgtgctaacaatactaagttttacaatccatgagtatgggatgtctttccatttacttgagtcttctttactttctttcagcattgttttatagttttcagtgtacacactttcgtgttctgagttaggtttgtatctaagtattttattcttttggatgctattttgtcatatgtatctttatgctctggatttttcatcttgctacaaatggcttaatgatgtatcacattatcccttcaatgaattagccccattgagggaacagaattcttcatcatagcgaaaacataaagtcctttatgaatatgtgtggatcctggagtttcaggcaatgtgacagctgtgggagactctagaaattactccatataggcctcctattcccttatgtcttggttagcccagtcagtgaatatgtgatggattttttttgtttttggtcatctctacttcagactccctatataattttattattttatatgaacttcaatataatccccttcagattatttatgaaatakcttccaaaggaacatactaactctgaaacattctgtgcatagggcagctattagcaaggtcctggttgatgtggcatggattataagtgtggtggca

SEQ ID NO: 719917 - DNA, 644 bp, Homo sapiens
caggtgcacactgaggttctccacttagtttgtggagcctcgggggaaaaaaggttttagtctggggtgttgaaggaataaagatgagtcttgacttttccgaagggccctgcctctgtgtaacacctgggaagcatcacttgtaagacacgcgcatttggaagggccagcacgagctgctccatctcactggacaatgaggtccctggtggtttccaattaggctgagctcattggcttaatagtccggccccagctgttgcctgggcttgaaagaaagaaaactgggtcaagcaaatgatttcaggcattcagagcagttatttccactaaccagcctgtctgccctctggatactgtcagtgctttgagaatgggctgggttatagtttctccaccrtggctgcccatcaagaccacccagggacccacccacctagacctgtcatcttaggttctctaaggtgggcccagggttttctcaaagccactcgggtgattctaatggccagccagggtggagaaccactagattggataatcatttgggaaaccacttctcacaagatgaaaattaaaataccagttgactttgttgaaggggattcagtttattagagcaagaagtagagccctgcagggcg

SEQ ID NO: 719918 - DNA, 950 bp, Homo sapiens
ggaggctgaggcagggggattgcttgagtctgggaggttgaggctgcagtaagccatgactgcaccactgcactccagcctgggtgacagggcgagactctgtcttttagaaaaaaagtttattaatattaatatcagttagaaatctagttgttcattgcagaactaaaccagtttatagcagaaataagcacttggagggaaatgttacattttcactccaggccttgagtccttagccaccagctgtttgtccttcagggttctgtggttcctggttccagagaaatcatttgctccaacgtaatgrgtgaagagttcttcaggtgatggctgctgggcccagcttggctgttgtctttgctgtcttgtaagccttgtgttgctcaagttcagttgtgtattagtgcactaactgtactgcaagcttctccaagcatgtgcaagcaatttgagaggagcctaatgtttgcaaggaatttgagaggagccttttaaggatgttttattgggtgggtcagatgagggagataacatgggggcaagaaggaaagttattaattcacgtgaaactaccagccgttcatcacctaacttatgatttcagacactgagcacattgcaggttgagaaggtgcttggtcctttttgtagccttatgctgtgctcttcagagtcatgagtgtgctgctttttctcaccattttgtttcttgtagattgttgtccttgatgctggaaaacattttgaagacaagactctaaacagtgacctatgccgcactagtttattggaaaatgagaaatttacattactgacaagcttggaagattcttctgtcctgcagtaacctgtgtttccctggtctttatcttgccactctgctttattccccttttttgtggcagtagttatgatgccaacttttggggattctttgtcctcctctt

SEQ ID NO: 719919 - DNA, 950 bp, Homo sapiens
ggaggctgaggcagggggattgcttgagtctgggaggttgaggctgcagtaagccatgactgcaccactgcactccagcctgggtgacagggcgagactctgtcttttagaaaaaaagtttattaatattaatatcagttagaaatctagttgttcattgcagaactaaaccagtttatagcagaaataagcacttggagggaaatgttacattttcactccaggccttgagtccttagccaccagctgtttgtccttcagggttctgtggttcctggttccagagaaatcatttgctccaacgtaatgagtgaagagttcttcaggtgatggctgctgggcccagcttggctgttgtctttgctgtcttgtaagccttgtgttgctcaagttcagttgtgtattagtgcactaactgtactgcaagcttctccaagcatgtgcaagcaatttgagaggagcctaatgtttgcaaggaatttgagaggagccttttaaggatgttttattgggtgggtcagatgagggagataacatgggggcaagaaggaaagttattaattcacgtgaaactaccagccgttcatcacctaacttatgatttcagacactgagcacattgcaggttgagaaggtgcttggtcctttttgtagccttatgctgtgctcttcagagtcatgagtgtgctgctttttctcaccattttgtttcttgtagattgttgtccttgatgctggaaaacattttgaagacaagactctaaacagtgacctatgccgcactagtttattggaaaatgagaaatttacattactgacaagcttggaagattcttctgtcctgcagtracctgtgtttccctggtctttatcttgccactctgctttattccccttttttgtggcagtagttatgatgccaacttttggggattctttgtcctcctctt

SEQ ID NO: 719920 - DNA, 1434 bp, Homo sapiens
caagcacagaaagacaaataccacattttctcactcatatgtggaagctaaagaaggtgatctcctagacgtagaaagtagaatattgattaccggggctggagaggggctactgtctagagactgcccaacgggtacaaagtcacagttggataggaggaagaagttctgatattccagaataggaaggtgactatgcttggcaatattatattgtatgttgccaagtagtcagaagagaggattttcagtgttatcaccacatatgataaatgcatgagaaggtggatattctaagtaccctgattcaattattacagaatgtattcatatattgaaactgaaccacagataggtmcaacatcatgtgtcagttaaaaacaaaataaaagacaattattttctgtgttcagaatgaaaaccgagtcttaaaaggagctacatattcattaaaagtcaatgttctcagcttcaagggatatatgatacagggggctggtgctattgagggctttaaggaaggtttttaatattcaacctttggatgtagacacttttggccaagaataaaaagctattgactaaaaggttacagtgcaactgagatttcattagcttcaccatctttgcaatagaaaaatctgtttgttatgcatatttctactttgctttttttgttttttaatttaatgtgtctatgcttattatattaaaacatagtcatttgcaccaacgtctacgcatcaatagaacagtgtgatgcactgtgaaatgttgccgagacaccaccgtcttgtagctcagcctgtgcgaacagtcttaagactacagctcagaaaaccatttcgttccttgatatgcaacctcctagacacgagactagattaaagatgtgtctgctgcatgacaccacattagtatattattgcataagtaatgactcattgactggagtataaaaaagattgataatttacaaagaaagtcaatcaataaataaactgtccctaaccagctcaagagctggcagaatgacattccattatcctgtcaggcatattgcaatgaaaagcgtgaagccccgggggcatggcaccctacctgcctggctagctcgtacatccctcccctgccagatcctccagctcatcggacttctccacctttcccacaactgcggcctcaccacatacccacgtccagatacatatttgtgtgtcacttcaatacacggtacggtaaggctggcgcctgccggtgggatggctgccgtggtgacagcaccatgtcactcaagctcggcagctgatccctggtagacagcgctgtcagagaatcggagacttccacatgtacgagtgaaattaacttctgttagtctgacattttccacaatcaatactcacagggcccttgtctccaggatcaaaattc

SEQ ID NO: 719921 - DNA, 1848 bp, Homo sapiens
tgggatctttagaaaatcaacataatcttatgagaaattccaactacaaatgataaatgtagaaaatttaatcaatcatctacaccaagcggagctagtatatactggggagtatataatttaattcyttccgtttcttccacaaattaatgctttgtaattaaatgaacctcagaatgtttatacacagaaccagaagtcattcatttaagggcagtactattgtcaacattttcttctaatttctactgcggcctttcttattttttattttaaaatgcaaaaaaaatgaagaatggaggtgagggctggtcacttctccccaaatttctaaaaatcaagttttttatggatcatgctttctctggaagggaataaaccacggttgtagtactaaatgcatctttcgatgcaataaagtcattatctgacaagaactggaaaatgaaataaaagagaaggagaaaaaagatgaagagcattaaagggaaaacctaagacacattaaatttaatagagcttaattgggcaaagaaggacttgcaaggaaggtgaggcccagaaacagcgggcttggctcccgcctagctttcaacccacttcagcagggttggaacccatggttgcctgtgattggctgcaactctatgattggtgtggagtaagtcacctctgttcacagatccatctaaggggcagttcactatgtacagaggaacccttaggccgaacctaaaatatgtaactaggcagctttaggctacaattaacaagagatgaggaaaaaatgtggaaggagagctttaggagagctttaggagtcctggagtctggtttgcctctcagctggtctttcctactcctgcacgactcgagtgcttcctggactcctaagcactaagccctgacccaggcagcatccatcctgcctaacaaaggccatggtttaagtccggaattctcatggaaaaggcacctgcgcgacacacacgggtgctgtcttgtggctcttagcagagttactgccttcgtcggggactggctctgtcctgatgccttccctcaagaggtctgcttccagagctcctgcctccggccacagttttcattcccaaagggagcctctctttcggccacagcctggtgcatgtggcagagcctttacaccctgaaaaatcctatcttcccatgacacgaggacacaaaatgaaagatgcagtgtgatggtgcttggccacacagcagcctttggtgatctaaaatagtcaacattcgttcctgaatgttttcacgtacaagacatatgctgtgtcctggggaaacacactcataaatgaggtgtcttctctgagcctagagcataatgggtgaggccggacagcttgcccacaacaaatcgtatttaaatttagtttctacatttaactcagaacgaacaaggaattagggggcaagcacttcaggctccacgtgaaaaggggtgacagagaagccacggaagtggtggcggggatggcccacgtggcgatgggtcaggtttggagacattggcgtggactcatggtttccaataataaatacagatgcagacaatacagacacctgtgcacacacacagacacgtgcacacactcagacacacatgcatgctcacactgagacacacgcatgcacacacagacacacatgcacacactcagacacacatacacacagacacacgtgcacgcactcagatacgcatgcatgcacacactcagacatgcatgcatatggctttggtgaacccacagctctccttgctctccttgctctggcggcagaggggcctcgaggcagggccagcca

SEQ ID NO: 719922 - DNA, 1848 bp, Homo sapiens
tgggatctttagaaaatcaacataatcttatgagaaattccaactacaaatgataaatgtagaaaatttaatcaatcatctacaccaagcggagctagtatatactggggagtatataatttaattccttccgtttcttccacaaattaatgctttgtaattaaatgaacctcagaatgtttatacacagaaccagaartcattcatttaagggcagtactattgtcaacattttcttctaatttctactgcggcctttcttattttttattttaaaatgcaaaaaaaatgaagaatggaggtgagggctggtcacttctccccaaatttctaaaaatcaagttttttatggatcatgctttctctggaagggaataaaccacggttgtagtactaaatgcatctttcgatgcaataaagtcattatctgacaagaactggaaaatgaaataaaagagaaggagaaaaaagatgaagagcattaaagggaaaacctaagacacattaaatttaatagagcttaattgggcaaagaaggacttgcaaggaaggtgaggcccagaaacagcgggcttggctcccgcctagctttcaacccacttcagcagggttggaacccatggttgcctgtgattggctgcaactctatgattggtgtggagtaagtcacctctgttcacagatccatctaaggggcagttcactatgtacagaggaacccttaggccgaacctaaaatatgtaactaggcagctttaggctacaattaacaagagatgaggaaaaaatgtggaaggagagctttaggagagctttaggagtcctggagtctggtttgcctctcagctggtctttcctactcctgcacgactcgagtgcttcctggactcctaagcactaagccctgacccaggcagcatccatcctgcctaacaaaggccatggtttaagtccggaattctcatggaaaaggcacctgcgcgacacacacgggtgctgtcttgtggctcttagcagagttactgccttcgtcggggactggctctgtcctgatgccttccctcaagaggtctgcttccagagctcctgcctccggccacagttttcattcccaaagggagcctctctttcggccacagcctggtgcatgtggcagagcctttacaccctgaaaaatcctatcttcccatgacacgaggacacaaaatgaaagatgcagtgtgatggtgcttggccacacagcagcctttggtgatctaaaatagtcaacattcgttcctgaatgttttcacgtacaagacatatgctgtgtcctggggaaacacactcataaatgaggtgtcttctctgagcctagagcataatgggtgaggccggacagcttgcccacaacaaatcgtatttaaatttagtttctacatttaactcagaacgaacaaggaattagggggcaagcacttcaggctccacgtgaaaaggggtgacagagaagccacggaagtggtggcggggatggcccacgtggcgatgggtcaggtttggagacattggcgtggactcatggtttccaataataaatacagatgcagacaatacagacacctgtgcacacacacagacacgtgcacacactcagacacacatgcatgctcacactgagacacacgcatgcacacacagacacacatgcacacactcagacacacatacacacagacacacgtgcacgcactcagatacgcatgcatgcacacactcagacatgcatgcatatggctttggtgaacccacagctctccttgctctccttgctctggcggcagaggggcctcgaggcagggccagcca

SEQ ID NO: 719923 - DNA, 1848 bp, Homo sapiens
tgggatctttagaaaatcaacataatcttatgagaaattccaactacaaatgataaatgtagaaaatttaatcaatcatctacaccaagcggagctagtatatactggggagtatataatttaattccttccgtttcttccacaaattaatgctttgtaattaaatgaacctcagaatgtttatacacagaaccagaagtcattcatttaagggcagtactattgtcwacattttcttctaatttctactgcggcctttcttattttttattttaaaatgcaaaaaaaatgaagaatggaggtgagggctggtcacttctccccaaatttctaaaaatcaagttttttatggatcatgctttctctggaagggaataaaccacggttgtagtactaaatgcatctttcgatgcaataaagtcattatctgacaagaactggaaaatgaaataaaagagaaggagaaaaaagatgaagagcattaaagggaaaacctaagacacattaaatttaatagagcttaattgggcaaagaaggacttgcaaggaaggtgaggcccagaaacagcgggcttggctcccgcctagctttcaacccacttcagcagggttggaacccatggttgcctgtgattggctgcaactctatgattggtgtggagtaagtcacctctgttcacagatccatctaaggggcagttcactatgtacagaggaacccttaggccgaacctaaaatatgtaactaggcagctttaggctacaattaacaagagatgaggaaaaaatgtggaaggagagctttaggagagctttaggagtcctggagtctggtttgcctctcagctggtctttcctactcctgcacgactcgagtgcttcctggactcctaagcactaagccctgacccaggcagcatccatcctgcctaacaaaggccatggtttaagtccggaattctcatggaaaaggcacctgcgcgacacacacgggtgctgtcttgtggctcttagcagagttactgccttcgtcggggactggctctgtcctgatgccttccctcaagaggtctgcttccagagctcctgcctccggccacagttttcattcccaaagggagcctctctttcggccacagcctggtgcatgtggcagagcctttacaccctgaaaaatcctatcttcccatgacacgaggacacaaaatgaaagatgcagtgtgatggtgcttggccacacagcagcctttggtgatctaaaatagtcaacattcgttcctgaatgttttcacgtacaagacatatgctgtgtcctggggaaacacactcataaatgaggtgtcttctctgagcctagagcataatgggtgaggccggacagcttgcccacaacaaatcgtatttaaatttagtttctacatttaactcagaacgaacaaggaattagggggcaagcacttcaggctccacgtgaaaaggggtgacagagaagccacggaagtggtggcggggatggcccacgtggcgatgggtcaggtttggagacattggcgtggactcatggtttccaataataaatacagatgcagacaatacagacacctgtgcacacacacagacacgtgcacacactcagacacacatgcatgctcacactgagacacacgcatgcacacacagacacacatgcacacactcagacacacatacacacagacacacgtgcacgcactcagatacgcatgcatgcacacactcagacatgcatgcatatggctttggtgaacccacagctctccttgctctccttgctctggcggcagaggggcctcgaggcagggccagcca

SEQ ID NO: 719924 - DNA, 1848 bp, Homo sapiens
tgggatctttagaaaatcaacataatcttatgagaaattccaactacaaatgataaatgtagaaaatttaatcaatcatctacaccaagcggagctagtatatactggggagtatataatttaattccttccgtttcttccacaaattaatgctttgtaattaaatgaacctcagaatgtttatacacagaaccagaagtcattcatttaagggcagtactattgtcaacattttcttctaatttctactgcggcctttcttattttttattttaaaatgcaaaaaaaatgaagaatggaggtgagggctggtcacttctccccaaatttctaaaaatcaagttttttatggatcatgctttctctggaagggaataaaccacggttgtagtactaaatgcatctttcgatgcaatraagtcattatctgacaagaactggaaaatgaaataaaagagaaggagaaaaaagatgaagagcattaaagggaaaacctaagacacattaaatttaatagagcttaattgggcaaagaaggacttgcaaggaaggtgaggcccagaaacagcgggcttggctcccgcctagctttcaacccacttcagcagggttggaacccatggttgcctgtgattggctgcaactctatgattggtgtggagtaagtcacctctgttcacagatccatctaaggggcagttcactatgtacagaggaacccttaggccgaacctaaaatatgtaactaggcagctttaggctacaattaacaagagatgaggaaaaaatgtggaaggagagctttaggagagctttaggagtcctggagtctggtttgcctctcagctggtctttcctactcctgcacgactcgagtgcttcctggactcctaagcactaagccctgacccaggcagcatccatcctgcctaacaaaggccatggtttaagtccggaattctcatggaaaaggcacctgcgcgacacacacgggtgctgtcttgtggctcttagcagagttactgccttcgtcggggactggctctgtcctgatgccttccctcaagaggtctgcttccagagctcctgcctccggccacagttttcattcccaaagggagcctctctttcggccacagcctggtgcatgtggcagagcctttacaccctgaaaaatcctatcttcccatgacacgaggacacaaaatgaaagatgcagtgtgatggtgcttggccacacagcagcctttggtgatctaaaatagtcaacattcgttcctgaatgttttcacgtacaagacatatgctgtgtcctggggaaacacactcataaatgaggtgtcttctctgagcctagagcataatgggtgaggccggacagcttgcccacaacaaatcgtatttaaatttagtttctacatttaactcagaacgaacaaggaattagggggcaagcacttcaggctccacgtgaaaaggggtgacagagaagccacggaagtggtggcggggatggcccacgtggcgatgggtcaggtttggagacattggcgtggactcatggtttccaataataaatacagatgcagacaatacagacacctgtgcacacacacagacacgtgcacacactcagacacacatgcatgctcacactgagacacacgcatgcacacacagacacacatgcacacactcagacacacatacacacagacacacgtgcacgcactcagatacgcatgcatgcacacactcagacatgcatgcatatggctttggtgaacccacagctctccttgctctccttgctctggcggcagaggggcctcgaggcagggccagcca

SEQ ID NO: 719925 - DNA, 878 bp, Homo sapiens
caccgatgagctctgtgggagtttatgtgaaaagctaaaarcaattttgcttataaaaagttctaaattacttctgatagtccaattaacttcccaaaaatatatgcatacataatgggagattcaactaccttctgatgaaagaagctgcaaattctacacccaaaggctcaagagtcctgaactgggctgtcatgagccccctgctgggcaaggagcagcttaattctttcctccatagatgctgggtgctggatgctaggtgctggatgcttgaggtggggtgttgcatgctgggggctgggtgcttggggctggatgatggatgctgggtgctgggtgctgaatgctgggttctggatgcttggggctgggtgctggatgctaggtgctagatgcttggggtggggtgttgcatgctgggggctgggtgcttggggctggatgatggatgctgggtgctgggtgctgaatgctgggttctggatgcttggggctgggtgctggatgctaggtgctagatgcttggggtggggtgttgcatgctgggggctgggtgcttggggctggatgatggatgctgggtgctgggtgctgaatgctgggttctggatgcttggggctgggtgctggatgctaggtgctagatgcttggggtggggtgttgcatgctgggggctgggtgcttcgggctggatgatggatgctgggtgctgggtgcttggggctgggtgatggatgctgggtgccgattacctcagaaaacactgtggacctgagggagccctggatccctgagacctattaatatctgatattattatttaatttgctctaaaaggtagtcttattccaaagtagagcaattagatgcacag

SEQ ID NO: 719926 - DNA, 629 bp, Homo sapiens
ggggcacagactggaacatgcgctcactttctacatggccgagtttacacaatctcacacacacgtctccggcttatgtgaccgtcaaaacgcggattttcccttccttcgtacgggcttggatagagctmtgagggctggagttctcaattatagaatgtcatgacaccgccgcacgattttttacagtaatttcacagtgtcacttcatgattctttcagggctgctttgaaccatgactgaaagaacagtggccctccgagtgtcaggggacgcgctggaacccgagtggcggagccgtgggcggccaagagtcaagcgcacacacgcaggaggcgggcacgtctcagaggtcaaaacctgggcgagaggagatgcaaagcgttaagagaaaatctgcagacgttttttcctgctaaattttgatattggaaacacatcttccaaacggcatttttttagctctgagtttctctggtgaatacctgtttaaaatgagagcctccaggaggcagggtgggtggggaaagagagaccaagacagagagagagagagagagagagaaagagaaagagagagaggaagattgggagagggacagagagagaaatagagaaacgtttacca

SEQ ID NO: 719927 - DNA, 629 bp, Homo sapiens
ggggcacagactggaacatgcgctcactttctacatggccgagtttacacaatctcacacacacgtctccggcttatgtgaccgtcaaaacgcggattttcccttccttcgtacgggcttggatagagctctgagggctggagttctcaattatagaatgtcatgacaccgccgcacgattttttacagtaatttcacagtgtcacttcatgattctttcagggctgctttgaaccatgactgaaagaacagtggccctccgagtgtcaggggacgcgctggaacccgagtggcggagccgtgggcggccaagagtcaagcgcacacacgcaggaggcgggcacgtctcagaggtcaaaacctgggcgagaggagatgcaaagcgttaagagaaaatctgcagacgttttttcctgctaaattttgatattggaaacacatcttccaaacggcatktttttagctctgagtttctctggtgaatacctgtttaaaatgagagcctccaggaggcagggtgggtggggaaagagagaccaagacagagagagagagagagagagagaaagagaaagagagagaggaagattgggagagggacagagagagaaatagagaaacgtttacca

SEQ ID NO: 719928 - DNA, 612 bp, Homo sapiens
gaaaacaaatcagaataaaacaacattttcattaaataattgcataacacattcctaaaacattttttcctgtgtatttcggctgcagatcctttaattgtatcttaaatagcaaatggcrgtaattttataactttatgtagaaaaatatattcttccttctaacatgttttatcaaaataggttttaactattattgaccgaatacataaaacatgaaaccttacaaatacattaacttatatataaacacttaacatatataaacactatagatattatagatagctacatattcaattaatctgcctctagtattaagtgctaagatacaagaaaaacaatatagaaacagcgactgcttttctggagtttgcattctgaggaaagaaagaaaatacataaagaaacaaatttaagactctacgctatgattttatctttttcatccctagttttcaacatgaggtctttgagagacctttttacagggtccaagaagtcatatctattttcataatgatactaagatatttgccttttgtactgtgtaaacatttgtgctaatggaacaaatcaatgctgggtaaaacttccaataccttagtagta

SEQ ID NO: 719929 - DNA, 612 bp, Homo sapiens
gaaaacaaatcagaataaaacaacattttcattaaataattgcataacacattcctaaaacattttttcctgtgtatttcggctgcagatcctttaattgtatcttaaatagcaaatggcggtaattttataactttatgtagaaaaatatattcttccttctaacatgttttatcaaaataggttttaactattattgaccgaatacataaaacatgaaaccttacaaatacattaacttatatataaacacttaacatatataaacactatagatattatagatagctacatattcaattaatctgcctctagtattaagtgctaagatacaagaaaaacaatatagaaacagcgactgcttttctggagtttgcattctgaggaaagaaagaaaatacataaagaaacaaatttaagactctacrctatgattttatctttttcatccctagttttcaacatgaggtctttgagagacctttttacagggtccaagaagtcatatctattttcataatgatactaagatatttgccttttgtactgtgtaaacatttgtgctaatggaacaaatcaatgctgggtaaaacttccaataccttagtagta

SEQ ID NO: 719930 - DNA, 916 bp, Homo sapiens
aaaaacctaacagtcttaagtatttagttactcttatttaacttgatgccattcttaaagagaggcgtgaaatatgtacaacatatatgttcataagacagatctttactgttcataatgctcagtttcctgctgcctctttcccgcttaatgtcataatcttactgtgacatcacaattaattcctgcagagatgattatagttacactgagaggattaagatttcaggaaagtgataaacagcagggacagaataaggtcctttttttgttgttgtttcccaaggattattagtttggtaagagggatagcacccaaatcgagtcacaacttaactgtctaaatcaaacaaacaaaaaacaggcggggggggaggtgtgggtggaagaaaaacatgcctgcagatattataaaacaagataaaactgtagatttgtttctttcgtgaaaggccattgactctttaaatasttttctgttgattgcactagcttaattacttacttaaacagtgaatgttttgtcagctcaatcaaatattttattagtattgcttagtattaagattccaaatgtacattgtgatttagattcaccagcatcattattgtagttattgactacctgtgaatttttagcactacaaataccttcaactttaaaacagagataaactatatttggccatcatgaaatgcattaattttcattaggtttatcaagaattgggttctaaagcaagtaattttttgtttgtataaaccatattcttttgaatagggttttgcttttgaatgaaacatcagtgttcttaattccatagaaagatattcaagggttatgtattaaagatatgtatctatactttcttgtaaacattcattgtattacttgactcacaaatctatcttggta

SEQ ID NO: 719931 - DNA, 601 bp, Homo sapiens
caagttttagtgtgaattttgatccattgatgtttcttcttttytgaagatccctgtcatacaaatgtgttatcttctttgcttatattgtatatgtatcctttctcaaggccttttcaatttgttctttgatttgttttgatttaaacaattttttaatagttcatgttgcactaaataataatctggctctttattaacatgagtttctttctccttatgctttattatggttataattatttcatattcttttcaagttttaaactcaatttttaaatgttcatttcttattctaataatcttatctctgagtattctaattttaatttaagctgtagttagtttccattattttcctagtacattttagctcatttgaaatgtcagtttactattttaatctaccttgtgagcatgtattattggtctgctttccttcttgtaaggttcccataatcactaaaattaatgcacagaacttttaaatgaaacaaaattgaacattgacaaaaaatggttggaatttgaatttaaattgttcaaactatggataatatgtttaaaagagttacaatatatagatacaagggaagaaagg

SEQ ID NO: 719932 - DNA, 601 bp, Homo sapiens
caagttttagtgtgaattttgatccattgatgtttcttcttttctgaagatccctgtcatacaaatgtgttatcttctttgcttatattgtatatgtatcctttctcaaggccttttcaatttgttctttgatttgttttgatttaaacaatttttwaatagttcatgttgcactaaataataatctggctctttattaacatgagtttctttctccttatgctttattatggttataattatttcatattcttttcaagttttaaactcaatttttaaatgttcatttcttattctaataatcttatctctgagtattctaattttaatttaagctgtagttagtttccattattttcctagtacattttagctcatttgaaatgtcagtttactattttaatctaccttgtgagcatgtattattggtctgctttccttcttgtaaggttcccataatcactaaaattaatgcacagaacttttaaatgaaacaaaattgaacattgacaaaaaatggttggaatttgaatttaaattgttcaaactatggataatatgtttaaaagagttacaatatatagatacaagggaagaaagg

SEQ ID NO: 719933 - DNA, 848 bp, Homo sapiens
taccttcctgtaaccatttatccttttaactttttgcctactttatttctgtaaaattgttttaactagacacsccccccattcctaaaccaaagtataaaagttaatcaagccccttcctcggggctgagagaattttgagcgttagccgtctcttggtcgccggctaataaaggactcttaattcgtctcaaagtgtggcgtttttctaactcgctcaggtacaacaactccaggattctgagcttcaaaggtggcttatttaacaaaatataattctaaaacattaagaaacagtgattatacctaattttatctttgtaaatttgagatgctcaatatatatattatatatatgtgctcaatgtattgatgacgtttctaatgtttattatttgttttatgttcattaaacaaacatttatgcaaaacataccatctgcaagttgtgttctacttgatgggaatataattttcagttgctttttcttccccaaagaattgggaattttttatcttccccctgtattattattgcctgttctttgagtctctgggtcacaggatatatctatgactagaggacatggtaaaactaagtggcctcttctggaactgaactagtgacaggcacatctttggggcactatcctaaacaactacagtgacaatatttccatcagtaaactgtgaatgcataaaatttatgaaataattatctagtttacttcctaaactcaaggaaaatcacttgaatggatcacattttgagggtaatagtaatcctggaaaattggatcccagccattgaagacctagtgctgctctagctactacatttcacctca

SEQ ID NO: 719934 - DNA, 848 bp, Homo sapiens
taccttcctgtaaccatttatccttttaactttttgcctactttatttctgtaaaattgttttaactagacaccccccccattcctaaaccaaagtrtaaaagttaatcaagccccttcctcggggctgagagaattttgagcgttagccgtctcttggtcgccggctaataaaggactcttaattcgtctcaaagtgtggcgtttttctaactcgctcaggtacaacaactccaggattctgagcttcaaaggtggcttatttaacaaaatataattctaaaacattaagaaacagtgattatacctaattttatctttgtaaatttgagatgctcaatatatatattatatatatgtgctcaatgtattgatgacgtttctaatgtttattatttgttttatgttcattaaacaaacatttatgcaaaacataccatctgcaagttgtgttctacttgatgggaatataattttcagttgctttttcttccccaaagaattgggaattttttatcttccccctgtattattattgcctgttctttgagtctctgggtcacaggatatatctatgactagaggacatggtaaaactaagtggcctcttctggaactgaactagtgacaggcacatctttggggcactatcctaaacaactacagtgacaatatttccatcagtaaactgtgaatgcataaaatttatgaaataattatctagtttacttcctaaactcaaggaaaatcacttgaatggatcacattttgagggtaatagtaatcctggaaaattggatcccagccattgaagacctagtgctgctctagctactacatttcacctca

SEQ ID NO: 719935 - DNA, 848 bp, Homo sapiens
taccttcctgtaaccatttatccttttaactttttgcctactttatttctgtaaaattgttttaactagacaccccccccattcctaaaccaaagtataaaagttaatcaagccccttcctcggggctgagagaattttgagcgttagccgtctcttggtcgccggctaataaaggactcttaattcgtctcaaagtgtggcgtttttctaactcgctcaggtacaacaactccaggattctgagcttcaaaggtggcttatttaacaaaatataattctaaaacattaagaaacagtgattatacctaattttatctttgtaaatttgagatgctcaatatatatattatatatatgtgctcaatgtattgatgacgtttctaatgtttattatttgttttatgttcattaaacaaacatttatgcaaaacataccatctgcaagttgtgttctacttgatgggaatataattttcagttgctttttcttccccaaagaattgggaatttttyatcttccccctgtattattattgcctgttctttgagtctctgggtcacaggatatatctatgactagaggacatggtaaaactaagtggcctcttctggaactgaactagtgacaggcacatctttggggcactatcctaaacaactacagtgacaatatttccatcagtaaactgtgaatgcataaaatttatgaaataattatctagtttacttcctaaactcaaggaaaatcacttgaatggatcacattttgagggtaatagtaatcctggaaaattggatcccagccattgaagacctagtgctgctctagctactacatttcacctca

SEQ ID NO: 719936 - DNA, 610 bp, Homo sapiens
taatgtaaaagtgaaaaaaactccttgttaatgcctggttgcactaaaarctgtcacactggggcctttactaattataaccatttttcatggctcttgatttgaagtttacattaaataggagagatgggcacacagatcaaagaccaaaatcatttcagagctccaatgtgtgggcccattttctctgcttagttagagttttgtttcattagtggtatgagttaataggagtgttggtctgtgtataatttagcttctcttttttccattactcgtaggattcaaaacagaataccaagccagaaatctacagggtataaatcttgctttatgtgtttgtatgtgtctgtgtatgtgcagtatacacgtggtaatagttgattttagatcatatttataaaaataatcattttcactgttttaagggagctccctttattctgacacttcagtgtaaaaaacaaaacatttctctgaatatacaaaatcaaaatcttaattttctcataaaagaggtagatatgtcttcagaaataggggagataaccaggaagatggggtgggtgttctgaaacacaaaggtgaaccatgtgaataggtttcctgt

SEQ ID NO: 719937 - DNA, 638 bp, Homo sapiens
aggcgggtggatcacgaggtcaggagttcgagaccagcctggccaacatggagaaaccctgtctctcctaaaacatatacaaaaattagcgtggcagcatgygcctgtaatccgagctactcgggaggctgaggcaggagaatcatttgaacccacgaggcggaggttgcagtgagctgagactgcaccactgtacttcagcctgggcgacagagtgagactcagtctctcaaaacaacaacaacaacaactaaacaaacaaaaatttgggggaaagggtgacattcttcagaatagaccgtatgttgggtcataaaacacaccttaatacattttaaaaatactgaattatacaaagcatcttttgtgatcacaatggagtgatgccagatatcaataagcataagaaaactgaaaaatttgcaaatatatacaattaaaacattaaaaaaattaaaaacaaaacactatttttttggtagcagaggacagggtcttgctctgtcacccaggctggagcgcaatggcacgatcacggctcactgaagcctcaacctcctgggctcaagctattctcccatcttagcctcctgagtagctgggtctacaggcatatatcaccacaccgagctaatttt

SEQ ID NO: 719938 - DNA, 1942 bp, Homo sapiens
  misc_feature 1221: n = A,T,C or G
tttttaattttaattttaattttaattttatctggagacagagtcttgctctgtggccaggctggagtgcagtggcgtgctcttggctccctgcaacctcttgtcttgtgggttcaagcgattcttgtgcctcagactcctgagcagctgggaccacaggcatgcaccactacacctggttaatcttttgtatttttagtagagacagggttttgccatgttggtcaggctggtctcgaattcccaagctcaggcaatccgcccgccttggcctccccaagtgctgggattacaagcatgagccaccgcacccagcccactcactgcagtttagtttctaacaagagttagggattagggactgtgtggagggaggagagaaaggctcgtttttgtatggcggagtggcttcactcagcttagcagatggttaaaatggcttcattttggagaacttttaccacttttgggaggctcttgctagacacctccccctcaccccttgtcatttccataatctagatagatatatctctactttgggcacgcatcctacttgacaagatccaagaccatgctggctgacccacaggaaacaccgatgataccttgccccaacaaagcggggcaatgcagactcatcccaactcagcagcttctcctggctgacccacaaaggccatttaagtcatctcttcctggtcttggactttctgagtgggtcagcttcagcattcttagacatgaggtccacatcagtcttcaccttccaaccacagggaacagatattacaggtgccagagtggtccccttgaagttgggtaaccagataattattgtcttaattgggacacttgatggtaaaaggcagtatcatcactaattctgccaggaactgtcatgggaaactgggtggggagaattctgaccattccaccttggctcaacccttaatatgcatccttctacctcttccctcaaaagggggttaggacctcacaacatggttttctgctctttacccaatctcctcacggaagtccctctcagatttttttttttttttttgggacagagtctcattctgttgcccaggctggagtgcagtggtgtaatctcagctcactgcaacctccgcctcctgggttcaagtgattctcccacctcagcctcccgagtagctgggactacaggtgcacactatcatgcctggctaattnttatattttagtagagacggggtttcaccatgttggccaagttggtcttgaactcttgacctcaaatgatcccacctgcctccgcctccaaagtgctgggattacaagtgtgagccatcatgcctggcctctctcagatctttctcttttttttcttgagacagagtctcactctgttgcccaggctggagtgccgtggcgtgatctcggctcattgcaagcgctgcctcccaggttcacgccattctcctgcctcagcctcctgagtagctgggactataggtgcccgccaccamactcggctaattttttttgtatttttagtagagacggggtttcaccgtgttagccaggatggtctcgatctcctgacctcatgatccgcctgcctcggcctcccaaagtgctgggattacaggcgtgagccaccgcgcctggccgttagatctttcttatagccttgctctggctggccaagggatgaggttcatgaggccatttcctatgctcatggagatgtgggtgagggttcctacacctactttgatatgcaggtatcttctgtcaactctcagggaggaagagtcccttctaacacacacgtatatatgagtaactatgtgtatgtatttatacatatatagttttaatttatttttaaaccaaaacaggataatgtatgtattgcccatgtaatttcattacttaacaatattctttc

SEQ ID NO: 719939 - DNA, 1332 bp, Homo sapiens
aagataatctagaggaagaaaatgttaccgcagtgattaccctgtaaactcagttcatgctgtctgtgactcagaataagaattaaaatgacgataaggcactaaatattccaaagatttaatgtgaagtgttgatggttgagaaaaatgttttctctttatatgcatgtactcaagcttttaatacatatttctgttatgagttaggattaagcattagaggaaagtgctgttgaaataccggctgtactctcaaagcactaaaacttaaataataataaatagcagaaaacccagggagaaaatgaagaaataaagttatttataaatctctggttagctaacagtgcattacatttatttagcattaattagtaaacagtaatttaaaataaatagtatttgaataagaaagaagatggaaacaaataggcactttttgataattaatttccccaattcaggtggaatatcagtggcataggatggaaagaaaaaggacttggagatgtaggcaaaccacttgctaatttaggggctttcgttactaatattatcacatgatatatcagataaatatattcagcctgaaccatgaaacaaaccaggtgtacaattgggccttttttaaagttattttcatataaatatatcagcaacttcccacagtttgattaatttggctgctgacattagccaaagaatggacagtctaccatttcatttatctgtcacaaatagagtgtaagacagagtgaaataatgcctaaacattcgggttcccttcagaggccaattttaagaaaaataattgagggaaggttatttcagcttcctcttctgcatatcaactcctcatccttccctacttcactttctacattttaggatagataaaggacaccacagacaatctaacaatttcctctagtctctgagtgagtaataacagaagcagtccaaatgaggaattcctgttgttcatccccagatggatttccttaggccactcttgtaacacatctcccttgatttctacagatttttatgttgtatgytaatttccatgactcttttactcacctggaaaacaacagtatcactatcagaattgttcaactggtatgtgacagctaaaattaacacttcttccttaactctgttttattttgctcctctcaaaaagcaaactcctgttcccagagatagtttaatttcatttttgtacctggatactatttgtgagaccctaattacttaccttttttggcagactttgaatggctatggcacaggaaatcatcacaatcagcaagaagagagatgaatgca

SEQ ID NO: 719940 - DNA, 617 bp, Homo sapiens
atataaataaatcagaagttggttacattgaaataaaaaatataaacctctgataacttaatcaaaaagataaagaaatctcaatgaaaaattttaaaaatgaaaatgtgggtatatcacaaacataacagggatttttaaaacatgaaagcaaaataaaatacataaaaacaataaatttcaatttagataaagaaaatttctaaaaataaaaccataccaaacttactcaagacacaaactgagagcctgtattaatcttgtgtatactgaagagaatgaattgggggttgaaaatcttcctaaaaagaaaatatcacactaagattgtttagttgatttacaaggagcagccattctattgtattgcaattctagaatatggaaaaagaggggctatttctcaactcwttctataaggtcagtattcccctagtatcaaaaccacacaaacacaatagagaagataattgtgggtgagtctcactcacaaaaagatttaagtttttgttaaaaatactacaaaactaaatttaacaagctaaaaaaatacaagcacatataaccaagttggggtttatcacaaacttgcaaggcagtttaaatcagaaaatcaa

SEQ ID NO: 719941 - DNA, 819 bp, Homo sapiens
attgattttataaaatggatgactaaagagtaaaaatgaagattctatagtattgactcgacacagcagaggaatcaagatggtctccctgaactccttttatctgataatgttccatagcacttaccccaaatcaccaaatttttagccagtttttaaaaaacgaactttgacacttggcaaattcatgaggaagacatgtatccaggtyttatggcccagctcaacattggactgtcttgggcctagcactctttcggctctttaattctctgaataatgtccgcctatacagctgagagaaatttgtcatcttctcagttgttataagtcatcactttcatgccctacctacagcacatgtgaattgtgggggcttaagggaaagtgcgcttgtgcatgtcaaattgcctacaagaatggacatgggggttggaggcaagccctttcccacctctccaaagagcagcagagatgagattcctatagttatttattgaacttggattttcaatcattgctgaggtataatcatgccttctcttgttttgttttttttcttttacaattacagtacttcattattgccacagggggaactgttggcttaattttgctttggagacactgctgctgaaattattaagctaatgatttatgccctgtgtgatacagcaatctcttgtgcttaaaatggttactatgttttgtttactgtttataactaccagtggttgtgccacaagaaacctctgccagtttgcagagtttatttatccctgtggatctttagaaaccactgattaatatagaaaaaat

SEQ ID NO: 719942 - DNA, 819 bp, Homo sapiens
attgattttataaaatggatgactaaagagtaaaaatgaagattctatagtattgactcgacacagcagaggaatcaagatggtctccctgaactccttttatctgataatgttccatagcacttaccccaaatcaccaaatttttagccagtttttaaaaaacgaactttgacacttggcaaattcatgaggaagacatgtatccaggtcttatggcccagctcaacattggactgtcttgggcctagcactctttcggctctttaattctctgaataatgtccgcctatacagctgagagaaatttgtcatcttctcagttgttataagtcatcactttcatgccctacctacagcacatgtgaattgtgggggcttaagggaaagtgcgcttgtgcatgtcaaattgcctacaagaatggacatgggggttggaggcaagccctttcccacctctccaaagagcagcagagatgagattcctatagttatttattgaacttggattttcaatcattgctgaggtataatcatgccttctcttgttttgttttttttcttttacaattacagtacttcattattgccacagggggaactgttggcttaattttgctttggagacactgctgctgaaattattaagctaatgatttatgccctgtgtgatacagcaatctcttgtgcttaaaatggttactatgttttgtttactgtttataactaccagtggttgtgccacaagaaacctctgccagyttgcagagtttatttatccctgtggatctttagaaaccactgattaatatagaaaaaat

SEQ ID NO: 719943 - DNA, 2215 bp, Homo sapiens
tgtatcacccaagctccgttcttagaattaaccattattccagagagccctggttcttttttttgaacatgatactaggaaccaaagtgctgggtgaaatgacttctcagtagcattaaagagatgtactggctggatgccgtggctcatgcctgtcagcacagcacttcgggaggctgaggtggaaggattacttgagtgcaagagttcaagaccagcctgggaaacttaatgagacaaaaaaaaaaaattaaaaattatctgcttggtggcacacacttgtagcgttaaccactcaggagactgagataaaagaattgcttaagcccaggcgtttaagatgacagtcagctatggttgcgccagtgtgctccagcctaagcaacagagccaggccccatctctaaaaaagattaaaaagtgcaagggtttgagattacagtcagctgtgattgcacctctgcactccagcttgggaaacagagccagaccccgtctctaaagagagcaggaggcggcggtggggggtaacccttcatcagattaccattgattttttttttcttactcttttttttccttctctttgcatctgcttagggcccctaaagtgatggagtggctgtggagtcttcagtttgcctgcatgccaggtgcaagccaaggagttgtaagagcatccccctcataagctaccagtaggccaggactccagtgtggagggatggatctctgaaggtcacagcttggcccttctctgaagaacgtccaccagcatgtcagcccagctgcactgcaggagtgaagggtgagatgactgtcaataaggataaaggccatcttccccacccgtcactcatcctgccaagccatcactgggtaaccaggactcatgggcagtgtcacctctggggccatgctggcatctgtaacctccatccatccttgtggtcccatccagccatctctgcccccttgcctggcccattctgttgtgaagttttcrtccaccttgctcttgtgcagagtcggaattcacaggggttccaatgcccaagggaagcccatggaactgtttactcttattactggctagagacgtccacaggacaaatcagcttcagattataccatcgttagagtaggtgcaactggggggcttgccctacttaactctccaatgcaatccatgctgccagcttcatacagactccatccagtgcaaatggcttccttctgtgtgcagagcaaatgctccagggaagagatacagaggattccccatcatcattgttgccaagtgaccccaaatattcctatcctgtctgttgtaaaaaggaaaaatcatgtcttggaagaacagcatcgccctacagatacagactaggcactttgcacatgaaacaagagtcccagaaatttctagaagcaaatctcgcattcgtgaccgccagacctacgggatgtgtaaggcacattctcaatctcatcacttgtgagagttgcattgcctagtccagcagccgtgaaggactctctgctgtttttcctctgcttcatttgacacatgagagagaagagatgaagatggaggcgggccctgccccagggacatgtatatctctctgaatgtccttgacagacagcagcagcccagcaatgcccagcccccatcctgtctgtatgcaccctggtgagcattttctacagtctcctaaacgctcccattattctgttttgcaggtgtgatgtgtggcacctcagtgttgtcatagcttctgcctcctccgtgtggagagagggcataaagacagagctgagatattatggctattccagaaaataaaatattttttgaaaccacatggctcaggtgcacctctttgtgtcattgtgaaaacagaaccctagcctgtataccgttagcttggtagcacttggataacagacagagtattcactggccctgcagaggagcatgggtggaaacgaatttatcggctgatgttggcacagtttgctgttggtgcattactattattattactattattattattgttagacggagtctcactctgtcgtccaggctggagtacagtggcacgatctccgctcaccacaacctccgcctcccgggttcaagcaattctcctgcctcagcctcccaagtagctgggattacaggtgcccaccaccacgcctggctaatttt

SEQ ID NO: 719944 - DNA, 2215 bp, Homo sapiens
tgtatcacccaagctccgttcttagaattaaccattattccagagagccctggttcttttttttgaacatgatactaggaaccaaagtgctgggtgaaatgacttctcagtagcattaaagagatgtactggctggatgccgtggctcatgcctgtcagcacagcacttcgggaggctgaggtggaaggattacttgagtgcaagagttcaagaccagcctgggaaacttaatgagacaaaaaaaaaaaattaaaaattatctgcttggtggcacacacttgtagcgttaaccactcaggagactgagataaaagaattgcttaagcccaggcgtttaagatgacagtcagctatggttgcgccagtgtgctccagcctaagcaacagagccaggccccatctctaaaaaagattaaaaagtgcaagggtttgagattacagtcagctgtgattgcacctctgcactccagcttgggaaacagagccagaccccgtctctaaagagagcaggaggcggcggtggggggtaacccttcatcagattaccattgattttttttttcttactcttttttttccttctctttgcatctgcttagggcccctaaagtgatggagtggctgtggagtcttcagtttgcctgcatgccaggtgcaagccaaggagttgtaagagcatccccctcataagctaccagtaggccaggactccagtgtggagggatggatctctgaaggtcacagcttggcccttctctgaagaacgtccaccagcatgtcagcccagctgcactgcaggagtgaagggtgagatgactgtcaataaggataaaggccatcttccccacccgtcactcatcctgccaagccatcactgggtaaccaggactcatgggcagtgtcacctctggggccatgctggcatctgtaacctccatccatccttgtggtcccatccagccatctctgcccccttgcctggcccattctgttgtgaagttttcatccaccttgctcttgtgcagagtcggaattcacaggggttccaatgcccaagggaagcccatggaactgtttactcttattactggctagagacgtccacaggacaaatcagcttcagattataccatcgttagagtaggtgcaactggggggcttgccctacttaactctccaatgcaatccatgctgccagcttcatacagactccatccagtgcaaatggcttccttctgtgtgcagagcaaatgctccagggaagagatacagaggattccccatcatcattgttgccaagtgaccccaaatattcctatcctgtctgttgtaaaaaggaaaaatcatgtcttggaagaacagcatcgccctacagatacagactaggcactttgcacatgaaacaagagtcccagaaatttctagaagcaaatctcgcattcgtgaccgccagacctacgggatgtgtaaggcacattctcaatctcatcacttgtgagagttgcattgcctagtccagcagccgtgaaggactctctgctgtttttcctctgcttcatttgacacatgagagagaagagatgaagatggaggcgggccctgccccrgggacatgtatatctctctgaatgtccttgacagacagcagcagcccagcaatgcccagcccccatcctgtctgtatgcaccctggtgagcattttctacagtctcctaaacgctcccattattctgttttgcaggtgtgatgtgtggcacctcagtgttgtcatagcttctgcctcctccgtgtggagagagggcataaagacagagctgagatattatggctattccagaaaataaaatattttttgaaaccacatggctcaggtgcacctctttgtgtcattgtgaaaacagaaccctagcctgtataccgttagcttggtagcacttggataacagacagagtattcactggccctgcagaggagcatgggtggaaacgaatttatcggctgatgttggcacagtttgctgttggtgcattactattattattactattattattattgttagacggagtctcactctgtcgtccaggctggagtacagtggcacgatctccgctcaccacaacctccgcctcccgggttcaagcaattctcctgcctcagcctcccaagtagctgggattacaggtgcccaccaccacgcctggctaatttt

SEQ ID NO: 719945 - DNA, 2215 bp, Homo sapiens
tgtatcacccaagctccgttcttagaattaaccattattccagagagccctggttcttttttttgaacatgatactaggaaccaaagtgctgggtgaaatgacttctcagtagcattaaagagatgtactggctggatgccgtggctcatgcctgtcagcacagcacttcgggaggctgaggtggaaggattacttgagtgcaagagttcaagaccagcctgggaaacttaatgagacaaaaaaaaaaaattaaaaattatctgcttggtggcacacacttgtagcgttaaccactcaggagactgagataaaagaattgcttaagcccaggcgtttaagatgacagtcagctatggttgcgccagtgtgctccagcctaagcaacagagccaggccccatctctaaaaaagattaaaaagtgcaagggtttgagattacagtcagctgtgattgcacctctgcactccagcttgggaaacagagccagaccccgtctctaaagagagcaggaggcggcggtggggggtaacccttcatcagattaccattgattttttttttcttactcttttttttccttctctttgcatctgcttagggcccctaaagtgatggagtggctgtggagtcttcagtttgcctgcatgccaggtgcaagccaaggagttgtaagagcatccccctcataagctaccagtaggccaggactccagtgtggagggatggatctctgaaggtcacagcttggcccttctctgaagaacgtccaccagcatgtcagcccagctgcactgcaggagtgaagggtgagatgactgtcaataaggataaaggccatcttccccacccgtcactcatcctgccaagccatcactgggtaaccaggactcatgggcagtgtcacctctggggccatgctggcatctgtaacctccatccatccttgtggtcccatccagccatctctgcccccttgcctggcccattctgttgtgaagttttcatccaccttgctcttgtgcagagtcggaattcacaggggttccaatgcccaagggaagcccatggaactgtttactcttattactggctagagacgtccacaggacaaatcagcttcagattataccatcgttagagtaggtgcaactggggggcttgccctacttaactctccaatgcaatccatgctgccagcttcatacagactccatccagtgcaaatggcttccttctgtgtgcagagcaaatgctccagggaagagatacagaggattccccatcatcattgttgccaagtgaccccaaatattcctatcctgtctgttgtaaaaaggaaaaatcatgtcttggaagaacagcatcgccctacagatacagactaggcactttgcacatgaaacaagagtcccagaaatttctagaagcaaatctcgcattcgtgaccgccagacctacgggatgtgtaaggcacattctcaatctcatcacttgtgagagttgcattgcctagtccagcagccgtgaaggactctctgctgtttttcctctgcttcatttgacacatgagagagaagagatgaagatggaggcgggccctgccccagggacatgtatatctctctgaatgtccttgacagacagcagcagcccagcaatgcccagcccccatcctgtctgtatgcaccctggtgagcattttctacagtctcctaaacgctcccattattctgttttgcaggtgtgatgtgtggcacctcagtgttgtcatagcttctgcctcctccgtgtggagagagggcataaagacagagctgagatattatggctattccagaaaataaaatattttttgaaaccacatggctcaggtgcacctctttgtgtcattgtgaaaacagaaccctagcctgtataccgttagcttggtagcacttggataacagacagagtattcactggccctgcagaggagcatgggtggaaaygaatttatcggctgatgttggcacagtttgctgttggtgcattactattattattactattattattattgttagacggagtctcactctgtcgtccaggctggagtacagtggcacgatctccgctcaccacaacctccgcctcccgggttcaagcaattctcctgcctcagcctcccaagtagctgggattacaggtgcccaccaccacgcctggctaatttt

SEQ ID NO: 719946 - DNA, 2215 bp, Homo sapiens
tgtatcacccaagctccgttcttagaattaaccattattccagagagccctggttcttttttttgaacatgatactaggaaccaaagtgctgggtgaaatgacttctcagtagcattaaagagatgtactggctggatgccgtggctcatgcctgtcagcacagcacttcgggaggctgaggtggaaggattacttgagtgcaagagttcaagaccagcctgggaaacttaatgagacaaaaaaaaaaaattaaaaattatctgcttggtggcacacacttgtagcgttaaccactcaggagactgagataaaagaattgcttaagcccaggcgtttaagatgacagtcagctatggttgcgccagtgtgctccagcctaagcaacagagccaggccccatctctaaaaaagattaaaaagtgcaagggtttgagattacagtcagctgtgattgcacctctgcactccagcttgggaaacagagccagaccccgtctctaaagagagcaggaggcggcggtggggggtaacccttcatcagattaccattgattttttttttcttactcttttttttccttctctttgcatctgcttagggcccctaaagtgatggagtggctgtggagtcttcagtttgcctgcatgccaggtgcaagccaaggagttgtaagagcatccccctcataagctaccagtaggccaggactccagtgtggagggatggatctctgaaggtcacagcttggcccttctctgaagaacgtccaccagcatgtcagcccagctgcactgcaggagtgaagggtgagatgactgtcaataaggataaaggccatcttccccacccgtcactcatcctgccaagccatcactgggtaaccaggactcatgggcagtgtcacctctggggccatgctggcatctgtaacctccatccatccttgtggtcccatccagccatctctgcccccttgcctggcccattctgttgtgaagttttcatccaccttgctcttgtgcagagtcggaattcacaggggttccaatgcccaagggaagcccatggaactgtttactcttattactggctagagacgtccacaggacaaatcagcttcagattataccatcgttagagtaggtgcaactggggggcttgccctacttaactctccaatgcaatccatgctgccagcttcatacagactccatccagtgcaaatggcttccttctgtgtgcagagcaaatgctccagggaagagatacagaggattccccatcatcattgttgccaagtgaccccaaatattcctatcctgtctgttgtaaaaaggaaaaatcatgtcttggaagaacagcatcgccctacagatacagactaggcactttgcacatgaaacaagagtcccagaaatttctagaagcaaatctcgcattcgtgaccgccagacctacgggatgtgtaaggcacattctcaatctcatcacttgtgagagttgcattgcctagtccagcagccgtgaaggactctctgctgtttttcctctgcttcatttgacacatgagagagaagagatgaagatggaggcgggccctgccccagggacatgtatatctctctgaatgtccttgacagacagcagcagcccagcaatgcccagcccccatcctgtctgtatgcaccctggtgagcattttctacagtctcctaaacgctcccattattctgttttgcaggtgtgatgtgtggcacctcagtgttgtcatagcttctgcctcctccgtgtggagagagggcataaagacagagctgagatattatggctattccagaaaataaaatattttttgaaaccacatggctcaggtgcacctctttgtgtcattgtgaaaacagaaccctagcctgtataccgttagcttggtagcacttggataacagacagagtattcactggccctgcagaggagcatgggtggaaacgaatttatcggctgatgttggcacagtttgctgttggtgcattactattattattactattattattrttgttagacggagtctcactctgtcgtccaggctggagtacagtggcacgatctccgctcaccacaacctccgcctcccgggttcaagcaattctcctgcctcagcctcccaagtagctgggattacaggtgcccaccaccacgcctggctaatttt

SEQ ID NO: 719947 - DNA, 2671 bp, Homo sapiens
atgctatgcattaattttttttcttcacaactgcacagatgaagtttggttcttacaatgtagatcttagccagcttagtatatatatattttctttccttattaacaacttaaaggaagcattctatggcttctctttggtatatctaattgttagcattactactcttgtgctttgggtccattaagaaatacagtaagagtttcttgaacaaaatcactgaaatactgggacaggtgataaccctaagtgactaacaatcagggagcacctatagagcagatactctgggcagaagaaggtgggactgcccaacatttcatcaggttactcagaacactgtatacatttacaacttatgaattatgtctggaattttctatttaatattttctgaccacagttgactgtaggtaattgaaactgtagaaagccaaaccacagataaggtgggactactgtattatttctcttcttctgtgtctttacctccatgggttatgaaagaaaaaaaaagaatttcactgaagcatacgcatgctgtgaagatacttttgcaggtatagttgctccagaaagaaagctgagactgggtattatgtgtatagaacactctcatatattaaaggcacacatttcagcaaagtgagaggactccaagatatatatgtatgtacacacacatacacacacamaatttcaggactaaccttctagacggcaataaaaaattgccacaagagtatctgtgtttttggaagcatgttctgaatcaacagtgtctagcaactcaagttgaacatagttgtatgtgctagaggtagtgagttttaactggaaaatctcactgtttgcttgcatgctgtccacacagtgaaggacatggttgaaggcatagaaagaatatggtttactatgtctccatgatggaaagtaggttttcatatcctttaccatcctcacaagttcttcagaaagcttttttttttttttaaattgtgctttttccttctagtgtactttagttatttccttcaatttcctataactcctcattctaaattgttgagtctccactacacttttccgtggctgctgccacactctatgttactctgccatttgtattctggcttcacaatacatcagattattcctgaaggaactcaataccactggattgtggtccattatgttattagggtcatttctgctggaatcattttcacaagatttattgtttggtatctgtagatcttcagattagaccatcctttcctctccagcccttgattctgttgtctgcttcttttttattttagaatcattcactgaatccatttggtcaatactgtttgattagggaaagttattaagtcatcatacactgacaattaattatctacattcttgtcgatgtatttcttatttcctatatttccaggaaatctcttagaaatttttacttatggtagatataatccgctctaccagcagaccatgagattagccagtaaagctagctctgtaggcaaaatagaccatgctaataatatatgctattgcagtaaaatatgctatttcaatagtttctcatggatgataatagtgatttggaccaggattataattaagttgctatgaaaagtgtttgggttatgggtatatttagaaaataaaactggcaggattggatttggggtataaggaaaagtaaagagacaaaaaaatgacaaaaatttttagcttgaatactatgcagaataaatttaccatttcagagatttgcaggtggtaggaagaacaggtttggcagaggagatcaagagtttcattttggagatttaagtttcaggtagttacaggtctttggataataaagtatcacagctaatcctcttttctgagtattattaagatacagtttacctgtctatgaagaaatttcaaaggttatatggaaaatattgacagtcactacattaagtgtaattatgtcggaagaataccttttagggtggtcctggctgactattaggtatctatccttcagtttctttttcttcttagaaatttaaacacaaattaaacttaatcaaatataacattttaaaatcatttaaataaaataactagaaaattttgtacatctctttattcatttcaatatgaatatagaaagataattgaaatgatagtcaagaaatatcagtaacatttagtaaccaagggctggaaattgtggttgtacatttatttatttatttttatggaactgatttttaaaaaacatttctatattttttccatttttttataatgagaacatgttacttttacaatactatatatactaaaatgtaaagaaaagagtaacattactggtatgcactttgaatagaagttatgactccagggagatatgattgatcaaaagaaaaggattggataatcaccaaacttcctccatgccttccctcttggagatacaacctctttccaggaaacaaatgagcactaagaattgtcatatctttaaggatttagaatttttaacataattttaataatcctaccatttgtccacattaaaaaatgtaccatattaacaacagattaatccacaacaaaggattagaaccaaggtagaagagtcaacgaaattagaaa

SEQ ID NO: 719948 - DNA, 2671 bp, Homo sapiens
atgctatgcattaattttttttcttcacaactgcacagatgaagtttggttcttacaatgtagatcttagccagcttagtatatatatattttctttccttattaacaacttaaaggaagcattctatggcttctctttggtatatctaattgttagcattactactcttgtgctttgggtccattaagaaatacagtaagagtttcttgaacaaaatcactgaaatactgggacaggtgataaccctaagtgactaacaatcagggagcacctatagagcagatactctgggcagaagaaggtgggactgcccaacatttcatcaggttactcagaacactgtatacatttacaacttatgaattatgtctggaattttctatttaatattttctgaccacagttgactgtaggtaattgaaactgtagaaagccaaaccacagataaggtgggactactgtattatttctcttcttctgtgtctttacctccatgggttatgaaagaaaaaaaaagaatttcactgaagcatacgcatgctgtgaagatacttttgcaggtatagttgctccagaaagaaagctgagactgggtattatgtgtatagaacactctcatatattaaaggcacacatttcagcaaagtgagaggactccaagatatatatgtatgtacacacacatacacacacaaaatttcaggactaaccttctagacggcaataaaaaattgccacaagagtatctgtgtttttggaagcatgttctgaatcaacagtgtctagcaactcaagttgaacatagttgtatgtgctagaggtagtgagttttaactggaaaatctcactgtttgcttgcatgctgtccacacagtgaaggacatggttgaaggcatagaaagaatatggtttactatgtctccatgatggaaagtaggttttcatatcctttaccatcctcacaagttcttcagaaagcttttttttttttttaaattgtgctttttccttctagtgtactttagttatttccttcaatttcctataactcctcattctaaattgttgagtctccactacacttttccgtggctgctgccacactctatgttactctgccatttgtattctggcttcacaatacatcagattattcctgaaggaactcaataccactggattgtggtccattatgttattagggtcatttctgctggaatcattttcacaagatttattgtttggtatctgtagatcttcagattagwccatcctttcctctccagcccttgattctgttgtctgcttcttttttattttagaatcattcactgaatccatttggtcaatactgtttgattagggaaagttattaagtcatcatacactgacaattaattatctacattcttgtcgatgtatttcttatttcctatatttccaggaaatctcttagaaatttttacttatggtagatataatccgctctaccagcagaccatgagattagccagtaaagctagctctgtaggcaaaatagaccatgctaataatatatgctattgcagtaaaatatgctatttcaatagtttctcatggatgataatagtgatttggaccaggattataattaagttgctatgaaaagtgtttgggttatgggtatatttagaaaataaaactggcaggattggatttggggtataaggaaaagtaaagagacaaaaaaatgacaaaaatttttagcttgaatactatgcagaataaatttaccatttcagagatttgcaggtggtaggaagaacaggtttggcagaggagatcaagagtttcattttggagatttaagtttcaggtagttacaggtctttggataataaagtatcacagctaatcctcttttctgagtattattaagatacagtttacctgtctatgaagaaatttcaaaggttatatggaaaatattgacagtcactacattaagtgtaattatgtcggaagaataccttttagggtggtcctggctgactattaggtatctatccttcagtttctttttcttcttagaaatttaaacacaaattaaacttaatcaaatataacattttaaaatcatttaaataaaataactagaaaattttgtacatctctttattcatttcaatatgaatatagaaagataattgaaatgatagtcaagaaatatcagtaacatttagtaaccaagggctggaaattgtggttgtacatttatttatttatttttatggaactgatttttaaaaaacatttctatattttttccatttttttataatgagaacatgttacttttacaatactatatatactaaaatgtaaagaaaagagtaacattactggtatgcactttgaatagaagttatgactccagggagatatgattgatcaaaagaaaaggattggataatcaccaaacttcctccatgccttccctcttggagatacaacctctttccaggaaacaaatgagcactaagaattgtcatatctttaaggatttagaatttttaacataattttaataatcctaccatttgtccacattaaaaaatgtaccatattaacaacagattaatccacaacaaaggattagaaccaaggtagaagagtcaacgaaattagaaa

SEQ ID NO: 719949 - DNA, 1524 bp, Homo sapiens
cttctgaatttcatcacaataaaatctgtcactcttgtctacaggttctcagaaacatggcttgtaactaattggtcaatactgacgtaaccactattaaatcaaggtgatatcatgtgccttctgatgtgatgtattctaacaaattgcttaattggtgtctaatcatgaggaaatatcagcaaaggcaaataaagaaatattatgcaaaacaaataaacaaacacctggcctgtactcttaaaaaatgtcaacatcaaggaacatacacacaaaaagacagagaaactattctggagtaaagaagaataaagggacatgaaaattaaaggcaatgcataacatggactagggaagaaaagtactacaaagaacattattaggaatactgacaaaaatctgaatatgtactgtgggttaggtagtataattttatcaaggttaactatagaatggctatttggattttgataattatactaattttgttgactagactgtggttatttaaggaaatgttcatattcttaagaaattcacacggaatgatttcaggtaaatgcctctaacttactctgaaatgtttcaggaaaaatatatatgtaaatagattgatagatcaggaggagagagagtagatgataaagcaaatgaggtaaaatataaacaaaagaccaatctaaggagagacagaaatatttgtactattattgcagcttttctttaagtttgaaaatgtatcatactaaatatttaacaaaataaacgtttttgcatttcccccccttactcctgtaatatctctgacaggtttatttctatttccaccatgctttcctagggaaatataaggccattcatcttttctcacctaataaggattgtactactttggaattttgtacatttcgactttatttttatctacagctctgatgggtttaaaaatgcttattgaatatttccttattgtttaggtggacgtgacagtctcttgtcatttgtcccaatttgaaatggttagttttctacacacagtcttcttaaaataatgattaattagaataaatgccaatgctattctaacagatcggtgtctttagaacagtaatgtgaaaatttagacatatagacgctctatgaaaaataataacttccctatggctgacttttaacatgtrttctttttcattatagcggaagaattcttcatattacctaataatgatcttgagatcaatggcctagcattttattcctcatacagttatactattctattacataattcctaaacaattaggagaagattcataatgattttcatcctaaagccaaattatagtgaaagtgttgtaagttgtatatttattttatataagctaaataaataactctgcagcaattctgtgatgctgtaatgatgtttagatgttatccattaagtcatggcttcataaataaccaagtttccttgaatttcctagagccagggactttctatgaattccaaacaaagataat

SEQ ID NO: 719950 - DNA, 615 bp, Homo sapiens
tgttagctcctctagtgatgtaaggattctttaatgataattaaatgcctgatacttaggctatgatcagtattagaatatgaacagaagatcacaaaatcagaagaaagttaaaaaaccttaattactgctactgaaaccagcctggccaacatggtgaaacaccatctctactaaaaatacaaaaaaattagccasgtgtggtggtgtgcacctgtaagcccagctacttgggaggctaagacagaattgcttgaacccgggaggcggagcttgcagtgaaacgagatcacgccactgcactccagcctgggtgacagagtgagactccatctcaaaaaaaaaaaaaaatcattcagatgtaaaacatgcaaaattatataactgatatattatttcatagaattttacaaatatgcccaagaatactttgtataaaaggaaggagtttatttgttgtgtatgtgtatacacacatatgtaaggtagtttattgtgagtttactgtcttcatttattgagagtaaatgatgtcgatttattaactcatataattatcccaaatactatgggagaggcatattatatttattcccattttatagaaaagaaaac

SEQ ID NO: 719951 - DNA, 671 bp, Homo sapiens
tagtttattcacacactgctataaagacatacctgagactgggtaattcataaagaaaacaggttcaattgaaacacagttcctcaggctgtataggttttgcttctggggaggcctcagaaaacttaacatcatgccagatgttaagatgatggtgacggggaagcaggcatgtatttgcacggctgtcaaaagagagagagagaatgggggaggtgctacacatgttcaaacagccagattttgtgagaagtctaycacgagtagagcaaaaggaaagcctgccccaattattcaattacctcctgccaggccccacccttcaacactaaggatcacgacccaacatgagatttgggttgggacacagagccaaatcatatcagccatctatctctaggtaaggagtggatatcttttcttaagtacctaggatgcaaaatgactgacaaaaagatggtattcaataaatgctaaacttaactaaaagatagtgtgtttacctcctaatgtttacatcatttgactattcactaatatttactatttataagtagaagaagaatcagaataataaagtttgagtcctggttgtgtgatacaaattcaactgcctttggtctctatctgcttacttgctacacgtaggtactgatttttcttaccttaca

SEQ ID NO: 719952 - DNA, 1295 bp, Homo sapiens
agtaaaatataactagcagtcatattattaaaatctacaccatgtctatatcaaacatcttatttaagccagaagaacatttttaaaacataaaacctgttaataaagagaaattccataaaatgaaaaattgctttctatctacagtcagttatgtctctttgcaggttgcaattacttcgcatgttggtttttttttttttcttttcttttaaatgaagtctcgctttgttgcccaggctggagtgcagtggcgcgatcttggctcactgcagcctccacctcctgggttgaagcgattctcctgcctcagcctcccaagtagctgggattacaggtgcctaccaccacacctagctaattttttgtatttttagtaragatggggtttcaccatgttggccaggctggtctcaaactgcatgctgtttttatattcgaagaatattatgttgtatacatattgagatcccattaccaatcttgtttagcatgagacagctaagtcattgagtacagagttattttccaaaagtattcaatctcatgttgagaaagcaagaggaaagatgaggtgggagatgggggatgggggaagcaagagagagtgagagggagagacagagacagtgacacaaagacaaggagagacagagacaaagattgagattgtggtgctgagttttaatgaccttctgaccccaaacctggtcacattgatgtaaataataaatacgcggttgcactgcttttccttagaaggaaacatagacttactcctgtatctcttctcatatccttgatgttttctgaattttttattcagactgattgacactgattccctctttgacagacctctctccagaacctcacgctcctatatccaggaggacgaatgctactcagcctctctgtttggatggcaggtggcataataagcatatgtcacatgaactcctgatctcttggtctatattctcatctaaacagctcctttcatggtcttcttcatctcatctcagttgatggcaactccatccttccaactgctcatattaaaaaaaaaaaaaaaaaaaaaaaaccttcgtaactatttttattcttgttttctttgaaatttcatatcatatctctcagtaattcctgcaggctccctctccctttaaaacgtatacagaatctcattgcttctcaccacccccactgcttctactctggataaagtcaacacaatctcttacttggaatattgcatttgcctttgactctgttcagagtattcttaaccaaag

SEQ ID NO: 719953 - DNA, 2085 bp, Homo sapiens
acaaagtagcatatattacaaaggaaaatatactagtatcatgtaagttttttttagtaactgctttcaaataattgaatcataaacaatgatttctgcggttttaagctcattattttggttccctggtttctcctaggatgcagtatagaatctccatgcctgatgtttatgtaccaacagaagctgctgcttctttctttcattatttcctttttaagtgaaagttaataccttttatatgttacagagaagaggcagaaaaagccacactcccactatgctatraatgcactgaggatcaactgagggatgattatacacatggctgaatacagtttattcatttgttctttggatttgtagataacaaatggtggtattctgtaacatcttgtgcgattagcaaatgtaaggccgaaatgaatctttcaaacagtgtataaacagtttgattttcaaaattatatagacatttcattctgatgtacgcaattcatgtgtgtatctcttccagtcttcttcctttgaaatcacctctgttgggtacacaaaacagtagggacaaagatttagatttgacacatgcattaaaatcattactgtttgtttgtgtgcaagtataccttaaaagagtgcctgtaccctgacatgtcatgataatattatcttagagattacagttaaagaaaccatattaagtaccttctcattatggaatattttgaaaaagtcagttgtgaataccgctgaaatcactggatttgagtctgaaacaggacaggttaacatgacattctatgtgatactgaattctacttcatgacaagtaatagtgtgatttgattcaattccatataatgacaatttttgaagagctttttttgtgaaaggtctcagctaagcatatgagaataattagaacacagtataagagttttggcagtttgaagaccaatgttgaagaaagaaatgttagttgcccatgttgaatacacacacacacacacacacacacacacacacaatcttttatgaagagttatattttagtgtactatgtaagtgacagagaattagctttatacttatattggcccatactggaatgtgtattagaatatccatacacttacttaaaatttctgtaattcttaaacctctatcatagtgcttattatgttgattacttatttgaaaactggattaattgaatacagatgaaaggtaaaatgttcaggatggacactaactattaacttttaaggatacctaagaatgtttatgaaaaacatgttccatgctacaaatactagctcataataaaagagagggtggaaatcttgactttgttttctgggaaaaagtaattattagttctcattagtttaataagtcacatttttttaaaatagaaaaaatagctttttgtaggacaaagtggagaagttgactggaaatgttaagtggaatgtattttttcaccttttgaaaaatttggtattggctgggtgcagtggctcacacctgtaatcccagcactttgggagaccgaggtgcacgaatcacaaggtcaggagatcgataccatcctggctaacacaatgaaaccccgtctctactaaaaaatacaaaaaattagccgggcatggtggcgggtgcctgtagtcccagctacttgggaggctgaggcaggagaatggcgtgaacctaggaggcggagcttgcagtgagctgagattgcgccactgcactctagcctaggtgacacagcgagactccgtcaaaataaaaaaaaaaaaaaaagaaaaatttggtattaattagtatttttttctttccattgacttcctttccttacaaaataattgatcatattatttcctcctattaacttccaatgacacttttcaaatatattgaatacaatcatatgggttaggcttattacttatcagttccactctatatttgaacttcagctttacctaattaaattacatttcatccattggtaaaattaccagattttagaaaaactagtgaagcacatggagcctaaatatgctgaattttactttttct

SEQ ID NO: 719954 - DNA, 2085 bp, Homo sapiens
acaaagtagcatatattacaaaggaaaatatactagtatcatgtaagttttttttagtaactgctttcaaataattgaatcataaacaatgatttctgcggttttaagctcattattttggttccctggtttctcctaggatgcagtatagaatctccatgcctgatgtttatgtaccaacagaagctgctgcttctttctttcattatttcctttttaagtgaaagttaataccttttatatgttacagagaagaggcagaaaaagccacactcccactatgctataaatgcactgaggatcaactgagggatgattatacacatggctgaatacagtttattcatttgttctttggatttgtagataacaaatggtggtattctgtaacatcttgtgcgattagcaaatgtaaggccgaaatgaatctttcaaacagtktataaacagtttgattttcaaaattatatagacatttcattctgatgtacgcaattcatgtgtgtatctcttccagtcttcttcctttgaaatcacctctgttgggtacacaaaacagtagggacaaagatttagatttgacacatgcattaaaatcattactgtttgtttgtgtgcaagtataccttaaaagagtgcctgtaccctgacatgtcatgataatattatcttagagattacagttaaagaaaccatattaagtaccttctcattatggaatattttgaaaaagtcagttgtgaataccgctgaaatcactggatttgagtctgaaacaggacaggttaacatgacattctatgtgatactgaattctacttcatgacaagtaatagtgtgatttgattcaattccatataatgacaatttttgaagagctttttttgtgaaaggtctcagctaagcatatgagaataattagaacacagtataagagttttggcagtttgaagaccaatgttgaagaaagaaatgttagttgcccatgttgaatacacacacacacacacacacacacacacacacaatcttttatgaagagttatattttagtgtactatgtaagtgacagagaattagctttatacttatattggcccatactggaatgtgtattagaatatccatacacttacttaaaatttctgtaattcttaaacctctatcatagtgcttattatgttgattacttatttgaaaactggattaattgaatacagatgaaaggtaaaatgttcaggatggacactaactattaacttttaaggatacctaagaatgtttatgaaaaacatgttccatgctacaaatactagctcataataaaagagagggtggaaatcttgactttgttttctgggaaaaagtaattattagttctcattagtttaataagtcacatttttttaaaatagaaaaaatagctttttgtaggacaaagtggagaagttgactggaaatgttaagtggaatgtattttttcaccttttgaaaaatttggtattggctgggtgcagtggctcacacctgtaatcccagcactttgggagaccgaggtgcacgaatcacaaggtcaggagatcgataccatcctggctaacacaatgaaaccccgtctctactaaaaaatacaaaaaattagccgggcatggtggcgggtgcctgtagtcccagctacttgggaggctgaggcaggagaatggcgtgaacctaggaggcggagcttgcagtgagctgagattgcgccactgcactctagcctaggtgacacagcgagactccgtcaaaataaaaaaaaaaaaaaaagaaaaatttggtattaattagtatttttttctttccattgacttcctttccttacaaaataattgatcatattatttcctcctattaacttccaatgacacttttcaaatatattgaatacaatcatatgggttaggcttattacttatcagttccactctatatttgaacttcagctttacctaattaaattacatttcatccattggtaaaattaccagattttagaaaaactagtgaagcacatggagcctaaatatgctgaattttactttttct

SEQ ID NO: 719955 - DNA, 2085 bp, Homo sapiens
acaaagtagcatatattacaaaggaaaatatactagtatcatgtaagttttttttagtaactgctttcaaataattgaatcataaacaatgatttctgcggttttaagctcattattttggttccctggtttctcctaggatgcagtatagaatctccatgcctgatgtttatgtaccaacagaagctgctgcttctttctttcattatttcctttttaagtgaaagttaataccttttatatgttacagagaagaggcagaaaaagccacactcccactatgctataaatgcactgaggatcaactgagggatgattatacacatggctgaatacagtttattcatttgttctttggatttgtagataacaaatggtggtattctgtaacatcttgtgcgattagcaaatgtaaggccgaaatgaatctttcaaacagtgtataaacagtttgattttcaaaattatatagacatttcattctgatgtacgcaattcatgtgtgtatctcttccagtcttcttcctttgaaatcacctctgttgggtacacaaaacagtagggacaaagatttagatttgacacatgcattaaaatcattactgtttgtttgtgtgcaagtataccttaaaagagtgcctgtaccctgacatgtcatgayaatattatcttagagattacagttaaagaaaccatattaagtaccttctcattatggaatattttgaaaaagtcagttgtgaataccgctgaaatcactggatttgagtctgaaacaggacaggttaacatgacattctatgtgatactgaattctacttcatgacaagtaatagtgtgatttgattcaattccatataatgacaatttttgaagagctttttttgtgaaaggtctcagctaagcatatgagaataattagaacacagtataagagttttggcagtttgaagaccaatgttgaagaaagaaatgttagttgcccatgttgaatacacacacacacacacacacacacacacacacaatcttttatgaagagttatattttagtgtactatgtaagtgacagagaattagctttatacttatattggcccatactggaatgtgtattagaatatccatacacttacttaaaatttctgtaattcttaaacctctatcatagtgcttattatgttgattacttatttgaaaactggattaattgaatacagatgaaaggtaaaatgttcaggatggacactaactattaacttttaaggatacctaagaatgtttatgaaaaacatgttccatgctacaaatactagctcataataaaagagagggtggaaatcttgactttgttttctgggaaaaagtaattattagttctcattagtttaataagtcacatttttttaaaatagaaaaaatagctttttgtaggacaaagtggagaagttgactggaaatgttaagtggaatgtattttttcaccttttgaaaaatttggtattggctgggtgcagtggctcacacctgtaatcccagcactttgggagaccgaggtgcacgaatcacaaggtcaggagatcgataccatcctggctaacacaatgaaaccccgtctctactaaaaaatacaaaaaattagccgggcatggtggcgggtgcctgtagtcccagctacttgggaggctgaggcaggagaatggcgtgaacctaggaggcggagcttgcagtgagctgagattgcgccactgcactctagcctaggtgacacagcgagactccgtcaaaataaaaaaaaaaaaaaaagaaaaatttggtattaattagtatttttttctttccattgacttcctttccttacaaaataattgatcatattatttcctcctattaacttccaatgacacttttcaaatatattgaatacaatcatatgggttaggcttattacttatcagttccactctatatttgaacttcagctttacctaattaaattacatttcatccattggtaaaattaccagattttagaaaaactagtgaagcacatggagcctaaatatgctgaattttactttttct

SEQ ID NO: 719956 - DNA, 775 bp, Homo sapiens
tgacatttgactatatctgtgtcgaataaatgtccttaatgctatgtaaaggacagaaagataaacaatcatgtcaaatcatacatataatatctagccaagccattgacccaaatcaaaacatatgtagaaagaaataaggggcctatcatccaagaaatttgttttgatatctattactgggtatttttgagcctgaatattagagagtctagagttatataaaatctattctactcgaataccaagctgtatattgtaggtatggctaggtattgatgcaaattcttactttataaatcaatttttgatgctcaatttttttataatttttcctcctcttaaaatattgtaagycctcatttttaacaaactgaatatctgttattgactttgcattccatatatttgtcataatcattttttagatttttaatccaggttgacttcgtaactagcatttgggaccatatatattttcattcctgctcaaataactggcttaccacctaacccactactctattcagtcttcccttgaattttgtcattatggcaaaagaactgtgtgaagttattagcaattttggctacagtctctcttagaatgtttgttgtccttagggactcacagcaggcaaaaaaaaaaaaaatcacagtccccttcagcaacctgtgcttttctgaaatattggctttgacaagcctgcaggggtgagaaataattttgtgtgtgagggtttgcacttcatggatgtctttctgagttaattac

SEQ ID NO: 719957 - DNA, 591 bp, Homo sapiens
aatgtatctgttaagtacacaaacttaatgaattttaaaaagaaacatattcaaaaatcaaagtggttattctgagaaaatatgattgtaaaaatagcctcaatgttttttagacatgctaaaataatttatttgaagcyaatgatatctgtataagtaaatctgctaaacatgtgaaatatttactttggttgtttatgcacaaacagctaattaagttgtcaatattatattcgaacatgcacatatacatatatactgataaacattcccagttgaatgctttaaaaatataataagattcctttttatgtgcaacagtagataatatatagtagtattctgcttttatttgattttcatataaagaagtaaaaactctatgtctgaccactccccaaaaaatacaatatttaattgcacttgacatttctaattcagcaagactattgttttccttccattttagatgcagtatttcaagaagaaaacaaacaaactctataaacgaaagcctctctgagtatacacaaacacaaaccccatcttagcactgtgaggcacaggaaactcctgcatgatggatggttg

SEQ ID NO: 719958 - DNA, 655 bp, Homo sapiens
aacatgctgaagtaaatcttgcagaaaaagcatttttacagccattgcctgcagtcttttaatttgtcagcctgagatccatcacagctgaattaggtttcttaagccgtttatttgcaataaagtgtaatcttccagttagtttgcaaacactgttgaatttttctgtcataaacatgaagattgcagctacacaaacgattcttttttatctctcttttaaaaataatatattgtggaacaccttgtagggtagtagttataatgtgtgtgtgtttgtgtgtgtgagtgtgtgtgtgtgtgtrtatatatatatatatatatatatatatattccacaaacatggaatttaagaacaacaattctattcttcctttgcatttacaacattccctcatgtagaaattcactcctgaaatttaactgccagatgttttcttaggaaaatccatattggttcccattacctttagaaaactaactttaggtggaaatgaatggtgaaaatgaatgctgtaattatgtcattacactagcataaattattgccattttgtgctaaacatggttaattttttgtacatatattgctctttgaaatagttataaaactaaaatgtagctattaaatggcttcaggctgataagaggaaa

SEQ ID NO: 719959 - DNA, 655 bp, Homo sapiens
aacatgctgaagtaaatcttgcagaaaaagcatttttacagccattgcctgcagtcttttaatttgtcagcctgagatccatcacagctgaattaggtttcttaagccgtttatttgcaataaagtgtaatcttccagttagtttgcaaacactgttgaatttttctgtcataaacatgaagattgcagctacacaaacgattcttttttatctctcttttaaaaataatatattgtggaacaccttgtagggtagtagttataatgtgtgtgtgtttgtgtgtgtgagtgtgtgtgtgtgtgtatrtatatatatatatatatatatatatattccacaaacatggaatttaagaacaacaattctattcttcctttgcatttacaacattccctcatgtagaaattcactcctgaaatttaactgccagatgttttcttaggaaaatccatattggttcccattacctttagaaaactaactttaggtggaaatgaatggtgaaaatgaatgctgtaattatgtcattacactagcataaattattgccattttgtgctaaacatggttaattttttgtacatatattgctctttgaaatagttataaaactaaaatgtagctattaaatggcttcaggctgataagaggaaa

SEQ ID NO: 719960 - DNA, 655 bp, Homo sapiens
aacatgctgaagtaaatcttgcagaaaaagcatttttacagccattgcctgcagtcttttaatttgtcagcctgagatccatcacagctgaattaggtttcttaagccgtttatttgcaataaagtgtaatcttccagttagtttgcaaacactgttgaatttttctgtcataaacatgaagattgcagctacacaaacgattcttttttatctctcttttaaaaataatatattgtggaacaccttgtagggtagtagttataatgtgtgtgtgtttgtgtgtgtgagtgtgtgtgtgtgtgtatatrtatatatatatatatatatatatattccacaaacatggaatttaagaacaacaattctattcttcctttgcatttacaacattccctcatgtagaaattcactcctgaaatttaactgccagatgttttcttaggaaaatccatattggttcccattacctttagaaaactaactttaggtggaaatgaatggtgaaaatgaatgctgtaattatgtcattacactagcataaattattgccattttgtgctaaacatggttaattttttgtacatatattgctctttgaaatagttataaaactaaaatgtagctattaaatggcttcaggctgataagaggaaa

SEQ ID NO: 719961 - DNA, 957 bp, Homo sapiens
ttctctcggacaataagtttttatagttttgaaagtggcatgaaatttaaaaatatatttctgggtaaataacaggtatatagttattctctattaacagctaaatttgaaatgatatactaaaatcacataaggggagttaagaaattaggtaaaatgaaaactttatcaaagttgattttaactggctaatttaaatcattatatgtaaatttaaaatgtaaatcctaaaataattactttctcagctagaatttccccaatcaatctatgaatttgggttcaagataagtaattgtccagttctgagaccaatatatctggaaaatgaaggtcagaaaatatatttgaattctccgaaaaagatagagagataaatacaatgtatattttatattatctattaagaaatttaagtttgcaactacattttaaaatgcatattctatcagaagtccatgtactagaaagcttatttaaggtgataatcagtaagctttttgctaatattaattgtctagacagtttaacttccattttagaaacacactctcagaagtagagataaccagttctttgtcacagcagataaaaagctcacagccaagaataccagagcactatttttgtcaggtgcatatcaacatttatgttgtcaccctgggccagcaaaacatttaacagatstgctgtatctatgttttctaagtatttgatacctatttttatatttcctcaatgatggccccccccaagaaaagccacaaattggcaaagaacgtgaagtaaaaacatattctcttaaagccaaatacataatgtccggattttgtgtttatgtgtatgtgtttaatctagtttaaggtgactcaattttcaaaatcaattcacactaaactttgctatcttccttcataccaagcactaaaacattaaaatgttttaaaatatatttaa

SEQ ID NO: 719962 - DNA, 957 bp, Homo sapiens
ttctctcggacaataagtttttatagttttgaaagtggcatgaaatttaaaaatatatttctgggtaaataacaggtatatagttattctctattaacagctaaatttgaaatgatatactaaaatcacataaggggagttaagaaattaggtaaaatgaaaactttatcaaagttgattttaactggctaatttaaatcattatatgtaaatttaaaatgtaaatcctaaaataattactttctcagctagaatttccccaatcaatctatgaatttgggttcaagataagtaattgtccagttctgagaccaatatatctggaaaatgaaggtcagaaaatatatttgaattctccgaaaaagatagagagataaatacaatgtatattttatattatctattaagaaatttaagtttgcaactacattttaaaatgcatattctatcagaagtccatgtactagaaagcttatttaaggtgataatcagtaagctttttgctaatattaattgtctagacagtttaacttccattttagaaacacactctcagaagtagagataaccagttctttgtcacagcagataaaaagctcacagccaagaataccagagcactatttttgtcaggtgcatatcaacatttatgttgtcaccctgggccagcaaaacatttaacagatgtgctgtatctatgttttctaagtatttgatacctatttttatatttcctcaatgatggccccccccaagaaaagccacaaattggcaaagaaygtgaagtaaaaacatattctcttaaagccaaatacataatgtccggattttgtgtttatgtgtatgtgtttaatctagtttaaggtgactcaattttcaaaatcaattcacactaaactttgctatcttccttcataccaagcactaaaacattaaaatgttttaaaatatatttaa

SEQ ID NO: 719963 - DNA, 918 bp, Homo sapiens
gtacaaatgtaygtattatacatatatgtgctgtatataatacatacaaataaaatttgtataaaatattatataaataaaagtatacaatataaacaaatattttataatatatacatatataaaatacaaattatttcctagacagatataatctacactagctttttcctattagtttcctctgtaccttctgaaaatttgtactctaaattttctttctaaaaatttgtactttaaaaatctatgtgatgtgtctgaaagtgctcactagaacacaaagctgataaatgttgaaaaaagaggaaagaaatctacactcaaatacatttagtagtacagtgtgtaaaagtgtgtgtatggggaaataaattatgaaacatcaggctgtagagttaagtgggcaccagatcataagactcatgggacagactaaataaatgtcccctgttacacttgaaaccatgtaactaaatctggccactcaactacaagcagaaataactgttgtaacttctggaccagtgcagttaagaagcagtgcacctccttaattcctttcttcttcttatacagggacttgggagtccacatgtgctagatggtgtagccacaggatggagaagagtagctgacctatactgaacatttcaatgagtgaaaaataaacctgtgctgtgttaagcttctgttccatttcagaatatttccatcgctacaggattgatctcttacctggctcatccttaccaatgaaggctcttcatattttttattctactgagatatttgtaattagtcttttttcacatgcacttgattaatcaaaattatacataattattgtataagtgaggtttaaagcaactgtccctaagcagcttcatacaggtaaatgtctacagtcaggagctggca

SEQ ID NO: 719964 - DNA, 918 bp, Homo sapiens
gtacaaatgtacgtattatacatatatgtgctgtatataatacatacaaataaaatttgtataaaatattatataaataaaagtatacaatataaacaaatattttataatatatacatatataaaatacaaattatttcctagacagatataatctacactagctttttcctattagtttcctctgtaccttctgaaaatttgtactctaaattttctttctaaaaatttgtactttaaaaatctatgtgatgtgtctgaaagtgctcactagaacacaaagctgataaatgttgaaaaaagaggaaagaaatctacaytcaaatacatttagtagtacagtgtgtaaaagtgtgtgtatggggaaataaattatgaaacatcaggctgtagagttaagtgggcaccagatcataagactcatgggacagactaaataaatgtcccctgttacacttgaaaccatgtaactaaatctggccactcaactacaagcagaaataactgttgtaacttctggaccagtgcagttaagaagcagtgcacctccttaattcctttcttcttcttatacagggacttgggagtccacatgtgctagatggtgtagccacaggatggagaagagtagctgacctatactgaacatttcaatgagtgaaaaataaacctgtgctgtgttaagcttctgttccatttcagaatatttccatcgctacaggattgatctcttacctggctcatccttaccaatgaaggctcttcatattttttattctactgagatatttgtaattagtcttttttcacatgcacttgattaatcaaaattatacataattattgtataagtgaggtttaaagcaactgtccctaagcagcttcatacaggtaaatgtctacagtcaggagctggca

SEQ ID NO: 719965 - DNA, 631 bp, Homo sapiens
gaaacatctttattccacggagccatctttcatgccataacaaaccagcctaagagagcagacagtagggaggagaggcccagaagagggagcagcaggcggggagggggcgttgstggggagggttgctctggagagtggggaagggtactgggttgggggaaggggactggagggcgatggggaagagaggacaggaagggagcaaagcagaaatagaagaaaaaaattctctcaacccctacccaggtccagaaccttctatcatcattcctgggcctgatgtggggaatggtagtggtgggtcagggcttggcctgggattagctatgtctgtcgcttccaggtgtggagtgtgtaaggctaataccagaaagggtttcatctgggcccttcaccttcaagctgatggtctcaccaccaggtggatgtagtgtctggattatagtctgcccagcgatttccatgggtgtggttaactaaggggagagtcagtctttatttacactcaaatggactctaaaaatacaattactattagctggggttactgatggttattttaaacagagaatgcaattaaagcaagagctaaagaaatacaagtatttaagcaccattagatgccata

SEQ ID NO: 719966 - DNA, 631 bp, Homo sapiens
gaaacatctttattccacggagccatctttcatgccataacaaaccagcctaagagagcagacagtagggaggagaggcccagaagagggagcagcaggcggggagggggcgttggkggggagggttgctctggagagtggggaagggtactgggttgggggaaggggactggagggcgatggggaagagaggacaggaagggagcaaagcagaaatagaagaaaaaaattctctcaacccctacccaggtccagaaccttctatcatcattcctgggcctgatgtggggaatggtagtggtgggtcagggcttggcctgggattagctatgtctgtcgcttccaggtgtggagtgtgtaaggctaataccagaaagggtttcatctgggcccttcaccttcaagctgatggtctcaccaccaggtggatgtagtgtctggattatagtctgcccagcgatttccatgggtgtggttaactaaggggagagtcagtctttatttacactcaaatggactctaaaaatacaattactattagctggggttactgatggttattttaaacagagaatgcaattaaagcaagagctaaagaaatacaagtatttaagcaccattagatgccata

SEQ ID NO: 719967 - DNA, 616 bp, Homo sapiens
aggaggcagggctgaccaggcaagttcaaaacctgagcccgtgttactcggaggcttcctaggctgctaaaaatatccagtgatctgcctaaagcaggggcaagtgaggaaagcctttcttcccgctgcctccttgtcacctgcaagaaaaggagccagttaaggggtgacaggggaggaggaaaatccaacagatacacagagcagcgatttttgccwtgtgcattgctgcacagcagggtggcagaggtgtcttcctacgctgaaggagctcaggggaggcctcagcctggactttagaccagagagaaagtgggttcaaatcccagctctgccactgactcatttgcatggtcctctacccaagacaggggactttataagcctcagtcttcccatctgtaaaatggaaataataatgccaacacgtgaattgtaagctttaaagataacatgtggtaagtgctgggctcagagcgggtcctttcccaatggcagctgttattactgctgtgacaacttagtggggagagacagatacataaaagcaatggaggctgagcatggtggcttgcacctgtaatcccagcactttgggaggtcgaggtgggtggat

SEQ ID NO: 719968 - DNA, 653 bp, Homo sapiens
ttgaaaatctgcaaaaagtttccagaaggaagtacctgttccctccttacaaaacattctcattatgtgccaggccataatctggtcacttaaccccgtctatgccatcatcccctaaagggctaacccatagctaaataggttcaaaatatgcatgaaagatacttgcttctttccatctttcactcctagataactttccccttccaatatagtagctcagtcagcaaagtgttctacagcggtgtgatggttaattttatgtgtcaacttgkctgggccatgaggcgcccagatatttggtcaaacattattctgtgtgtttctataaggatgtttttggatgaggttaacgtataaattggtggacttttagtaaagcagactgttctccataatgtaggtgggcctcatccaatccactggaggctgaataaaacaaaaaacccagcctccctcaagcaagagtggtttctccagcagactgtcttggaatgttatctgtgacattgccttcagatctacagatggcctttggaccaagactggaacattggctctcctgggtctccagcctgctagcccaccttgcagattctggactagtcaactttcataatcacatgagccaattcctgtaataaatctctttc

SEQ ID NO: 719969 - DNA, 653 bp, Homo sapiens
ttgaaaatctgcaaaaagtttccagaaggaagtacctgttccctccttacaaaacattctcattatgtgccaggccataatctggtcacttaaccccgtctatgccatcatcccctaaagggctaacccatagctaaataggttcaaaatatgcatgaaagatacttgcttctttccatctttcactcctagataactttccccttccaatatagtagctcagtcagcaaagtgttctacagcggtgtgatggttaattttatgtgtcaacttggctgggccatgaggcgcccagatatttggtcaaacattattctgtgtgtttctataaggatgtttttggatgaggttaacrtataaattggtggacttttagtaaagcagactgttctccataatgtaggtgggcctcatccaatccactggaggctgaataaaacaaaaaacccagcctccctcaagcaagagtggtttctccagcagactgtcttggaatgttatctgtgacattgccttcagatctacagatggcctttggaccaagactggaacattggctctcctgggtctccagcctgctagcccaccttgcagattctggactagtcaactttcataatcacatgagccaattcctgtaataaatctctttc

SEQ ID NO: 719970 - DNA, 913 bp, Homo sapiens
ttctggcttttgggctcagtatatacccataatattatgcacatgatatggttcagatacttgtctccaaatctcatgctgaaatgtaacccccagtgttggaggcagagataacgtttcaacatgtaattatattataagttgattacatgtaatgtagagaattatattatattaccaattccctggtggaaggtgggatcacaggggtatatccctcttgaatggcttagagccatcccctcggtgatgagtgagttcatgtgagatatggttgtttaaaagtgtgtggcaccttccccctacttgctcccaatctcaccatgtgaaattcctgctcccacttcacattccaccataattgtaagcttcctgaggcccttaccagaagctgagcagatgttggtgccaatttgtacagcctgcaaaaccatgcaccaattaaatttcrgttctttataaattacccagcctcatgtattcctttagagcaacacaagaaagacctaacacagtatgtaaaaaagatccttggaatacccatgagaaaagtaaactaaccaagtaacaaaattgtaataaaaatacacttccctatataacaatgttacagtcattagcctgaatcaagagtaaatacattaattaggagagatttatcttgttctgaaggtgagaacagttcatagctagcatgggtatttggaaattatggaactaataccgctaaaaatctgatgtttatattttggttttagatgccctaaaagatatttcaagacataacatttagaaaacactggtgtaggaagcagattaccataataaaaacagcaaatggggaacgtgattctgtctggtttgcaaattgattccatctgctggaaacatctagttgcctccaaccactgtc

SEQ ID NO: 719971 - DNA, 913 bp, Homo sapiens
ttctggcttttgggctcagtatatacccataatattatgcacatgatatggttcagatacttgtctccaaatctcatgctgaaatgtaacccccagtgttggaggcagagataacgtttcaacatgtaattatattataagttgattacatgtaatgtagagaattatattatattaccaattccctggtggaaggtgggatcacaggggtatatccctcttgaatggcttagagccatcccctcggtgatgagtgagttcatgtgagatatggttgtttaaaagtgtgtggcaccttccccctacttgctcccaatctcaccatgtgaaattcctgctcccacttcacattccaccataattgtaagcttcctgaggcccttaccagaagctgagcagatgttggtgccaatttgtacagcctgcaaaaccatgcaccaattaaatttcagttctttataaattacccagcctcatgtattcctttagagcaacacaagaaagacctaacacagtatgtaaaaaagatccttggaatacccatgagaaaagtaaactaaccaagtaacaaaattgtaataaaaatacacttccctatataamaatgttacagtcattagcctgaatcaagagtaaatacattaattaggagagatttatcttgttctgaaggtgagaacagttcatagctagcatgggtatttggaaattatggaactaataccgctaaaaatctgatgtttatattttggttttagatgccctaaaagatatttcaagacataacatttagaaaacactggtgtaggaagcagattaccataataaaaacagcaaatggggaacgtgattctgtctggtttgcaaattgattccatctgctggaaacatctagttgcctccaaccactgtc

SEQ ID NO: 719972 - DNA, 1023 bp, Homo sapiens
gagttatgaacatttgaatcaaataaaagttgtaggagttatcatttaaagttagagaacttctaaagaaatagagttgaaagaaaggagaatgaactatttatttatttattactcaatgtatttgttccagctcatggtgatgataccttaaggactacctacaaggcttttaagttccatataactaagtagtttttacatagttataaaatttatatatttttgctagttatctattaatttttagagtggtagaattatgggtagatattttcttttaaaagtacaacatttcaattaaaattttacttgatttattttaatagtgtaacacacaaaggtctattagatgttactgaagcatagcacatagccacatttaattattcattctggaatcagcttttgtatttaggttttaatgaagttaaattgcctctatactcacatgagtttggattttggttctgctaaattctcccraatttgaaattcgatcaattagagacaaattattttccacttagagctatatttcctttaacatttcttagcaattttgttttcatggaacccaaagtcaggtcccaggcaccctgtgaaatgaccctttaatatttagcataatatatacaataagttcttgccagctctctttcctttttaataagataacttggtttatttatagcttatgtttaaacttaatcttttatgaaatcttttaacctcatgagtatgtcttattttagaaacctttactaaataaatggataaacaagtatttattaagtaactactacatgaaagaaagattctgtgccattaacaatagcagagaattaaagagatgggggaatcaatttgacgcattattaagatattaagtgacaagtataatatagaaggaaaagtctgatactttttggtttgttccttatgacattcatggtagagaagatgagtcttaagaagtgataatagatgctatttctatagcttttgttatgaggataagcc

SEQ ID NO: 719973 - DNA, 1023 bp, Homo sapiens
gagttatgaacatttgaatcaaataaaagttgtaggagttatcatttaaagttagagaacttctaaagaaatagagttgaaagaaaggagaatgaactatttatttatttattactcaatgtatttgttccagctcatggtgatgataccttaaggactacctacaaggcttttaagttccatataactaagtagtttttacatagttataaaatttatatatttttgctagttatctattaatttttagagtggtagaattatgggtagatattttcttttaaaagtacaacatttcaattaaaattttacttgatttattttaatagtgtaacacacaaaggtctattagatgttactgaagcatagcacatagccacatttaattattcattctggaatcagcttttgtatttaggttttaatgaagttaaattgcctctatactcacatgagtttggattttggttctgctaaattctcccaaatttgaaattcgatcaattagagacaaattattttccacttagagctatatttcctttaacatttcttagcaattttgttttcatggaacccaaagtcaggtcccaggcaccctgtgaaatgaccctttaatatttagcataatatatacaataagttcttgccagctctctttcctttttaataagataacttggtttatttatagcttatgtttaaacttaatcttttatgaaatcttttaacctcatgagtatgtcttattttagaaacctttactaaataaatggataaacaagtatttattaagtaactacyacatgaaagaaagattctgtgccattaacaatagcagagaattaaagagatgggggaatcaatttgacgcattattaagatattaagtgacaagtataatatagaaggaaaagtctgatactttttggtttgttccttatgacattcatggtagagaagatgagtcttaagaagtgataatagatgctatttctatagcttttgttatgaggataagcc

SEQ ID NO: 719974 - DNA, 1860 bp, Homo sapiens
  misc_feature 1760, 1761, 1762, 1763, 1764, 1765, 1766, 1767, 1768, 1769,1770, 1771, 1772, 1773, 1774, 1775, 1776, 1777, 1778, 1779,1780, 1781, 1782, 1783, 1784, 1785, 1786, 1787, 1788, 1789,1790, 1791, 1792, 1793, 1794, 1795, 1796, 1797, 1798: n = A,T,C or G
  misc_feature 1799, 1800, 1801, 1802, 1803, 1804, 1805, 1806, 1807, 1808,1809, 1810, 1811, 1812, 1813, 1814, 1815, 1816, 1817, 1818,1819, 1820, 1821, 1822, 1823, 1824, 1825, 1826, 1827, 1828,1829, 1830, 1831, 1832, 1833, 1834, 1835, 1836, 1837: n = A,T,C or G
  misc_feature 1838, 1839, 1840, 1841, 1842, 1843, 1844, 1845, 1846, 1847,1848, 1849, 1850, 1851, 1852, 1853, 1854, 1855, 1856, 1857,1858, 1859: n = A,T,C or G
ttttcttgatgttttctgcttttcttgtcttgcattgatgtctgcatatttgctggggcagtcacctattccagaatttacaggctactttctgtgaggaaagtccttcacctacaggtggtatgagggtactgatgggtgggatgcagcaattccagctccagtgaagatacaaaagcatagtctctgtgtatttccatccgttgaagattgcaagggtcctcagtggccaaggctgcagatgtccacagtggtggtgagggctgttgggttaagagttggtgaaggtggtaggagccctcctgatttcttgttctcccgtgtgggaagtcatggccaaggggatccctcttggtgttgggtttggttcatggttatgttcatggtggcagtggcactggtgcttaacatgcaggcaccccggctccagtgttggtctcaatgtgcaatgaacagatgcttatggaacagctggaaagccagggtctgaaacaaaggcatgtggatacctatagtttctgtatggtccagggcatgggtgcttctaaagcagtagtggctcttgtgttgtaggcactggcacatgtagagctgttatggaaccggggtccagaatgtgggtttgtgtggagcaaccattgctctaaggtctgtgatgcagatgtgacttctatagcagtgactgtagggtccaacgcctgtgaggtcacagaatggctgcagagctaggatccgaagcatgggcttgtgaagttattattattattattattatttytgacaacacaattgactcaaaagataccactatcctttcaggaatccctaatttcataggcaatttatatgaacaaaactaatgagccttcaaaattccttagtctaaactattcaatagtgtttttaccctaaagcaataattttggtaaagtacataacactaatgtattcataataaaaaaaagtgtcaggaaaggtttaaaatgtaaaggcagtaagtctaaaataacacaattaagaataagaggatattttcctcacactataagatgtgtaagaattcttacaatgttccttttaatatttagtaacactatctaatagtactttttggccgggtgcagtggctcacgcctgtaatcccaacactttgggaggccgaggcgggcggatcacgagttcaggagatcgagatcacagtgaaacaccgtctctactaaaaatacaaaaaattagctgggggcagtggcgggtgcctgtagtcccagctactcgggaggctgaggcaggagaatggcatgaatccgggaggcagagcttgcagtgagccgagatcgcgccactgcactccagcctgggctatagagggagactccgtctcaaaaaaaaaaaaaaaaaaaaaaaaaaaaaggtggaacttttttcttttaaagtaaaaaaagtattttgatagtatttttaagtaccatgtttttctttgtatgttactaaaaaccactgtcatgcaaattctagtaatgaaaacaatttaagctccaagtttttcctaccaaaaaagcctcaggcacagatggccttttttttaatctagttaacaccatatcccaggtcatcatctgattaagcaagagtgcatttccatgaacaaaacactattctttgggaaatatccacaacttatattgaaattgctgggccacagcatataaccgctcccttcagtttttttgaaagattcttttcttggataataggcaatnnnnnnnnnnnnnnnnnnnnnnnnnnnnnnnnnnnnnnnnnnnnnnnnnnnnnnnnnnnnnnnnnnnnnnnnnnnnnnnnnnnnnnnnnnnnnnnnnnnnc

SEQ ID NO: 719975 - DNA, 579 bp, Homo sapiens
ctctatgctgtaggcatatacaatattgtgactagtccacttataggacatttctgtttccaaagttggcacgaaaaaaaagagacaaaaaacaaagacatgcccagcgaaggtcttgagtgctgggatctagttacaaaggtttgggaagtagattttttaatcttagaggactattcatggytgatactttctcaaatgtgccttagagatgcttccatttgcagcacacattccatagaccgcatcaatcactccattcagtcatccttgtctgtgtccttgtcttgccacgtgtgtctgctattctttccacaataggtgactctgggtccaggattcagacttgctttagccaataggatgaggtgagatgacagtatgggcttcacaaggttcacagtacctctgcttgcccttctgtgtctcggcctcagccatttttgggggtctcaggaggaagataaaagacaagtgggacagagccacacccaaggaccccaacccaacccagacggcttacactcggctggtgacatgcgtgagttggtgcaattaagactgcaacttctgatcctg

SEQ ID NO: 719976 - DNA, 1622 bp, Homo sapiens
tatacttctccataacaacccacggtgtaatatcacatttttaaaaaacactaaatgaatgagcttaattgagttgggtattttgtaattgaggaagaggcaaaatacattttttgaagagtaactccttgatgagagatgttaaatgattcatgaatccacatcagtgatggggctagataatgcagggttttcattcttagatcagaatccttagtctatcattagacccaccagatccaaaagataactttataaagtcaaagaaatgattttgtctacttgacttatagcctggatcatacaggaatattttgttttcatacatgaaaaatgatcatatttcctcactgatgttttacaatccaaactaaagcaaatccaaactaaagcaaaatcagatggttttacaatccaaactaaagcaaaacggtactttgagaataaagagttaaagacactgcctttatacaaataaaacaccatgtgtattaaaatatatgatccctaatgagatggtatttgaatgagaaaagctgggcatatcataattcttagcctagatatcgtaactgtgctttagaattggaccaagacactttcttactaagaactatctttagaagccattgtgtgcaaataacttctttctttaactagttggtggccttttattctgtgaggtatttaacatttaagtctgagtcacttgcttttaatgtgccacaatgatgtgatcccttaatatcgctgaactatgacagtgacatcctctttgaaaagaccaagctaccattagaaatgggtcatgaagcaaaagtcattaactcatttaaaaaaggccagagcccagcaccgcattactgacaaacctccttccctgtgtccatttgtctttatcaaatatcactttaatatccatctcccaagcatgagatagggttgtgaagcagctccctttgaaaaattaaaacccttagcaattaaatttgctttcaagtttcactttagatgagcaacttaattcttgtatgcaatattataaagtaagtattaataactcccagtaatacaaataatgattccagagttgctagtctgaaaacatttgaggactctttttttttgagacggagtcttgctctgtcacccaggctggagtgcagtggcttaatctcggctcactgccagctccgcctccggggttcatgccattctcctccctcagcctcccgagtagctgggactacaggcgcccaccaccacgcccagctaatttttttgtatttttagtagagatggggtttcaccgtgttagccaggatggtctcgatctcctgaccttgtgatcygcctgcctcggcctcccaaagtgctgggattacaggcgtgagccaccgcgcccagccttgaggactcttaaaagaggaaaattcaattaatagagtcaatgatgaaaaagtcaagacagagtttctaatattttccttgatgttagttttgcagaaagacaacatgagatagaggtcgtatcttttccacataccaaatgagaggtttattttaaaataatgttaaagtagtaacacaaatgatagggaataatatatgtcaacgtgagt

SEQ ID NO: 719977 - DNA, 1421 bp, Homo sapiens
tctttaatagcagtgtgagaacagactaatacaggaggcttccaggcctaacaggatgtagaagctcagaacatgtcatcaaggctgggtttctctttatttctcagttttgtctttccaaattattaacttcactttcaggcttcaggagatgatgcctggaaatctaggccaacctatcctttattgccaaaagtcccagagaaggaaaaaaaaaagtacacatcttttccaggcagtcctagcactatgagatgattggatctccctaacactgattgagtcatgtcaccagtcttcaaccaatcacaacatccaggagatcataatgttctgattcacccaatctgtgtcacagtctcaccaaagccagtaggagtaaactccacctgaaacagttgaagtgagtgtgaggccaggatgattcctcaggagaaaaaaaaatcacttttctgttactagaagaggttgggtggtataaayaacaggtgtctataacagcaggcaagcagcacctggatcaccagggccctgactccaagaaagaagctgtttccaccacttctttctctctaatttaaaatctctgaacaagttactaggaagaaaggacagcagatgtacaagcaataggtagagtgagagcctccttggactgaacacaaaacaacagagcttgagccagcttgcttgctgcccaggaccaataaagcaacaggacagtggaaagaaggcgcttgcctacttgcattcactgcccagtctttgtttgactggggtctcttctttcacattgttgtttttccccattggaagttgacagtttgacatcccatgggtcagcaagtgatagaaagatgatggtctccttatcgccaagaaaaaaccttcctgtgtgttccaccaacacatgagaggccaattgaagtgctgagggaaggaataatacagaatggggccatgggatccatctgtggcaaatttcccagttttctcagttttgctaaggggcagccagcccaggctccaccagccctagtcacataatggaaggcaccaacttccacaggacatcttctgaaaactctacatctgatcctgcatgtagacttagacgcatctactcacttacttttcaaggcctgtattaactatacagacaagactgagctctctctttttcctcctggattgagaattcctggagaagcaaccaattgccccagcttgcatcatttgtccagttcaagttatcctgtgaccaagagagtgggacacaaaaaacaaaatggctgctcccacagagaccgtgtaaagtcaccatgagcggagatagttccaaagaattagggttagggaagagcagatgatacaacaggtgaccaggccagagcaatttgactgcactggctatatgctcc

SEQ ID NO: 719978 - DNA, 2364 bp, Homo sapiens
actgacctttcctggaatttccctccacaaagggagctccctcacccaaagtcaggccccattgataagaagtggttccagagcctaaccgctttgcctcagtttggaagagtacaacaaagctctcatggggtcttctgaggcctctgttccaactctatccccattaaacttcttcccctgcctaattctaattcctccaatttttttacatgtgctgtccctaggcttaccctctgataaaactcatatacacaaaactccatctcagagtccatttccagggaatcaacctcagacaggttcaaagcctgtgctgttcaaacctttctcataagcaacctcttcaagtcaagtgcgttggctttgcctgcttcactccgaaaaaatattacaaaatgaatcatgaagttttaaaaatgagcaatttccaaagagaggacaaaaaatgttcccatgacatattcagaaaacctgcataattttatgtgaattgtggacccagtcaacaatyttcccaggtaaatactgtatattctctgttacaaagctgagaagaaggccttcatcatattggtttactcttttctgtctccccagcaaaataaactgtttgataaacagcctgaatttatcagcttctcctttacaaagttttacaaaacccagcctgccttcacatcagaaagtgttttgatacaaactatttcctttgagagtaactatggagtcctgcaatctcaggtcactggggatttgttaatattcattgagtccccatgatttgtcacaagatcacaaaattgccaatgccccatcttaaactgaattgcaacagaaatcacataagaatgacaaaaaacaaagagcaatttgttcacctagttcttgaagggcaattcaagttcatttggtccttttagaattttcagaaaatagtctttttttcttccctctcagttttttcaatatgaaattctggcctccaagttatgatttctggagttccagaaaaggcccatgctctttcaaatatctcccttcactgacttaagagtatttgcaattccaccattagagattctttttttaacgtcagtcaaaggtctccaaggaaatagaaactctttaagccatcgaagtccagcagtttagtttgagtatgactgagtttatcagcaactttctaagcaggggattttgattactaagtccttgagtagaaggacagggtgggaaaccagcattggtagaagagttatttgttcaggatactttacaaacatcatctcatttgattcccaagtaatcctgtattattccatctttactggggaggaaactgagttttagaaaaataggtagattgcccaacatcacataactagacactccggatgtgggcctacctaacataacagtcatctaccctaaaaacactgggctgataagggttaagaagaaatagaaactaagatacaaaacaaatgcttgacctcatgagtatcatcaggctaggctctggggctgaaggcaacactgggctacacaaagcatgacctgaagcagaagggggccttgaggtaaaaggatccttcccaacagatagatatagttctcatgtactttattgtagaatggccaccacctctgtaaacaaggtcaggaacatctataaactcattgcaacctcagatggcagagatagtccactctggattgcagatacttgaccatttgacatatcaatcttaccaacagtttctacagcccaccctcagacagaatgaggttgctctgaataggactttgggggcaggtacaaagagagtgacttgaaggtatctaatgtaaggcacttaaacctgagtaggtctctacatgaggctacatattcattctcaaataaaatagcttttctttgggattctctcctgttaaagttattgacaatacctctccctataagaggaaaagcacttacaagtttgaagttaaaaatatacttctaagtcatacagaaatacttctggagtcaactttagtcctccaaatacaatagggttcttattggtattattaagagcaaagttcatccaagctcaaaaaaatttatactaagttatttattcattaaccacaattctagtagtagccttttctcatcttggaatgttggcaatgaagctcaaatagtttactatgtagtgggaatacagcatgtgattaagaatatgggttttgccactaccagcctcttatcggttgctcatttcccctaatacccattaccttaaggttgaatgtagaattgatgcttgcacagccattaccatatatcattttacattttcttttgtctct

SEQ ID NO: 719979 - DNA, 863 bp, Homo sapiens
tgtagcttagatctagtaagctttcgagacttagaactataaaaaatgaaaaatgtagtatttgctggaaaatgactgagaaatttccagaattgataaaatgaattaataaatatagaaggcacaatatatcaaaagtgaaatataragaaaattgcaaatagataattatagtaaagctttagtgctttagcaacaaagaaaagttcttaacagaaataaaagattgaaaaaatctacaaagtaataacaatttgatctataaccaagttgtcaaaactgataaaggaagttaaaaaagagaatgatactcttatattactaaaaagaaaaaatagtcaatccagtattagctatctagaaaatctatttcatgcttgaatgtaaaataaagatatttatgtgcaatgagagaaaaggaaatgattattaagagacaatttttaagtaaatttctaaaagacgtgctgcatgaaaaatcaaaatgaacctggaaataattttgatgtaaaggaaaaactctgaacaataaactaagcaattctgaacagtatgcctctatagaacaaataaaatattatcagtttattaggttaaaacaagaaatgatgtataaactggacaaaacaatatgtaaattaacatgtaaatggaaggacatgctttttccgaagaatgccttttacattgaagtcactttcattcttttttaaaagtattttacagacatatatttcttaatattccctactttcagggagtgaaaaatgagcaagtctcacaatagacatgtaaattgggatggagatattctcccttcttgtattttcaggaaagcattaaaatattgatttcatactttg

SEQ ID NO: 719980 - DNA, 655 bp, Homo sapiens
aaaatcccatctccactaaaaatacaaaaaaaaaaaaaaaaaaaaaaatagccagatgtggcggcgtgcatgcctatagtcccagccactcgggaggctgaggcaggagatatcgcttgaacccgggaggcagaggctgcaatgagccgagatcataccattgcactccagcctgggcaacagagcaaggctccatttcaaaatataaataaataaaataaaattgttttcatcattatttagagttttaggttcacaaaataggaccatagctctttttcctgaactatgttcccactgaccactttaatggaaccttctttgcccacttaggatctgagggcaggtgacttgcattccactgtagcctctggggctctcactggtaccccatggagcttgagtaaaaccacscctgcctcccactatctctctcctcccactctttctgcatgagctgatccatgtgaactgttgtcagctcttagcacctagtcagtatctcccagctctcagccttctcagaacgtatgcagaagtcctggaaccctgttttgtcttgtgcttggcatgcctagaatctcatgttttgcccgcgtttgccagtgtcttcacctggcaagctggagtagtgatcgctcataaacctactaaa

SEQ ID NO: 719981 - DNA, 1930 bp, Homo sapiens
tgttgactgtaattattgtgagcagctctgagtgaagttcctagggtgcgatgctgcccccttatgaaacaccacatgatgggcactgctggcaggatgtaggactctrcggcagaggacttgaacttgggtcctggccttttgcctagtgatatgatgtgcacagtttctgggcctcagcaagtcggatatgctataaaaggttatttccaactcaaatactacgattccatagctaaataaaacttttcaagaactgaagtcaattgtgtctacacatttcacacaatgaggaagtgctggccagcccagcagcaggaactctacaaataaagtatttacgagaacaggggcgcttacagacccagcctaggcccagaacaggttggtggctctaatggcactcagaaatgacgaagtacgacatcaatacccctgccagcagacttgggtccgcacagacgtctggagctctaaatacagtgtgctgtttttgtttcttgttgttcacataaagctgcaagcacttcactgagtcactgcagtccagtcagcaggtccttaattacttttctcaacaaaggcactcaaaagaacaggcaaagttctaccagttaggaccggctatggaatgtcgggggcccgtggcaaaatgaaaatttggggcagctgcttaaaaatcattaagaattggccgggcacagtggctcatgcctgtaattccagcactttgggaggcggaggtgggtggatcccctgaggtcaggagtttgagacgagcttggtcaacatagtgaaatcccacctactaaaattacaaaaattagccaggtgtggtggcgggcacctgtaatcccagctagctgggaggctgaggcatgagaatcgcttgaacctgggaagcagaggttacagtgagccaagattgcaccattgcactccagcgtgggtgacacagtgagactctgtctcaaaaaaaaaacaaaaaaaaaacatgaagagtttcaagctggagagagcagaacacgaagtccatctggggccccgtgtgaggaagcaggtcacacactggtgaccccggccctgctaactgccatagtgttacggcctgggaatgtgattttcccatttgtggcagatcgatgtctagcgattccatggggttttctgagaggatttatagagagtttttctaagaacatcacacagtgaggaagttgtgatttcctcggagttaaggcctagtcaacagccccttctctatggagagccttggggcttttcttccccttgaactacagcagttagacctatgtctgttttatatattgagtttcctcattacttttcattttctaaaatggatcactgcttacatcaaccaaaaaaaaaaaaaaatcagtcagctagtaaatgtggtaaagttgactgtaaatcagtcagctagtaaatgtggtaaagttgactgtaatttttgtgagcagctgtgagtgaagttcctggaggtggggctgctcccttatgaaacaccacacagtggggcactgttgatgggatgtaggactctatggcacaggacttgaacttgggtcctggccttttgcactccccgcccccccatcccccctaccaagagctgcggtgtcttcacccaggtgcaccagccagcggtgggggggcttgccaagagctgccattttctagcctgggcgaggctgactgggtgaaggtgtgatgggaacaagtttaccaaggaagaaggatataatatcagggagaccacgagaggaagagtcagcaaacactaaaactgtcagccctttcaatactattttccaagagtatcagaaactgtttatagcctccagggcaaccgttcttagactttttttttcattccttactggtttaaaactctgatgacagctat

SEQ ID NO: 719982 - DNA, 1358 bp, Homo sapiens
tatagaaatctggctatacaaaagtaattacattgttaggtagtctggtaaacattcattgttttacatttctgacctctaaaatcttagggtgctccatcaattgatacatagcattgtatacattttaaataaagcattagaaagctgggcctggtggcatgtgcttataatcccagctatttgggaggctgaggcaggaggattcctggagcccaagagttcaaaaccagcctgggcaacacagtgagactccatctcaaaaaaaatgaaaaaagaaagcattataagatcagttataacttagaaatcatcctcagaggctgggcgtggttgcttacgcctrtaaccctagcactgtaggaggctgaggcaggaagattgcttgagcccagttcaagaccagcctgggcaacatagtgagaccttgcctctacaaatgatttttaaaaattaactgagcatggtggcacagacctgtggtcccagctactcaggaggctgaggtgggaggatcacttgagcccaggaggtcgaggctgcagtgagccatgattccaacccgggtgacagagcaagatctcatctcaaaaaaaaaatgaaagaaagaaattgtcctcagagacaaaagaaaaactttggtaaagagaaaagattggagtcactcagctgtcaggtcggtaccacagtctgtctgatctctgcagcaccagggagttattaaacatttccaagtgagagggtgtcttatgtttaaaatgttagctatcacaaaagaggaaaagatagagcaaactgctacattagatgtatgtcatggggactcaaagaaggggaattttttaaacttcacaggggtagatcttttatctgggccatctgggcctagaggacaaataggattttggtagggtgaggcattccagcatcatgggcaaactggcgtagcacagcaggtcagtgatcttgaaaaatttggcaccttttgtcaagtaggaaagatagattgttactgtttatcttcacttatttcttttttattctttctcttactttctagtatgcttttctcagcatccacagataaaaccgtggctgtgtgggatagtgaaacaggtgagagggttaaaaggctaaagggacatacttcctttgtgaattcctgttatccagccaggagaggccctcagcttgtctgcactggcagtgacgatggcacagttaaggtgggtattgtctctccgtgttccagtttctgaggtgatgtgatgtgaaccttatcttgccttgccacttgtactctagcttcctgtgcaaaacttaattttagcagtcatctcccataacacacttgaaat

SEQ ID NO: 719983 - DNA, 2149 bp, Homo sapiens
tgtttagaactattcaagtaaaatatatacaatgcattgccataagtttttattattgtaaaagggaattgtaagctaagccagaatggcattcattaatttaccctatataatgattcttctatctaaactaattagaagggcataaaataacttacaagttttgcaaagattttgatgctgttcaaagtagaacaaaaaccaagttcaattttaatgggtatgtgtcagtggaggcaagtgttcatggttgcaaatgatcaaaataatggaataaaaacaatgggacataaatacaataattaacagttgccaggaactataatttgtccactgtatataataaaatgaagaaacctgaaaaatgagactgttcttgtatttcctacaaaattttcaaattcaaagcaattgtgacaatttcttttctttctcttctctctcctcctccttcttcttccctttcttcttttcgtccatcttcctctggatatgaattcaaccacctctttttctcttccctgtagctactcaacactatttcccaatgatttactccatattcctgttgaaacaattttaggctccagtgatatggggaagggagaagggaactgtctttttacccaggaaccttattgcagcatgtaaatttatattggataagcacctatcttaatttatattcatttattcattaaacaaataattactgatgtctcactgcatgctagaccatgaccctgatacttgtaaactcataaattctcaagggaaagaaaatagcaccccagagctagtggtcccatcttggattatcactcagtgcctgttttctagtaatttattcctgccattggggtaagcttatggagacatatacaatgatgcccaactctgctattgtttccttttctggtaatttagaaccaatacaaaaagagagaaagaaggaaatatctttcctggaggttatatgagaaaataacccagtgattgttggagaccacagttttatcccctgtaatctgcagacaaagcaagagaaggaaagagagtgagagtggcagagagtgagagggcaggcagaggatgaaagctggctgacatatgcaaaggagagaagacaggaaaaaacatgggtggtgtgtcagtctaattccaatgccttcctgggacatgcataccagcactttggattccatgggacatccatgttgcttcctaagaatcactgttccctaccttatctttgttcttgagctaacgtcaccgagattatattcgttgcaatgaaaagcattgtaaatattcacccaggaaagagggtagagtctaaaattgtggttctgagtattttgttcaattttaactgtgcaaccattcttctagccttttagaaataaatgacactaaattggctatacraaaaaagccatcagtgtagttggtagactgaggttggttctcaaattattcctaattagaacgaagataaacagatgtgcccacactttgtggcactgctctaggaaatggggaatttaacttttgtttaaatctaatgtactgtttccgcatataaatttcacaggtgtcctgaaatttagaatagcactcccctctctctccagttaaaaaatgtgatatatggtccagttaagaccaatctgttaagcctgggaaacatagtgcaccacatctctacaaaaccaaaaaattagccaggcttggtggcacatacctgtagatcaagctacttagagactgagctaggaggattgcttgagcccaggaggtcaaggctacagcgagcaagccttgattgcaccactgcactcaagcctgggcaacagagtgataacctgtctcaaaaacacaaaaacaaaaaccccaaaagaccaatgtgtctccgttttgagagatgtgggacaaacggtgagtgtgtcaactgagtcacaataagtgagggaatatctgtggactgaatagatgaaaagctagatttgacatcacttaactagctaatataaagggagcctgattttgaaatataaagtgttgaaaagataaaataaaggcagataatgtgtaacctggagagagtggaggctgcatttctgaagaccaaaggtattttataggtctc

SEQ ID NO: 719984 - DNA, 2149 bp, Homo sapiens
tgtttagaactattcaagtaaaatatatacaatgcattgccataagtttttattattgtaaaagggaattgtaagctaagccagaatggcattcattaatttaccctatataatgattcttctatctaaactaattagaagggcataaaataacttacaagttttgcaaagattttgatgctgttcaaagtagaacaaaaaccaagttcaattttaatgggtatgtgtcagtggaggcaagtgttcatggttgcaaatgatcaaaataatggaataaaaacaatgggacataaatacaataattaacagttgccaggaactataatttgtccactgtatataataaaatgaagaaacctgaaaaatgagactgttcttgtatttcctacaaaattttcaaattcaaagcaattgtgacaatttcttttctttctcttctctctcctcctccttcttcttccctttcttcttttcgtccatcttcctctggatatgaattcaaccacctctttttctcttccctgtagctactcaacactatttcccaatgatttactccatattcctgttgaaacaattttaggctccagtgatatggggaagggagaagggaactgtctttttacccaggaaccttattgcagcatgtaaatttatattggataagcacctatcttaatttatattcatttattcattaaacaaataattactgatgtctcactgcatgctagaccatgaccctgatacttgtaaactcataaattctcaagggaaagaaaatagcaccccagagctagtggtcccatcttggattatcactcagtgcctgttttctagtaatttattcctgccattggggtaagcttatggagacatatacaatgatgcccaactctgctattgtttccttttctggtaatttagaaccaatacaaaaagagagaaagaaggaaatatctttcctggaggttatatgagaaaataacccagtgattgttggagaccacagttttatcccctgtaatctgcagacaaagcaagagaaggaaagagagtgagagtggcagagagtgagagggcaggcagaggatgaaagctggctgacatatgcaaaggagagaagacaggaaaaaacatgggtggtgtgtcagtctaattccaatgccttcctgggacatgcataccagcactttggattccatgggacatccatgttgcttcctaagaatcactgttccctaccttatctttgttcttgagctaacgtcaccgagattatattcgttgcaatgaaaagcattgtaaatattcacccaggaaagagggtagagtctaaaattgtggttctgagtattttgttcaattttaactgtgcaaccattcttctagccttttagaaataaatgacactaaattggctatacaaaaaaagccatcagtgtagttggtagactgaggttggttctcaaattattcctaattagaacgaagataaacagatgtgcccacactttgtggcactgctctaggaaatggrgaatttaacttttgtttaaatctaatgtactgtttccgcatataaatttcacaggtgtcctgaaatttagaatagcactcccctctctctccagttaaaaaatgtgatatatggtccagttaagaccaatctgttaagcctgggaaacatagtgcaccacatctctacaaaaccaaaaaattagccaggcttggtggcacatacctgtagatcaagctacttagagactgagctaggaggattgcttgagcccaggaggtcaaggctacagcgagcaagccttgattgcaccactgcactcaagcctgggcaacagagtgataacctgtctcaaaaacacaaaaacaaaaaccccaaaagaccaatgtgtctccgttttgagagatgtgggacaaacggtgagtgtgtcaactgagtcacaataagtgagggaatatctgtggactgaatagatgaaaagctagatttgacatcacttaactagctaatataaagggagcctgattttgaaatataaagtgttgaaaagataaaataaaggcagataatgtgtaacctggagagagtggaggctgcatttctgaagaccaaaggtattttataggtctc

SEQ ID NO: 719985 - DNA, 2149 bp, Homo sapiens
tgtttagaactattcaagtaaaatatatacaatgcattgccataagtttttattattgtaaaagggaattgtaagctaagccagaatggcattcattaatttaccctatataatgattcttctatctaaactaattagaagggcataaaataacttacaagttttgcaaagattttgatgctgttcaaagtagaacaaaaaccaagttcaattttaatgggtatgtgtcagtggaggcaagtgttcatggttgcaaatgatcaaaataatggaataaaaacaatgggacataaatacaataattaacagttgccaggaactataatttgtccactgtatataataaaatgaagaaacctgaaaaatgagactgttcttgtatttcctacaaaattttcaaattcaaagcaattgtgacaatttcttttctttctcttctctctcctcctccttcttcttccctttcttcttttcgtccatcttcctctggatatgaattcaaccacctctttttctcttccctgtagctactcaacactatttcccaatgatttactccatattcctgttgaaacaattttaggctccagtgatatggggaagggagaagggaactgtctttttacccaggaaccttattgcagcatgtaaatttatattggataagcacctatcttaatttatattcatttattcattaaacaaataattactgatgtctcactgcatgctagaccatgaccctgatacttgtaaactcataaattctcaagggaaagaaaatagcaccccagagctagtggtcccatcttggattatcactcagtgcctgttttctagtaatttattcctgccattggggtaagcttatggagacatatacaatgatgcccaactctgctattgtttccttttctggtaatttagaaccaatacaaaaagagagaaagaaggaaatatctttcctggaggttatatgagaaaataacccagtgattgttggagaccacagttttatcccctgtaatctgcagacaaagcaagagaaggaaagagagtgagagtggcagagagtgagagggcaggcagaggatgaaagctggctgacatatgcaaaggagagaagacaggaaaaaacatgggtggtgtgtcagtctaattccaatgccttcctgggacatgcataccagcactttggattccatgggacatccatgttgcttcctaagaatcactgttccctaccttatctttgttcttgagctaacgtcaccgagattatattcgttgcaatgaaaagcattgtaaatattcacccaggaaagagggtagagtctaaaattgtggttctgagtattttgttcaattttaactgtgcaaccattcttctagccttttagaaataaatgacactaaattggctatacaaaaaaagccatcagtgtagttggtagactgaggttggttctcaaattattcctaattagaacgaagataaacagatgtgcccacactttgtggcactgctctaggaaatggggaatttaacttttgtttaaatctaatgtactgtttccgcatataaatttcacaggtgtcctgaaatttagaatagcactcccctctctctccagttaaaaaatgtgatatatggtccagttaagaccaatctgttaagcctgggmaacatagtgcaccacatctctacaaaaccaaaaaattagccaggcttggtggcacatacctgtagatcaagctacttagagactgagctaggaggattgcttgagcccaggaggtcaaggctacagcgagcaagccttgattgcaccactgcactcaagcctgggcaacagagtgataacctgtctcaaaaacacaaaaacaaaaaccccaaaagaccaatgtgtctccgttttgagagatgtgggacaaacggtgagtgtgtcaactgagtcacaataagtgagggaatatctgtggactgaatagatgaaaagctagatttgacatcacttaactagctaatataaagggagcctgattttgaaatataaagtgttgaaaagataaaataaaggcagataatgtgtaacctggagagagtggaggctgcatttctgaagaccaaaggtattttataggtctc

SEQ ID NO: 719986 - DNA, 692 bp, Homo sapiens
gtgtttataaatcatgtatttttcccctagggcagtggggacttatctgcttccagggtccctggtggattcatcatagaattgggaagagggtggatggtcattaggaaaacagaagagggtgagaaaaagaaaggaggaaagagcctgaccatgtcgccgtgtcaggcctggtgctacctctcttagagtacctgattttaagcaaggccttcttcccaaacatctttccagagggactcaagccagagggcaggggagtctcaggtgtggtccctaggccctctctaggagcagtatctgaggacagagtatagaaggcccaggcaagaatagctctctttccatcaaacactgggatttctgacatcgtggctctgctccagtcttgcaattaaaaaattgcattttacctgagcctaaagcctgttctctcagccactggagctcccacctgggaagccccagcccccagcctcgcctgctgtgctctgggttctgaactgcagtgtcctgcctgtcttctgtgtccaggagccctgtggtgcccggagaggtggtggccatggacagacattacttccaaaacactggagcrtatgactctcttatgtcgctgcgaggtggtgaaaacctcgaactgtctttcaaggtatgtcctggaccaagggaggacagaggtgggatctctg

SEQ ID NO: 719987 - DNA, 917 bp, Homo sapiens
cagaagatctttttaaatgatggtaaacaatgaggtcacagcccagaacagcccagccctcctggccccagccaagaaaacacattcttaatggttacaggagccctatggtttgctctaagtcaaggagtcatggctggtaggatgaaacagactgggactcacaaattaggagatccacttaagggcagtggcttggaactgaagaattctcacatgagtccccagatcaggaccccaggctctaaactctagcacctaatgcagtacccagcacayagtaggtggtcaataaccccaggggccttcctccctgggctgtaattccacgacccaacacagcacctggaacataattggtagtcaataaatgttggtgaattattgcattcataaatcaataactggatggatagatgtgtggaaggataaatggatgatttgatgaatgttgttaaaccttgactcaaaactatcaagtcaaaaaagtggactcagctccttgcaaggcaattcctttatgggttgaacccttactcttattggcacaaaattctcccactgattgaaccaaaatctaccatattgtaccttgcccttggcagttctagttttctcctatctttctgctctttctagagagaactttctttctttttttttttttttttgagacggagtctcgttctgtcgcccaggcgggagtgctgtggcgcgatctccgctcactgcaagctccgccttccgggttcacgccattctcctgcctcagcctcccgagtagctgggactacaggcgcccgccactgcgcccggctaattttttgtatttttagtagagacggggtttcaccgtggtctcgatctcctgacctcgtgatccgcccgcctcggcctcccaaagtgctgggattaca

SEQ ID NO: 719988 - DNA, 917 bp, Homo sapiens
cagaagatctttttaaatgatggtaaacaatgaggtcacagcccagaacagcccagccctcctggccccagccaagaaaacacattcttaatggttacaggagccctatggtttgctctaagtcaaggagtcatggctggtaggatgaaacagactgggactcacaaattaggagatccacttaagggcagtggcttggaactgaagaattctcacatgagtccccagatcaggaccccaggctctaaactctagcacctaatgcagtacccagcacacagtaggtggtcaataaccccaggggccttcctccctgggctgtaattccacracccaacacagcacctggaacataattggtagtcaataaatgttggtgaattattgcattcataaatcaataactggatggatagatgtgtggaaggataaatggatgatttgatgaatgttgttaaaccttgactcaaaactatcaagtcaaaaaagtggactcagctccttgcaaggcaattcctttatgggttgaacccttactcttattggcacaaaattctcccactgattgaaccaaaatctaccatattgtaccttgcccttggcagttctagttttctcctatctttctgctctttctagagagaactttctttctttttttttttttttttgagacggagtctcgttctgtcgcccaggcgggagtgctgtggcgcgatctccgctcactgcaagctccgccttccgggttcacgccattctcctgcctcagcctcccgagtagctgggactacaggcgcccgccactgcgcccggctaattttttgtatttttagtagagacggggtttcaccgtggtctcgatctcctgacctcgtgatccgcccgcctcggcctcccaaagtgctgggattaca

SEQ ID NO: 719989 - DNA, 917 bp, Homo sapiens
cagaagatctttttaaatgatggtaaacaatgaggtcacagcccagaacagcccagccctcctggccccagccaagaaaacacattcttaatggttacaggagccctatggtttgctctaagtcaaggagtcatggctggtaggatgaaacagactgggactcacaaattaggagatccacttaagggcagtggcttggaactgaagaattctcacatgagtccccagatcaggaccccaggctctaaactctagcacctaatgcagtacccagcacacagtaggtggtcaataaccccaggggccttcctccctgggctgtaattccacgacccaacacagcacctggaacataattggtagtcaataaatgttggtgaattattgcattcataaatcaataactggatggatagatgtgtggaaggataaatggatgattygatgaatgttgttaaaccttgactcaaaactatcaagtcaaaaaagtggactcagctccttgcaaggcaattcctttatgggttgaacccttactcttattggcacaaaattctcccactgattgaaccaaaatctaccatattgtaccttgcccttggcagttctagttttctcctatctttctgctctttctagagagaactttctttctttttttttttttttttgagacggagtctcgttctgtcgcccaggcgggagtgctgtggcgcgatctccgctcactgcaagctccgccttccgggttcacgccattctcctgcctcagcctcccgagtagctgggactacaggcgcccgccactgcgcccggctaattttttgtatttttagtagagacggggtttcaccgtggtctcgatctcctgacctcgtgatccgcccgcctcggcctcccaaagtgctgggattaca

SEQ ID NO: 719990 - DNA, 894 bp, Homo sapiens
gttatgttaaagaattacttcatccccatgtgaccatctcacctcataatcaaacgaccctaaatccctcactaacctacgcccactctcactaaacttaataataaatggtggtatatccagtgcattggcagcatcgcaggaccagaaggcggtgacccccctggacccaactttcactatcttgtgtgtgtcttttatttctcsacctgcctttccacttgggaacaaagaaagagccccgttgcattgcgggctgctggccagatcccgcaataatcactggagcctgggaggtcgaggctgcagtgagccatgaggctgcagtgagttgtgactgcaccactgcactccagcctggatagcagagtgagaccctgtctcagaaaaccaggcataaaattggcactaaaaagttattcaattaattttgatattatatttcacagatcaaatgtcagagaattttagcatgggaaggaacctcatggatgatctagcttgcattcctttacttatactggaggaaaatggattcccctctggtcccacagctgagtctcaatcaagtcaggtctgggatttacataccctgaatccttctcacctctccatgctctccagcaatgctcccattaatgggaactctccaacaatgctctccaacaatgctcccaagacacacacaataatgcccagtcttcagaaggcgcaagtccgtctcaaatgtaaagctgtcttggaattacagtgctgttcttgccacccaagcttcaagtggaactcacctgtttttctcggaaggaacgcttattttttgaccggacattctggctataccgcatcatcataaagttcttctgttttttcttctctttatttgtcgaactggaa

SEQ ID NO: 719991 - DNA, 603 bp, Homo sapiens
tgctatgcctaacacagtatctgtcccttagttaggtattccgtaagagttcatggaatatgtatgtgaataaatgaactagtgtcatcacataaacaactttcagcacttaggttgcactttatgggtttcaaaatacttttgtatgtgctgctctcattttagtctgttaaaaaggtaaactgaggcacaaaaaattatttttaaggtttatttgagcaaacaatgaatcatgaatcacacagctccaaaccaggagcagtttaggggctccattaaggaagtatgaaagagggacaggctcttttattttatttatttatttattttttgagatggagtttcactctttgcccaggctggagtgcagtggcacgatctcagttcactgcaacctcygcctcccgggttcaagtgattcttctgcctcaacctcctgagtagctgggattacaggcaaccgccaccatgcctggccaatttttgtatttttagtagagacagagtttcaccattttggtcaggctggtctcgaactcctgacctcaggtgatccatccacctctgcctcccatagtgcagggattacaggcgtgagccacc

SEQ ID NO: 719992 - DNA, 653 bp, Homo sapiens
tgtagccatttttttattctaatacaggcatttaagactgtacgttctctctacacatggctttacctgtattccacaagttctgatatgtcatttttattatcattcattttaaaatattttctagtttacactgtgatttcctttttgatccatgataatttagaagtgtttaatatacaggtatttttctagctatctttttattaatttctagtttaattctactgtggaatttaaacattttaarttgtttgcaatttgttgagacttgatttatagctctgtaagtgaaccaagtgcacatgaataaaatgcacagtcatttgtaagtataggattctatatgtgagtattgcatcatatttgttagacattgtataaatcttctatatccttattgacgtttgcctttttactttttcagttactgaaagaagtctgttaaaatttcctaatatgcttgaggatttctctttggtagatagatgatagacagacagagagagagagggagagagagagagagataaatagaagcagagacacacacagaaatactgaaagatggtgacacagagacaatactttgcatgcaaatttaatgcatagcatacaaatttagaattttctgatttttgtgtccattcttt

SEQ ID NO: 719993 - DNA, 597 bp, Homo sapiens
gcagagtcccagcctgccctttcttccatctctgggatcagcactctcatctcccggttgcccaagcctctaacacctccttctattccacacttcaaaacctcactgtcagccagtcacggtggctcatgtctgtaatctcagcactttgggagggcaaggtgggtaattcgcttgaacttaggagtttgataccagcctgggcaacatggtgaatccctgtctctacaggcacagaaaaattagtggggcatggtggtgtgtgcytgtagtcccagctacttaggaggctgagatggaagaatcacttgagcccagaaggccgaggctgcagtgaggtaacatcatgccactgcactccagtctggatgatagagtaactctctgcctcaaaaaaataaaaataaactcactgccacttaaaggccaattgattctaaatcctcaaaactaaggccccctgcttctctctcctcaattctaacaccttgttctgaccaccctgataacgatttcagatgaaagaaactgtctccaaaactggttccctgactcaggtcttgcctcccttccctttcttctccagtctgcagccag

SEQ ID NO: 719994 - DNA, 796 bp, Homo sapiens
taaaacaggatatgataaagctgatgtcttgtatggtttgtgttagtaaggctatttatcagttgaatatgctgctgtaaccaacaacctcaaaaccccagtgkccaatgaaggctgtgtttctttagactgtcatgtgatatatcaccagtcaccatggcagagggaagggagcttggcagaaacactaactcttcaaggcttctgcccagaaatgccacacatgctcacattccattggccaaagcaactatagctacacctaactttaaggaagaaagaagtataaatctatcatatagaattgtactattctatcatttttccaagaaggaaggaaatcaaaacactgattaacagctttgatgaacagttcaactttttcttatatgagagaaaaataaactactatctgtttagccacttagagctgaattttctaccacttctaaccaaaattgttcttagccaacaaagtagaattattctaaaattgcatatgtaaaattacatagagaaataggattatagttctactcagcaatattctgaattctttttaattttataatttgtcttccaaatgctccctccttaaggataatggattcattgcaagattcacaaattgacttattttgaccctaggttggaaatcaaaacagaaatcaaaggagcttggactatagctctgtgcctcaacaaaaataccctgcaaatcaactctcctggaaatatcagcaaccaataattaatttaatcactacagttggaaaaggctattactgtgtcattc

SEQ ID NO: 719995 - DNA, 796 bp, Homo sapiens
taaaacaggatatgataaagctgatgtcttgtatggtttgtgttagtaaggctatttatcagttgaatatgctgctgtaaccaacaacctcaaaaccccagtggccaatgaaggctgtgttyctttagactgtcatgtgatatatcaccagtcaccatggcagagggaagggagcttggcagaaacactaactcttcaaggcttctgcccagaaatgccacacatgctcacattccattggccaaagcaactatagctacacctaactttaaggaagaaagaagtataaatctatcatatagaattgtactattctatcatttttccaagaaggaaggaaatcaaaacactgattaacagctttgatgaacagttcaactttttcttatatgagagaaaaataaactactatctgtttagccacttagagctgaattttctaccacttctaaccaaaattgttcttagccaacaaagtagaattattctaaaattgcatatgtaaaattacatagagaaataggattatagttctactcagcaatattctgaattctttttaattttataatttgtcttccaaatgctccctccttaaggataatggattcattgcaagattcacaaattgacttattttgaccctaggttggaaatcaaaacagaaatcaaaggagcttggactatagctctgtgcctcaacaaaaataccctgcaaatcaactctcctggaaatatcagcaaccaataattaatttaatcactacagttggaaaaggctattactgtgtcattc

SEQ ID NO: 719996 - DNA, 2606 bp, Homo sapiens
cagtgagctatgatcccactactgcactccagtctggggaacagagtgagaccttagagtgagaccttgtctcaaaaagagaaaaaaataaagaattgtttcattcttttgtttttcttcagccaagtgaccttgaattagtaacaccacagacagtaagtcttatctcaacaccagtagacaaatcagcagattcaaagtaggcagggaaaaaaaaatagataggcaaaagaactgagactttttcactttagggtttttaaaaatagtaactatttgagttctgaattttctttcatgtaatttggccatcaggtttaaagtgtgcactagaggtcaggtgcagtggctcatgcgtgtaatcccaacactatcggaggctgaggcaggtggatcacttgaggccaggagtttgagaccagcctggccaatgtgacaaaaccccatctctactgaatatacaaaaattaactgggtgtggtagtgtgcacctgtagtcccagctattcaggaggctgaggcaggataattgctcaaacctgggaggcggaggttgcagtgagccgcgattgtaccaccatgctccatcctgggcaacagagcaagactctgtgtcaaaaagaaaaaggaaaaaaaagtatatatatatgtataggctgggcacagtggctcatgcctgtaatcccagcagtttgggaggccaaggcgggtggatcacttgagatcaggagtttgagaccagcctggccaacatggtgaaacttcatctctactaaaaccacaaaaattagccgggtatggtggcacacacctgtaatcgcagctactcaggaggctgagacaggagaattgctcaaacctgggaagtggaggttgcagtgagccaagatcacaccactgcactccagcatgggcaacagaccaagactctgtctcaaaaaaatgtgtgtgtgtgtgtgtgtgtgtgtgtgtgtgtgtgtgtatgtgtgtggctagaatggtccataatatatagccagctcgagtcctagaaaacctagcaagcttaaggttagagcttctcattttggccttttcaagattaaatctcctttagtaggcccttcccctctagggaggtacttgccggagcgctgcctgaagttggttttctgatgccctgttgtttctgttctgaatggtttatttctcattataagagctcagcaaagcaggcagagttaaaaagcagagacatgaaggctttaaaatcatggacttcactcctacactgaatctcaggtccccagaaagacagaaacaccatgggaccacagcaaaggcagaaggaggagtgagagagggaggtggacagaacaacaaacaggagttggctctcattttttcacgygtgccattttctttaggtttttctagtttatggagtctctttgttccagttgagcacacagataaactagagatctcaaggcttttgctgagaacatcaaagcctttaacctctgttgggccaaatatttagaccaaaaatacagacagacacacaaaagccagaaccggaccagattgagtagcttagtggctacagcctttattccctttattctttaggatacgaactcaaaccagattcagggttctaacccaaccaggacccccctggggtgaaactgaaaccccacagtctagacaaggttgggggtctttttttattttttatttttttgagatggagtttcactcttgttgcccaggctggagtgcaattttgcaatattgcctcaccgcaacctccgcctctcaggtttaagcacttatcctgcctcagcctcccaagctgggattacaggcttgtgccaccacgcccagctcattttgcatttttagtagagacagggtttctccatgttggtcaggctggtctcgaactcccaacctcggatgatccgcacacctaagcctcccaaagtgttgacattacaggcatgagccacagtgcccagcctgcttgttcttttcatttcatcctgatctccgaatacaggagagtagctgatttgttgttcactaacaagcacagaagctttgttacatttacagtgtcattcttggcaaaacctgaagttttgcctcctgggttcacgccattctcctgcctcagcctcctgagtagctgggactataggcgcccgccacctcacccagctaattttttgtatttttagtagaggcggggttttgccgtgttagccaggatggtctctatctcctgaccttgtgatccgcccacctcggccttccagagtgctgggattacaggcgtgagccaccgcgcccagccagaagctctaatttcaatgatgattgtgctttttctctcttcctcagcatctggctcatgataaaatttcaggtgtcttgatggtatctaaatcagttgttgattcggtcctggagaaacacaagcataacctctatgccaagttataattttacctatttcccaactttttgttattggatctctccaccaaaccagttgttctgcttctgtctttgcagctggtttctgtagatgctgttcagctgctggtaacatctggcct

SEQ ID NO: 719997 - DNA, 1543 bp, Homo sapiens
aataaattgtgcatctaatgtctaccaattaatgtacttgtagatgtatcttatcttaacttgagtctttgctgccactaatgaggtgtgaaggactcttctcccatggggaagtttttctttttccggagggaggagggcttttccaggtaatgtgtctagagtgttgggcagaagaatctgggaccacacctcaccagttctctccttaatcgacgtcatttgccttctcttccagctatgtttccagtgtcctctgggtgtttccaagagcaacaagaaacgaataaatctctggtgagttgtttatttgttcttcactttgttttacactgtattttctgagtttatgggtgtctgtgaattaaaaaggaaaagtggaaataagtaaaactcaggttgaaggaaatatacataaataagataaagctgacctgtagatatagacaggttataaaagcttagagttgtctaagttgagtgcaaagtttcctctgatctttctgatgccgaaacaaaaaaggcagtcatgtttgttacgtgattggaatggaacccgaaaagagagcaygctgtattcttgtgggacaggaaagcttgtgtgcaccaagtcttaaccaccaccttcattggtgacatagattatgtgctggaacatatttcacaccggtctggcagtaagcacttgtagtgttgtgcagtggaaacagtcatcttccgctaaggcatgacgtgttgtgcagtggaaatggtcatcttccgctaaagcatggcgtgttgtgcagtggaaatggtcatctgacgctaaagcacagcatgttgtacagtggaaatggtcatcgtctgctaaagcacggcgtgttgtgcagtggaaatggtcatctgctgctaaagcacagcttccatcataaggtatgctccttgctcaaagagtgtggtcccaaacagcttttgggaggtcctccttgactcatggatgaaacccggaacatcttgaggactgagttaaccacaggtccttaaataactctccacacatttttcttagtttatctctacatgcagggtgtgcagcagcctgttcaaagtcatattttctgggaaatattttcagtgtttatttgcaatttagcccactctgtgtagtcttaacttatttcttctaaactcaccattaacctaaataatagtcaaatttaggggggctgtatttgtcttactcgagtcttctaccatagttgaaactgtcgtacccaagcgagttagagagaaatgccacactttgagacgaattcaggagtcctttattagctggtgactgagagatggctaacacaggaaatactctcggccctaaagaatgggctagattttcttttatacattggtttagagaggggaggggggattccagctgcaataaacttacagaagaaaaaacagacaaaaaacttaaaaagacagatggttacaggaaaacaaactgttccaggtgcagaggctttaaattcaccacaaagtgatgagtgagggtgctctgggc

SEQ ID NO: 719998 - DNA, 1543 bp, Homo sapiens
aataaattgtgcatctaatgtctaccaattaatgtacttgtagatgtatcttatcttaacttgagtctttgctgccactaatgaggtgtgaaggactcttctcccatggggaagtttttctttttccggagggaggagggcttttccaggtaatgtgtctagagtgttgggcagaagaatctgggaccacacctcaccagttctctccttaatcgacgtcatttgccttctcttccagctatgtttccagtgtcctctgggtgtttccaagagcaacaagaaacgaataaatctctggtgagttgtttatttgttcttcactttgttttacactgtattttctgagtttatgggtgtctgtgaattaaaaaggaaaagtggaaataagtaaaactcaggttgaaggaaatatacataaataagataaagctgacctgtagatatagacaggttataaaagcttagagttgtctaagttgagtgcaaagtttcctctgatctttctgatgccgaaacaaaaaaggcagtcatgtttgttacgtgattggaatggaacccgaaaagagagcacgctgtrttcttgtgggacaggaaagcttgtgtgcaccaagtcttaaccaccaccttcattggtgacatagattatgtgctggaacatatttcacaccggtctggcagtaagcacttgtagtgttgtgcagtggaaacagtcatcttccgctaaggcatgacgtgttgtgcagtggaaatggtcatcttccgctaaagcatggcgtgttgtgcagtggaaatggtcatctgacgctaaagcacagcatgttgtacagtggaaatggtcatcgtctgctaaagcacggcgtgttgtgcagtggaaatggtcatctgctgctaaagcacagcttccatcataaggtatgctccttgctcaaagagtgtggtcccaaacagcttttgggaggtcctccttgactcatggatgaaacccggaacatcttgaggactgagttaaccacaggtccttaaataactctccacacatttttcttagtttatctctacatgcagggtgtgcagcagcctgttcaaagtcatattttctgggaaatattttcagtgtttatttgcaatttagcccactctgtgtagtcttaacttatttcttctaaactcaccattaacctaaataatagtcaaatttaggggggctgtatttgtcttactcgagtcttctaccatagttgaaactgtcgtacccaagcgagttagagagaaatgccacactttgagacgaattcaggagtcctttattagctggtgactgagagatggctaacacaggaaatactctcggccctaaagaatgggctagattttcttttatacattggtttagagaggggaggggggattccagctgcaataaacttacagaagaaaaaacagacaaaaaacttaaaaagacagatggttacaggaaaacaaactgttccaggtgcagaggctttaaattcaccacaaagtgatgagtgagggtgctctgggc

SEQ ID NO: 719999 - DNA, 1543 bp, Homo sapiens
aataaattgtgcatctaatgtctaccaattaatgtacttgtagatgtatcttatcttaacttgagtctttgctgccactaatgaggtgtgaaggactcttctcccatggggaagtttttctttttccggagggaggagggcttttccaggtaatgtgtctagagtgttgggcagaagaatctgggaccacacctcaccagttctctccttaatcgacgtcatttgccttctcttccagctatgtttccagtgtcctctgggtgtttccaagagcaacaagaaacgaataaatctctggtgagttgtttatttgttcttcactttgttttacactgtattttctgagtttatgggtgtctgtgaattaaaaaggaaaagtggaaataagtaaaactcaggttgaaggaaatatacataaataagataaagctgacctgtagatatagacaggttataaaagcttagagttgtctaagttgagtgcaaagtttcctctgatctttctgatgccgaaacaaaaaaggcagtcatgtttgttacgtgattggaatggaacccgaaaagagagcacgctgtattcttgtgggacaggaaagcttgtgtgcaccaagtcttaaccaccaccttcattggtgacatagattatgtgctggaacatatttcacaccggtctggcagtaagcacttgtagtgttgtgcagtggaaacagtcatcttccgctaaggcatgrcgtgttgtgcagtggaaatggtcatcttccgctaaagcatggcgtgttgtgcagtggaaatggtcatctgacgctaaagcacagcatgttgtacagtggaaatggtcatcgtctgctaaagcacggcgtgttgtgcagtggaaatggtcatctgctgctaaagcacagcttccatcataaggtatgctccttgctcaaagagtgtggtcccaaacagcttttgggaggtcctccttgactcatggatgaaacccggaacatcttgaggactgagttaaccacaggtccttaaataactctccacacatttttcttagtttatctctacatgcagggtgtgcagcagcctgttcaaagtcatattttctgggaaatattttcagtgtttatttgcaatttagcccactctgtgtagtcttaacttatttcttctaaactcaccattaacctaaataatagtcaaatttaggggggctgtatttgtcttactcgagtcttctaccatagttgaaactgtcgtacccaagcgagttagagagaaatgccacactttgagacgaattcaggagtcctttattagctggtgactgagagatggctaacacaggaaatactctcggccctaaagaatgggctagattttcttttatacattggtttagagaggggaggggggattccagctgcaataaacttacagaagaaaaaacagacaaaaaacttaaaaagacagatggttacaggaaaacaaactgttccaggtgcagaggctttaaattcaccacaaagtgatgagtgagggtgctctgggc

SEQ ID NO: 720000 - DNA, 1543 bp, Homo sapiens
aataaattgtgcatctaatgtctaccaattaatgtacttgtagatgtatcttatcttaacttgagtctttgctgccactaatgaggtgtgaaggactcttctcccatggggaagtttttctttttccggagggaggagggcttttccaggtaatgtgtctagagtgttgggcagaagaatctgggaccacacctcaccagttctctccttaatcgacgtcatttgccttctcttccagctatgtttccagtgtcctctgggtgtttccaagagcaacaagaaacgaataaatctctggtgagttgtttatttgttcttcactttgttttacactgtattttctgagtttatgggtgtctgtgaattaaaaaggaaaagtggaaataagtaaaactcaggttgaaggaaatatacataaataagataaagctgacctgtagatatagacaggttataaaagcttagagttgtctaagttgagtgcaaagtttcctctgatctttctgatgccgaaacaaaaaaggcagtcatgtttgttacgtgattggaatggaacccgaaaagagagcacgctgtattcttgtgggacaggaaagcttgtgtgcaccaagtcttaaccaccaccttcattggtgacatagattatgtgctggaacatatttcacaccggtctggcagtaagcacttgtagtgttgtgcagtggaaacagtcatcttccgctaaggcatgacgtgttgtgcagtggaaatggtcatcttccgctaaagcatggcgtgttgtgcagtggaaatggtcatctgamgctaaagcacagcatgttgtacagtggaaatggtcatcgtctgctaaagcacggcgtgttgtgcagtggaaatggtcatctgctgctaaagcacagcttccatcataaggtatgctccttgctcaaagagtgtggtcccaaacagcttttgggaggtcctccttgactcatggatgaaacccggaacatcttgaggactgagttaaccacaggtccttaaataactctccacacatttttcttagtttatctctacatgcagggtgtgcagcagcctgttcaaagtcatattttctgggaaatattttcagtgtttatttgcaatttagcccactctgtgtagtcttaacttatttcttctaaactcaccattaacctaaataatagtcaaatttaggggggctgtatttgtcttactcgagtcttctaccatagttgaaactgtcgtacccaagcgagttagagagaaatgccacactttgagacgaattcaggagtcctttattagctggtgactgagagatggctaacacaggaaatactctcggccctaaagaatgggctagattttcttttatacattggtttagagaggggaggggggattccagctgcaataaacttacagaagaaaaaacagacaaaaaacttaaaaagacagatggttacaggaaaacaaactgttccaggtgcagaggctttaaattcaccacaaagtgatgagtgagggtgctctgggc

SEQ ID NO: 720001 - DNA, 600 bp, Homo sapiens
taaatgtaaaatgttccaaatcatcttatccaactctagatgttaacttaaatgtaaatgcacatattgaatgcaatagtggaatagcaaacagaattcataacagaacaagtaatatgattggggatgytgttttgctgtattttttaatgccaagaaatagcaaattggtctttaagaacatataccgtagggtacttggggtgctagaaaagatagagctgcactatcgctaacctcgatttcttttaaatttcaatattgtaacacaggagggtaaggtaagaactttacctaggcaactactaaaacagaatctaacacaccagatcaaaatagttaatatatctatgtgcttcagagcatactttcaagtctatctacctacttgctaaaatgtccctactgagagaagttaactttcttgatttggagacaaacactgattaataccacggagtgagtcctgttatgccttaggagattcagtgttctacaaaacaacaattgtcatgttttgtctcagtcagacatttgacaagtttgtagactcgctgaagatttaatttttattaggattatttagagatctaagtttta

SEQ ID NO: 720002 - DNA, 1213 bp, Homo sapiens
gtaacacctaaaataaaaagaagaaaaattttacaacaaaattgtagtgcccaacttaaacactacgaagttcacaaaataccttttcttgacaaaaaaattaagaaaagtataaaatataatgcaactcccaggaaaattaaatctaatttaagaagcatttgtagaagtaaaatgaccagaaaaatagtaacgttttgctattttgttttgcccttttcatgttacacctatttttctctaagaagatcttcagtgtaatgtgaaaacacagaatatttaattttgctaaggagactgtaatccagcaaaattgtataagagagaaaccagtacattattctttatagacaactataccttgtatccaagccatccccaaatcctgagcattgcattttttcctctatcctatgcctcacattcttttctatctccacttagagcttcaacctctaatcctccatcatcttttgcctggattgagcaaaagcctctttcttatttgatttgtccgcattcaatcatccactccacttccaatccagtctccagagtgtaacctcaattaccttcaacatttcaagcacatggtatcccccagcccctcgacacaaatcactcagcactttccaattctccartgaaaacaaaaacgaaaacaaaaaaatctgtacgtgtccaatacaaacccattacattttgaactcttcttcatttcctgccatttcttaccctgctcttgatttttggatcacctaggttttattttaggcacttgagcattcattgcttcttcctgcctccactggaactccgttgctcatctgtggccagaaactgggtaaaagatatactttcccagttattatattttgaatgtttatctgtccataaatgcttgacttgtgttggaagtaaatgctagctgccgccatgtgaaaatagcactcacacaaaagttttcgcagcaaggcaatttatttctatagaagggtacgtcttgcttgcagacggggcaatggtgagagcacacccgactacggaggggaagggggtcttattcctaacgcggctagcccctactgctgtgtctttcccccattggctagggttggatcccacagtctaagctaattctgattggctattttaaaaagagtgagggtatgagctggagtggcggagttagttttggtgggaggaaggttac

SEQ ID NO: 720003 - DNA, 633 bp, Homo sapiens
tcagtgcttcaaggtgaggtctttagtgacatttatacagtttccctttgatgacttgattctgtgtcagctaatctggaactatgtttcacagaattttctctcttatttgcttctgggatgagattgacctcgagaaattcagggagacttgtaggtgaaagtgaagcagcttccacagtaatggatactatatcaatgttggtttaggcactgtttaaacttgcattgtgatggatccttctttctactttgtgggcatgaagcagagcacagtctatacctcctccatcttcttcagtatctccttctttagcttttctgactcccaagacagatgcacgtttaggtgaccacctttgatttcaggttggtcatatcacagaaggtgaggttagacatcatgagatgctcaaatgtgtttcagctcattctcataggttacagtttgtcctcatggattttaatttgtccttgctttcttccactccgcatttacctttccttcttcactgyctgcctttctgacttcaggctagcacctgacagagaaacaatagttggacataaacttgttaaccaattcccacactgtgtaaggccaaaatcctataatagggatattaaattcca

SEQ ID NO: 720004 - DNA, 585 bp, Homo sapiens
catagagttaacctatacactggtactaaatattatagattacggtaataaatattagatatagacattttcttttcagttggagaaataacccagaggaaagtatatttttctgcctagtattctctgcatgaggctttggcagaaccctaaacaatgtatgacattcaatactcctaacactaatttggtcaaagtaaataacattcaagaagttgtcaggttgtcctgrataccagagacatttctacttgcaatggtaggaagagaaataaatgcatttgatgtagcagctgaatcaggatgctagatcaggagaaatatatcttcattatggatggtacatagtttctgctatcaactaaataaaaaatgctcttaaaatgttgaacatggagaaatttgcttcctaaaatcaagataggtttgcttttataaactagtgataataatgcaagaaaagaagtctaatcaaccacatgtttaaagtatttcctccattatggcacatttaaagaaagcaatttttgtgattggatgatatattgcaaaacatattaaggataggaaaacaatgcacacttt

SEQ ID NO: 720005 - DNA, 527 bp, Homo sapiens
taacaaacaacactactgtttttcttttttctttatattaattttttgtagagacaaggtcttgctatgttgcccaggctggtctcaaactcttggtctcaactgatccttcctcctcagcctctcaacgtgctgagattacaagtgtgagtcaccacacttggccactaaaggacattgtttaaaagatatttatttgttttgaaaagatttatttgagaaatatataaaaacgtgacagaacacttcataggccactttrcacagcaaaatacacaataacatatttttgcaagcataaaacaggtatggtaaagagtcatgcaggtataacaattacaagcagacaaactatatttataaagaaataggtcaaaaatggaaatgtaacaaactatagaaatgatccctgaaagtatagtagtagggtggggggagggagagggatagcattaggagatatacctaatgtgaatgacgagtaaatgggtgcagcacaccaacatggcacatgtatacatatgtaa

SEQ ID NO: 720006 - DNA, 831 bp, Homo sapiens
tataagcaactcagaataaaaattctagtttctgttgtagcctaattaatacataagatatttcaaacacctatctcagttactgatgtatcaaatagaaaaatgtataaagatatttcacacgttctaatggacatagaaccctgcagttaaaaattatggaatatacaagtttttaaatcacatggaattgtaatgttcattaactacagtctaagcaaaaagtagtcagagcaaacttcaaaaaatgattataatgcattctgtgtttcagacttcagggcaattaagttagaagtcagcagcatagataacataggaatatacactagaaaagttacacatgctaaatatataatgaatcaagaatggaatcaaaacacattttaggaattayttacccccaaatgatcttgaaaatataccgtatcaacacttgtatattgaagcaaaagccatgctcacatggaaatttagaaccttaaattcattcattcaaaaagaagaaaaactgaaaaccagctaagtgtccaacaaaagtgtctaatagaaattagaagtttccataaactaaacacaaaccaagaagcagaaaagaaataaaatgtgaatatataaaattaataaattataagctatgaggcaatggagaggataaaaaatatatcaaatctgcatctttagtatccaatagaatgaacagaacaaaactaacattttttaaaagtaggagccaaaatacttattattttcaagtggcatatttcttttcattaaaaactcaagtgattcaactaaaaaattatttttaatgtgagtttaataaagtgg

SEQ ID NO: 720007 - DNA, 652 bp, Homo sapiens
cctcagccttctaatattccttttcaaaaattgtgcaaagtgtgtgagactgtgtggatgttactgtattaaattacaccattataccttagaaggaaggttttctgttattcaagcaaggaatcatctttgctcaaccgtgatggattcacaactagctaatctagaattctaagattaaacataagccagtcaaaacctttagtgatgaaaaaattaygaagagttttactgatgtaatatcctgagcccagaataatatgaaattttggaaagaaaagaaagaccttgtagctatttatgtagtttcttgcaataaaataattgcagtaatataaagttaagcacatagaagccactgaaatttaaaacaaagacgattttctaatttgtggctaaaattttaaaatttagctcttgttccatgaattaaattaattttaattatactcctggataaagtaggtctataaagaagctgtcaaactattgtcaatagtttaggtacatgcagtagatcagaagataatcagcttaggacttcttataaaatattttaatttttattgtctttatgctcacatgtactgctatactctcttccaaagcttttcccttttataaaattgagaaatttatttagctgtaatgt

SEQ ID NO: 720008 - DNA, 1371 bp, Homo sapiens
ctcccgttctatttttactttcctttttgaaagacaaattttagctttatttttttttcctgtttataaaaatataacccaaatatcagccttttcctttcctgtctcaagatcctcatcctctggaatacttggggaagatggtgtttgtctcacttgtcttacatctgtttctgagtcgtcccgcttgcagcctgagtcacgcgcaactcttggttctgggttaaaaggaatagttatgtgaaaagagagaaggggtgagtgttatctactcctcacgatcttactcccaggttataatgaaagtggatctcagaattaattctaccacgtaggcagatattcaataaagaagcaaccgttagcaaaacaatatatttaacctgttccataaattcattgaagtcctgtaagttttcctcttgggggctgtaaccataacttcattgaaaggttcacttggggcaaatcctatagctcaaacaagattcgcttacccttatagctggcaataggcaaccggaagtctttaaactgatggctgaatgcaggactcttcagggatcaaccctgaaaatgcaggcctcgggcctctctaaacactttcttttctttttttttaatgatgttcatgcaagaggagaaagcgtctctgaaacattttagtcaatttacagatcttgaattccacaaatttcaccaatgattgcccatttctaatatccattatgttcattaacaaccattaatttctcctatgaaaacccatttctgaaattcagtatgctaattagcaaaacctttcttgttgattagagatgtggattacagaagggcttttagtaatcgcctctggagtgtggcctttttgataaaatgctagctgactgccctagggtgtggagttctgattagaacaattgtctcctcctagggtgtagcctaaacgataaagaaaaaggcacaacaaccatgtaatctatatcacactatatttgctaaagtatttagtaaatcacagataccacagcacatgtgaatacaaatctttatattgtaggttgaaatggccatataatattaattgtgtatgtactgtaataactaactcccatttgttggaacttcaggttgtttcgagcttttcactataataattaatgacttgaggatccttatttttactcacctgtttagttcctttcttaaaatgaattcctagaaaggaattgctgggtcaaagttatgcatgttttaattgtgatacacrttgctaactgctttccagaaaggttattcttcagatggaaagcatatgagaatgtgcattttcttgtacagctatcaatatttgttattgtcaatattctt

SEQ ID NO: 720009 - DNA, 658 bp, Homo sapiens
gtacggaaggcctttctgagcttaaaacaaaattcacaaagcatgaaggaaaaagttgatagttttgactttttacaaattaaaaagtcctccataggaaaataatgcttaccacaaacaagactgacagataggaactccacttgtaatgcatacttcagaaataaaggttaatagccctaatacacaaagagtgcttaccaatcaataaaaaagatgaacaatataatagaaaaatgaataaaggagaagaactggtcattcagaaaacaagaactccatagaggtatctgaaaaatgtttamcatgacttcactttttcttaaatgtgctttctttaaaccagagagacttttcatttcctcttgctttcaatttcatcttccctaaatttaatttccaaggaactttcttattttctgtaataactacagtggatttccagctgtttttcccttagcaaatggagccccatatcctgtctccctgggttttacaattgcttctccctccttctccctctttaccctccaaaatactctatcatcatgggcaaaactccccagagctatactgctgggtatgatcctttccttcactcctcagaaaaaattgtgctgggaggaccaacgccatgcttatatatttagtagcagtt

SEQ ID NO: 720010 - DNA, 645 bp, Homo sapiens
  misc_feature 432, 433, 434, 435, 436, 437, 438, 439, 440, 441, 442, 443,444, 445, 446, 447, 448, 449, 450, 451, 452, 453, 454, 455,456, 457, 458, 459, 460, 461, 462, 463, 464, 465, 466, 467,468, 469, 470, 471, 472, 473, 474, 475, 476, 477, 478: n = A,T,C or G
  misc_feature 479, 480, 481, 482, 483, 484, 485, 486, 487, 488, 489, 490,491, 492, 493, 494, 495, 496, 497, 498, 499, 500, 501, 502,503, 504, 505, 506, 507, 508, 509, 510, 511, 512, 513, 514,515, 516, 517, 518, 519, 520, 521, 522, 523, 524, 525: n = A,T,C or G
  misc_feature 526, 527, 528, 529, 530, 531: n = A,T,C or G
taaagattgggattcagaacattaagagaggccaggcttatgtttctcttcccactacgaaccatgcacagaaacttaaaaaataaaaacaaaaacaaacaaaaaacatatgtgatcaagaatttagtcaaatttgattggagtctttcttggtaggcccaataaatggtttgttgtttctaatttgctggatgcatataataaaatactgtgcaacagttagatgcaataatatagatgtagaagttatgacattataaatctttaatatatatattgttaagaaaaatragaaaatagaaaaaatgagaaacaatgaaactacattcatgtaaatttaaaaatacactgctaaaactatattcacaatttctgtcaccatgccatgttcaaattatacatccataatttaaaacattcctcttaaagagnnnnnnnnnnnnnnnnnnnnnnnnnnnnnnnnnnnnnnnnnnnnnnnnnnnnnnnnnnnnnnnnnnnnnnnnnnnnnnnnnnnnnnnnnnnnnnnnnnnnacagagtctaatggtgtctaaaatttaatttcactcaactactctgtttttagttttgatcaaactggaaaccaaagaaattaaatgattttcctataatcatactgatattta

SEQ ID NO: 720011 - DNA, 645 bp, Homo sapiens
  misc_feature 432, 433, 434, 435, 436, 437, 438, 439, 440, 441, 442, 443,444, 445, 446, 447, 448, 449, 450, 451, 452, 453, 454, 455,456, 457, 458, 459, 460, 461, 462, 463, 464, 465, 466, 467,468, 469, 470, 471, 472, 473, 474, 475, 476, 477, 478: n = A,T,C or G
  misc_feature 479, 480, 481, 482, 483, 484, 485, 486, 487, 488, 489, 490,491, 492, 493, 494, 495, 496, 497, 498, 499, 500, 501, 502,503, 504, 505, 506, 507, 508, 509, 510, 511, 512, 513, 514,515, 516, 517, 518, 519, 520, 521, 522, 523, 524, 525: n = A,T,C or G
  misc_feature 526, 527, 528, 529, 530, 531: n = A,T,C or G
taaagattgggattcagaacattaagagaggccaggcttatgtttctcttcccactacgaaccatgcacagaaacttaaaaaataaaaacaaaaacaaacaaaaaacatatgtgatcaagaatttagtcaaatttgattggagtctttcttggtaggcccaataaatggtttgttgtttctaatttgctggatgcatataataaaatactgtgcaacagttagatgcaataatatagatgtagaagttatgacattataaatctttaatatatatattgttaagaaaaatgagaaaatagaaaaaatgagaaacaatgaaactacattcatgtaaatttaaaaatacactgctaaaactatattcacaatttytgtcaccatgccatgttcaaattatacatccataatttaaaacattcctcttaaagagnnnnnnnnnnnnnnnnnnnnnnnnnnnnnnnnnnnnnnnnnnnnnnnnnnnnnnnnnnnnnnnnnnnnnnnnnnnnnnnnnnnnnnnnnnnnnnnnnnnnacagagtctaatggtgtctaaaatttaatttcactcaactactctgtttttagttttgatcaaactggaaaccaaagaaattaaatgattttcctataatcatactgatattta

SEQ ID NO: 720012 - DNA, 816 bp, Homo sapiens
ttaaaaatgattcattttcaatgtcatcttataacccttaatgtaaattcacatctgtttcaatgcttccaagtgcaatgttcacttggaaaaacgtctaaagccagaaaacattgtgtactatagaacaataattctcaacatgaccacaaggtggctctcaacaccgaaatatgttattttccctctggacaagtgaatagaattttaccagaaatattagcagcaatttaccctataaatgggtcaatacttcaaaaacgtaaattcatmtcaaccctctgatcacgttgtgaagcctaatttatattgttttaaacttcagacattcaaaaaaacacatgaaatggttgaaaacctttaaagaatttgaaggattttgaaaagaaatgattatttcagtagtctgcataattaattattcaataaccatttcttgggctttaaaaattaatttctcctctaattttgcacaatgttattctcactttacttccaactaaatgaaagcaaaatagatgcaagttaaactttttctctagtatgattaaagaatgtgaaacttaaagagaaagtatgtcaaagtttttagcctttgtaaagtccaattctaaaagtatatatacatttagatgatcaattatactaaatgtaaaatgtgtgtaatattaatagaatattttaaattagccatcctgatgaataagccatgaggttaaattattttgccaaatattatagtgaagttgtgaaaaaaaacaatcctataaaatggccacagcatttaatcaagatgataagaaaaagataactgtg

SEQ ID NO: 720013 - DNA, 613 bp, Homo sapiens
aataggtagtatatacacmcaagtttcaatagtaaaatataaataaaataaaaaacatctgtaattttagtctctggagataatgattagcattttgctatgtttctttccagtcaaatttgcatgaagtttcaaaggcccatgatgtggacctgccagaccctttccaaccatcagggggagtaccttttcatctgcccttgccaccacagcattttatcatttgctttcaaaaaggagggagctttgctaattttgtcgaaggaaataaatgtatgcttatttaaattgatattcctttgattcttttcatgaagttggtcatttatcatatttttaaatatgtcagcaacttggctttttgtagtaaactatgttctagttttgcagagtatttttgatgatatcagtttgtataagcccttttatattatgaatattaactatttgactttcatagaaaatttatttcccagttttaaaacaattttaaatttcattcatatttttgatgtacagaaattaaaaatggatttgtagtcaattctcttgctttgtccccttgtgatatttctgtcaattacttttatggttggaatctgctaatgaaaag

SEQ ID NO: 720014 - DNA, 613 bp, Homo sapiens
aataggtagtatatacacccaagtttcaatagtaaaatataaataaaataaaaaacatctgtaattttagtctctggagataatgattagcattttgctatgtttctttccagtcaaatttgcatgaagtttcaaaggcccatgatgtggacctgccagaccctttccaaccatcagggggagtaccttttcatctgcccttgccaccacagcattttatcatttgctttcaaaaaggagggagctttgctaattttgtcgaaggaaataaatgtatgcttatttaaattgatattcctttgattcttttcatgaagttggtcatttatcatatttttaaatatgtcagcaacttggctttttgtagtaaactatgttctagttttgcagagtatttttgatgatatcagtttgtataagcccttttatattatgaatattaaytatttgactttcatagaaaatttatttcccagttttaaaacaattttaaatttcattcatatttttgatgtacagaaattaaaaatggatttgtagtcaattctcttgctttgtccccttgtgatatttctgtcaattacttttatggttggaatctgctaatgaaaag

SEQ ID NO: 720015 - DNA, 595 bp, Homo sapiens
ccactaaaatattcctacttcaaaaggcaataaagtaagtggtattatcattcttcaaaaagttataatggtagtgtaggcattcatagtatgatttagttcatttgctactgtttctattctatcaccatattaacactttcctacacaattctatattcagctgggtttcagttgagcacaaagtcatccttgtactaccaccgatagctggcaccagctgtttgatactgttatcattctgctgtagaaagtacccgtgaactggaaaaagtccacactcgaatagctagtcattcaacactatcaaattttaggtgactytttgaaaaaatagtatctcttgttgcaagaaatgctccatctgtgatttcaagtctctcacttgagtgaattggatggaagtggtgaatttcagccaaagtggccaaagaaatcctgttcctgtgataatgacgccatcagcctctgcacctctgtcttcccttttgccacatgttgtctgttctccgtgactttggtaagagcttccttgtgtatgtggatgatgtccaggatgtttgtcttgtgtccctgagacagcactaacaggtcc

SEQ ID NO: 720016 - DNA, 595 bp, Homo sapiens
ccactaaaatattcctacttcaaaaggcaataaagtaagtggtattatcattcttcaaaaagttataatggtagtgtaggcattcatagtatgatttagttcatttgctactgtttctattctatcaccatattaacactttcctacacaattctatattcagctgggtttcagttgagcacaaagtcatccttgtactaccaccgatagctggcaccagctgtttgatactgttatcattctgctgtagaaagtacccgtgaactggaaaaagtccacactcgaatagctagtcattcaacactatcaaattttaggtgactttttgaaaaaatagtatctcttgttgcaagaaatgctccatctgtgatttcaagtctctcacttgagtgaattggatggaagtggtraatttcagccaaagtggccaaagaaatcctgttcctgtgataatgacgccatcagcctctgcacctctgtcttcccttttgccacatgttgtctgttctccgtgactttggtaagagcttccttgtgtatgtggatgatgtccaggatgtttgtcttgtgtccctgagacagcactaacaggtcc

SEQ ID NO: 720017 - DNA, 621 bp, Homo sapiens
caactactaatctactttctgtctctctaggaagcaaagagcaagctgagctggagatacatttactttgggtttagtgggatatttttgtgtggttcatggtcatttctatgtattgttaagatattgctagccatgcccacgtaggaatggcttccaggaatactcctgttatccattgggcctcccactttgatagaattttaatggtaaatagagaaggatattcctttccctattctgtctccaggtcctggacctccattgctaatagagtattaaagaactctgtacccaaatgagagtacacattatttcaaacacatatggatgattcacaatgtaatgcccacatggtggrcctcaaagggaatctcaaaaatgaccttaaacttgctaacatataagctatgttcatgaaattaaatataagaaattggagttttctgcctgagcaaggagactggtggtctggttcttgggcttccctagcagcctggcccccaaatgccagtcttccctcctgtctcgaaagaagacaccaagaccacctcctgttctgagaccagaggagacttcggcctctgtaggcttgccaaagaagggcgaaaaagaacagca

SEQ ID NO: 720018 - DNA, 621 bp, Homo sapiens
caactactaatctactttctgtctctctaggaagcaaagagcaagctgagctggagatacatttactttgggtttagtgggatatttttgtgtggttcatggtcatttctatgtattgttaagatattgctagccatgcccacgtaggaatggcttccaggaatactcctgttatccattgggcctcccactttgatagaattttaatggtaaatagagaaggatattcctttccctattctgtctccaggtcctggacctccattgctaatagagtattaaagaactctgtacccaaatgagagtacacattatttcaaacacatatggatgattcacaatgtaatgcccacatggtgggcctcaaagggaatctcaaaaatgaccttaaacttgctaacatataagctatgttcatgaaattaaatataagaaattggagttttctgcctgagcaaggagactggtggtctggttcttgggcttccctagcagcmtggcccccaaatgccagtcttccctcctgtctcgaaagaagacaccaagaccacctcctgttctgagaccagaggagacttcggcctctgtaggcttgccaaagaagggcgaaaaagaacagca

SEQ ID NO: 720019 - DNA, 605 bp, Homo sapiens
ggtgtgcaccaccacagccaaatttttatatgttttgtagagacaagttcttgccatgttgtccaggctggtctcaaactcctgggctcaatcaatccactaacctcagcctcccaaagtgctaggattacaagtgtgagccactgtgcctggccccaagttcatttctaatacatggaaaggcccaaaataaaatcagcagtggctttagtcttataaccagatgtatcattctagtgagctattctgtcacgaggactcgggcatccaataaaggatctttctttttttttttttttttttttgagacagagtcccgctctgtcaccaggccagagtgcagtggcacsatcttggctcactgcaacctccacctcccgggttgaagcgattctcctgcctcagcctcccgagtagctgggactacaggcatgcaccaccacacccagctaatttttttttatattcttagtagagacggggtttcaccatgttggccaggatggtttcgatcccctgactttctgatccgcctgccctagcctcccaaagtgctgggattacaggcgtgagacaccgccccggcctaaaggatccttctgtca

SEQ ID NO: 720020 - DNA, 601 bp, Homo sapiens
atattttttcccattctgcaggttgcatttcactcatcagttgttccctttgctatgcagacattttaaaatttgatgtagtatcatttgcttttgcttcttgtgtttttggtgccacatctaagaaatcaactgcccattccaatttcattaatattttcccctgtgttttcttttaggacttttatagtttcaagttttacatttagktcttgatccattttgagtttattttagtaacattaatcataaagcattttattcttctcactttcaatcattttttctcttttatgttttctgttcattttactataatagtttttttttcatttcctggtttatttggtttttgatgtttcaggtgctcttctctggtttcccagtggttttgtggttgagtcatccgtatgcttcttacatttctaacatttttactaagtacattaatgtttgcctaattttaactttaaaaaatattaatgaaataaattctgagaatatataaaagtcttatcaatagtacctactttcacttctcaatataaatattttttaaatgatgtatgttttctatgcgactatgaaataatgagtgttg

SEQ ID NO: 720021 - DNA, 601 bp, Homo sapiens
atattttttcccattctgcaggttgcatttcactcatcagttgttccctttgctatgcagacattttaaaatttgatgtagtatcatttgcttttgcttcttgtgtttttggtgccacatctaagaaatcaactgcccattccaatttcattaatattttcccctgtgttttcttttaggacttttatagtttcaagttttacatttagttcttgatccattttgagtttattttagtaacattaatcataaagcattttattcttctcactttcaatcattttttctcttttatgttttctgttcattttactataatagtttytttttcatttcctggtttatttggtttttgatgtttcaggtgctcttctctggtttcccagtggttttgtggttgagtcatccgtatgcttcttacatttctaacatttttactaagtacattaatgtttgcctaattttaactttaaaaaatattaatgaaataaattctgagaatatataaaagtcttatcaatagtacctactttcacttctcaatataaatattttttaaatgatgtatgttttctatgcgactatgaaataatgagtgttg

SEQ ID NO: 720022 - DNA, 601 bp, Homo sapiens
atattttttcccattctgcaggttgcatttcactcatcagttgttccctttgctatgcagacattttaaaatttgatgtagtatcatttgcttttgcttcttgtgtttttggtgccacatctaagaaatcaactgcccattccaatttcattaatattttcccctgtgttttcttttaggacttttatagtttcaagttttacatttagttcttgatccattttgagtttattttagtaacattaatcataaagcattttattcttctcactttcaatcattttttctcttttatgttttctgttcattttactataatagtttttttttcatttcctggtttatttggtttttgatgtttcaggtgctcttctctggtttcccagtggttttgtggttgagtcatccgtatgcttcttacatttctaacatttttactaagtacattaatgtttgcctaattttaactttaaaaaayattaatgaaataaattctgagaatatataaaagtcttatcaatagtacctactttcacttctcaatataaatattttttaaatgatgtatgttttctatgcgactatgaaataatgagtgttg

SEQ ID NO: 720023 - DNA, 1240 bp, Homo sapiens
taaaatgtatttataaaatgaaaggttagatggagaataaggtgtcttcctaacagctgctctgaaaaagagtgatttgggacaagtcaaattattatatataaacattctatgttataattaactagtcattttttgtattgtagcagttccattacttagacacacaaaaaaaggcaacgtatttttgtagtgctttgaatacagctgtgtgagccatcatcttttgggaaactttttaagatgctgaatgtatttgcttagctatgaaaatgattacacttctaagacaaagaagatcaaagaacagcaaacatgggtactgttgcggatttctaaacaaaagagcagatctcaaataagcattaaaaaatcagcatgtttcatattaaaaagtgaaaaatatactatytctataaacccatcaaataacaataactaagaggggaaaacaaacagtattaactggatatttattattgtgatgctatccgtaactacctgggatattatttttaatgactatatgtacatgttttaggtttatattaatatgtgtatcttatgtttacatgcatgattatatgtttgatataagtatgtgtatatatacacacacatacagaagacaatgtataattcaatgagttttgaatatattacctggcaacagtgggtgtctgttttgagatgtgacagaatttctcaaatttaggacctgggaaacttcagaagtcataattagagctaaaaatttttgcaagtcttagtgattctcattattacaatagctaaaggctgggattacagaggtcgctggttttgagaagctaagtcagagaactttagtgcaggatccagatgacatagttaggcaataacaatgatgaaattagaattcaggcttcctgacttcagaggtagtattccctatattatattattaaggtattagaccactttgggagcccgtgttttagatgtgtatacagagcattcacaggattggtcataatttgggtctactgaaaaataccgaatgaagcaggcactaattccactgctcagatttgatactgcagacattcgtttcaacactagaaggtgttttgcggtgaatgtcaagccttttgttttataagcaggatctcaaaacaatcttaagtagcatgtttacttcatgaacgcaggtcttaggaccttcatctagtagcacatctaggagggcactgccatttca

SEQ ID NO: 720024 - DNA, 595 bp, Homo sapiens
ttggaagattataattttgaaatataaacaaagtaattaatagatgttaaatgaggtgagctagtgatagttaaaggaygcaggcaaattcctaggcagacaaggatgggttcctggtgaaatgcaaccttcaagccaaggacaactaagcttccagctccagataaaatccgtggaccagagtgagaactcctattcccatttgccttgctttctcccgattggtcttttactttcacctattttacgtatacctaccctcctctgactagctctatacactatcttgcctctttctgaatggtgctttttccaaacccacccacaaaccaatcagcacgcacttccccattccaagctcataaaaacccccgaactcagtcatgtgactggcaacccacttttgggtcccctctcactgccaaaagcttttttgtaactcaataaattctactctgccttactcactctccagtgcccatgtaccacattcttctcgggtgtggaacaagaactcagaacttaccgaacgacgggagtgaaaaagctgcaacactaactagatcctgctgacatcctccctacagatacttga

SEQ ID NO: 720025 - DNA, 595 bp, Homo sapiens
ttggaagattataattttgaaatataaacaaagtaattaatagatgttaaatgaggtgagctagtgatagttaaaggackcaggcaaattcctaggcagacaaggatgggttcctggtgaaatgcaaccttcaagccaaggacaactaagcttccagctccagataaaatccgtggaccagagtgagaactcctattcccatttgccttgctttctcccgattggtcttttactttcacctattttacgtatacctaccctcctctgactagctctatacactatcttgcctctttctgaatggtgctttttccaaacccacccacaaaccaatcagcacgcacttccccattccaagctcataaaaacccccgaactcagtcatgtgactggcaacccacttttgggtcccctctcactgccaaaagcttttttgtaactcaataaattctactctgccttactcactctccagtgcccatgtaccacattcttctcgggtgtggaacaagaactcagaacttaccgaacgacgggagtgaaaaagctgcaacactaactagatcctgctgacatcctccctacagatacttga

SEQ ID NO: 720026 - DNA, 595 bp, Homo sapiens
ttggaagattataattttgaaatataaacaaagtaattaatagatgttaaatgaggtgagctagtgatagttaaaggacgcaggcaaattcctaggcagacaaggatgggttcctggtgaaatgcaaccttcaagccaaggacaactaagcttccagctccagataaaatccgtggaccagagtgagaactcctattcccatttgccttgctttctcccgattggtcttttactttcacctattttacrtatacctaccctcctctgactagctctatacactatcttgcctctttctgaatggtgctttttccaaacccacccacaaaccaatcagcacgcacttccccattccaagctcataaaaacccccgaactcagtcatgtgactggcaacccacttttgggtcccctctcactgccaaaagcttttttgtaactcaataaattctactctgccttactcactctccagtgcccatgtaccacattcttctcgggtgtggaacaagaactcagaacttaccgaacgacgggagtgaaaaagctgcaacactaactagatcctgctgacatcctccctacagatacttga

SEQ ID NO: 720027 - DNA, 595 bp, Homo sapiens
ttggaagattataattttgaaatataaacaaagtaattaatagatgttaaatgaggtgagctagtgatagttaaaggacgcaggcaaattcctaggcagacaaggatgggttcctggtgaaatgcaaccttcaagccaaggacaactaagcttccagctccagataaaatccgtggaccagagtgagaactcctattcccatttgccttgctttctcccgattggtcttttactttcacctattttacgtatacctaccctcctctgactagctctatacactatcttgcctctttctgaatggtgctttttccaaacccacccacaaaccaatcagcacgcacttccccattccaagctcataaaaacccccgaactcagtcatgtgactggcaacccacttttgggtcccctctcactgccaaaagcttttttgtaactcaataaattctactctgccttactcactctccagtgcccatgtaccacattcttctcgggtgtggaacaagaactcagaacttaccgaacgacgggagtgaaaragctgcaacactaactagatcctgctgacatcctccctacagatacttga

SEQ ID NO: 720028 - DNA, 1383 bp, Homo sapiens
tgcagcagttactgcaccaaaacaatcaaagcagaaaacactagttaggagacaattgcaaaaatccaagtgggaggtagataaagttatgaaaatgtttctgctaattaatttttgcaagatttttcctttaaatcagcaaattgttaattttagggctaaggtgattttagaaattatcttgctcaaaccccatatttttatgatttaggaaattgaggactaaagagattcaatgatctgcctaagattccaaagccaagactggaagtggatcttctagtttccagttctattgttctttctatcttaaatatatgcctccctcaaggtgacgctttaaattaaaaggaattaacaaagtaacaaatacagaaataggacctttattgctacttcactaaccgaacagtaaccttatttaatagatcttccctgccttatttaatagatcccactgaaacattgtaataaatgtaataaaaggggagattagggcaaacatcagtgggaagacattaattagagaaggacctcaccaattctcagttgactaatcctcaaaccctgtaattctcataagaaaactggcaatcttgctttacttcttattgaagagattttccagccaaagagagcagcaagctcaagtaatcagaatctcattaattttattaaatatgctataaagtctcataataaataattaagccctatcagatatctgatagtcttatcccttcttatagacataaataaaatgacagtgcttgcaatgaaaatcataaaagataattgtgattattgatgataataataccttatgtttgtttcaagagattttaaagcttttcaaagcatgactgttgcatcataattggcatacaaagcatttatgtcctaatctatataaataagtttctatcaactacctgttacaccatcacttgaaaatggctagacagattttcaccaaatttggcttgtgatggcctgacttaagacataaaataataattgctcaacaaatccagtgaggagggccctcacagggggggtctccaagggagaagctttatcatccagaaactgccaacagtgtttgaagctgcactgggcagaataaactgaaatacatagatatagtctatgcttatcttattaggtattagaatatgatccaaggtttctttttcactattaaaaaatgttaaagactgtcaagtttgttttttaaaaatatatcatacatttctacttatataggtaaatacttctggctrttagtaaaattcaaagtgctgtaattttgtttctttgtttttgactgtacctggattacaaatgcaatacagaatttatcatttcagtttattctttttc

SEQ ID NO: 720029 - DNA, 1248 bp, Homo sapiens
ctttcaaggaatcccatcttttactctgtaaatgttggtcgttcctagcagtctgtctttgggctgcctcttattactatatgtattacatacaatctccttttatcactttattcatgagctatactccaattaaacaagaatctataacttttatgcctgagtttttctgcaggctttagtcttatacatatccaactgccttacccaaatcttctcctggatatttgagccaacatattattggcttcaatttttcacccttgtctgcttccacacccrtgccatagtctctttgtgggtaaaaggtattttgactttgaatttggccatgtgccttgctttggctattggaatatggagggaagtgatagtataccagttttgagcctaggccttaagaggctttgtgtgtttctgcctgctctctcccacgtctgctatatttatggaaaaaaaaacccaaacatgtcttgaatagctcattggttcaaggaaaatgaataaaacatagaacagaaccttcccatccaaccatccaacccaagacttgtggtgagaagcagacccactcattaattctaaatcagagttgcccatctcaacccagcctggatcagccaaactccagtcagtccacaggtatgtgaatgacgataagtaatctttttttaactacggagttttagcattgtttattttgcatcaatagctagccaatataatgttttacagcatctaaaacttaacttgcctgaaattaaactccctttctaccacccaccataaacctgttcctttgtcctgtatttcttttaatggttgatggagtcaccactcatcactcagccagacattaggatatcattcttgactttaacatcttccttactctctacatcccacaaatctccaaatacagtcaatttcattttctaactagttctaaagcctgttttttttcttttaaatacccatcttcaatgtcaccgtcagggtttgtggtgtaatagttatttacctgggctactggtctaatgggtcttcctgcttccattatgactgatctgtggtcctccacatggtaaccagagtgacagaaaatttaccgtgttattttgctgtttcaaatctttctctggccctcaacatcaacaggagatgtctgaggtgcttagcatgactccagactttatcatctagtgttcatctacctatccaaattcatttcacactttcctcccatta

SEQ ID NO: 720030 - DNA, 1248 bp, Homo sapiens
ctttcaaggaatcccatcttttactctgtaaatgttggtcgttcctagcagtctgtctttgggctgcctcttattactatatgtattacatacaatctccttttatcactttattcatgagctatactccaattaaacaagaatctataacttttatgcctgagtttttctgcaggctttagtcttatacatatccaactgccttacccaaatcttctcctggatatttgagccaacatattattggcttcaatttttcacccttgtctgcttccacacccgtgccatagtctctttgtgggtaaaaggtattttgactttgaayttggccatgtgccttgctttggctattggaatatggagggaagtgatagtataccagttttgagcctaggccttaagaggctttgtgtgtttctgcctgctctctcccacgtctgctatatttatggaaaaaaaaacccaaacatgtcttgaatagctcattggttcaaggaaaatgaataaaacatagaacagaaccttcccatccaaccatccaacccaagacttgtggtgagaagcagacccactcattaattctaaatcagagttgcccatctcaacccagcctggatcagccaaactccagtcagtccacaggtatgtgaatgacgataagtaatctttttttaactacggagttttagcattgtttattttgcatcaatagctagccaatataatgttttacagcatctaaaacttaacttgcctgaaattaaactccctttctaccacccaccataaacctgttcctttgtcctgtatttcttttaatggttgatggagtcaccactcatcactcagccagacattaggatatcattcttgactttaacatcttccttactctctacatcccacaaatctccaaatacagtcaatttcattttctaactagttctaaagcctgttttttttcttttaaatacccatcttcaatgtcaccgtcagggtttgtggtgtaatagttatttacctgggctactggtctaatgggtcttcctgcttccattatgactgatctgtggtcctccacatggtaaccagagtgacagaaaatttaccgtgttattttgctgtttcaaatctttctctggccctcaacatcaacaggagatgtctgaggtgcttagcatgactccagactttatcatctagtgttcatctacctatccaaattcatttcacactttcctcccatta

SEQ ID NO: 720031 - DNA, 1248 bp, Homo sapiens
ctttcaaggaatcccatcttttactctgtaaatgttggtcgttcctagcagtctgtctttgggctgcctcttattactatatgtattacatacaatctccttttatcactttattcatgagctatactccaattaaacaagaatctataacttttatgcctgagtttttctgcaggctttagtcttatacatatccaactgccttacccaaatcttctcctggatatttgagccaacatattattggcttcaatttttcacccttgtctgcttccacacccgtgccatagtctctttgtgggtaaaaggtattttgactttgaatttggccatgtgccttgctttggctattggaatatggagggaagtgatagtataccagttttgagcctaggccttaagaggctttgtgtgtttctgcctgctctctcccacgtctgctatatttatggaaaaaaaaacccaaacatgtcttgaatagctcattggttcaaggaaaatgaataaaacatrgaacagaaccttcccatccaaccatccaacccaagacttgtggtgagaagcagacccactcattaattctaaatcagagttgcccatctcaacccagcctggatcagccaaactccagtcagtccacaggtatgtgaatgacgataagtaatctttttttaactacggagttttagcattgtttattttgcatcaatagctagccaatataatgttttacagcatctaaaacttaacttgcctgaaattaaactccctttctaccacccaccataaacctgttcctttgtcctgtatttcttttaatggttgatggagtcaccactcatcactcagccagacattaggatatcattcttgactttaacatcttccttactctctacatcccacaaatctccaaatacagtcaatttcattttctaactagttctaaagcctgttttttttcttttaaatacccatcttcaatgtcaccgtcagggtttgtggtgtaatagttatttacctgggctactggtctaatgggtcttcctgcttccattatgactgatctgtggtcctccacatggtaaccagagtgacagaaaatttaccgtgttattttgctgtttcaaatctttctctggccctcaacatcaacaggagatgtctgaggtgcttagcatgactccagactttatcatctagtgttcatctacctatccaaattcatttcacactttcctcccatta

SEQ ID NO: 720032 - DNA, 1248 bp, Homo sapiens
ctttcaaggaatcccatcttttactctgtaaatgttggtcgttcctagcagtctgtctttgggctgcctcttattactatatgtattacatacaatctccttttatcactttattcatgagctatactccaattaaacaagaatctataacttttatgcctgagtttttctgcaggctttagtcttatacatatccaactgccttacccaaatcttctcctggatatttgagccaacatattattggcttcaatttttcacccttgtctgcttccacacccgtgccatagtctctttgtgggtaaaaggtattttgactttgaatttggccatgtgccttgctttggctattggaatatggagggaagtgatagtataccagttttgagcctaggccttaagaggctttgtgtgtttctgcctgctctctcccacgtctgctatatttatggaaaaaaaaacccaaacatgtcttgaatagctcattggttcaaggaaaatgaataaaacatagaacagaaccttcccatccaaccatccaacccaagacttgtggtgagaagcagacccactcattaattctaaatcagagttgcccatctcaacccagcctggatcagccaaactccagtcagtccacaggtatgtgaatgacgataagtaatctttttttaactacggagttttagcattgtttattttgcatcaatagctagccaatataatgttttacagcatctaaaacttaacttgcctgaaattaaactccctttctaccacccaccataaacctgttcctttgtcctgtatttcttttaatggttgatggagtcaccactcatcactcagccagacattaggatatcattcttgactttaacatcttccttactctctacatcccacaaatctccaaatacagtcaatttcattttctaactagttctaaarcctgttttttttcttttaaatacccatcttcaatgtcaccgtcagggtttgtggtgtaatagttatttacctgggctactggtctaatgggtcttcctgcttccattatgactgatctgtggtcctccacatggtaaccagagtgacagaaaatttaccgtgttattttgctgtttcaaatctttctctggccctcaacatcaacaggagatgtctgaggtgcttagcatgactccagactttatcatctagtgttcatctacctatccaaattcatttcacactttcctcccatta

SEQ ID NO: 720033 - DNA, 629 bp, Homo sapiens
atggtggcaggcacctataatcccagctacttgggaggctgaggcaggagagtcacttgaacccatggggcaggggttgcagtgagcagagatggtgccacttcactccagcctgggcaaaagagtgaaattttgtctcaaaaaaaaaaaaaaaaagaaagagaagatactgctcccacttctttctgattctaagatgctcctactaagcacattcccttgaatccatccttttggtattcttcagtttttattaactctttatgtcttaaaaaaaattggggttgcttccattaaaaaacacaggcagaataatrtttttaaaaatgattaaaattggacagaagacagacacaagtaaacaagggaatgccaagaagctgtagaattgtttatcagaactgttgctctgaatttctgacagagaaataggagaataacttatgtacccttttattattattagaaggaaatacactagtttattaaaagttcaaccctttgctttaccctaagctctgaaaggaatattattattcaatgatatggatttatcaaaaactacctatgtgccaagctcagtgttaggcaaaacatttagaatgcattttctttcctccaaatgttca

SEQ ID NO: 720034 - DNA, 785 bp, Homo sapiens
taaaggtttttcattttattaaaaagtgaaaacagtgctataacttttcttgtctattttaaatctatcacacttagaaatatatatgtgtatatatgatttttaatccaaaaagggattttactataagggtattgggtagctcacagaagtgtgcagaaggctagaggctaaacatgtaagattagttgagtctaaacttacaggtacagtactaggaccgtgcatcacaattggcctgatgaagaaacgtcagctattgctgttgcccactgaacactgaaggagaaccctgcaccggctgccctctcattgttggatacatctgccaccacccttgccagcaaaatggacagccccctgcccctaaaacttgtcttctcaggttgcttgtttccaaaccagckattcagaagcatgtgactgacaggcaaaatctagttcaaatgcttctggtttagctgcaaggaattctgggaacttgagttttctggattctgccctgatgaaaccagatcaataagactgcacatttcctaaacatagtgatcacgtgagaaaggtgtttggtagcttgaaaacatggcagttatacatagatggaatacactataggaagaaaaacagacaactcactggccacaattgagttgatcatattattctgatggtgtcaaaaagcaaaactggaaacagctgatgtcctccaggctaaggtgttaaactggattacaatttatataggtaaaaaaaatcctttaccccagcataacattgcttaatca

SEQ ID NO: 720035 - DNA, 2227 bp, Homo sapiens
cactccagcctgggtgacaagagcaagactccatctcaaaagaaaaaaaaaattcttgttatattcaaactattgtaagttaaagaaaaaattgctctgtataacaccagtcccaagatgtgctctgcaaaacagttccatggtcgagtaatttggagaataaaatgaattttacccggcctaaggaggttcttaaataaggaaaactttaagtcaatgtttttcaaatttatttggcaacaccaaccttctttttgaaatgttaactattagttaacatcccattaaattaatactataaggaacacactttaggaaatgctgctttaaaaataagaatgccaagtgctcacctaagcaaaactggtattcaggctggctagtgcattgtaattataaactatgctacatttttattataaatacattacaaggaaagagccaatataatcactgttcttttttatcaccagtcatggttgtatgtcaaagtttaagtcctttgcacatgtaagtcctctaattaggcacaaatttcaagaattatcagatgcaacaaaatcctgctgcaacagtacaatgcaaacagacacatcaagataaatgtaattgaatttaacctcagaattccattttcatcggaaaaccaaacctacagtctagaaaactttcattttaacaccagtgaccataatgtggtgccctgaattagtttagcactttcttttcttgttttctgagacagtctcactctgtcgcccaggctggagtgcagtggcacaatctcggctcactgcgacctccacctcctgggttaaagagatttttgtgcctcagcctcccgagtagctgcgattacaggtgtgtgccatcatgcccggctaaatttttgtatttttagtagagatggggtttcacagtgttgcccaggctggtctcaaactcctggcctcaagtgatccatccgcctaggcttcccaaaatgcwgggattacaggcatgagccaccacaatcagcctagaacttttttttttctttttttgagacagagtctcatactgttgctcaggctggagtgcaatggcgcgatctcagaccactgcaacctctctgcctctcgggttcaagtgattctcctgcctcagcctcccgagtacctgggattacaggcgcccgccaccatgcccggctaattttttgtatttttagtagagacggggtttcactatgttggtcaggctggtctcgaactcctgacctcgtgatccacccgcctcggcctccaaaagtgctgggattataaggtgtgagacactgctcccagccagaacttttttttaatgacatcatttaagcatacaaaatagttttgcaattagcgacaaatataaaatagaatgtctcatttttaatattaaacaaaatgatactcaataaacttgactgcttattattagccttgtaatttagaaagaagtacagccttcataaagaaactttcacaaataaatgtttcatatacatgcacataaaaaacttctcttattaatttaccttattttctgagcttcgaggattgattgagtgtgcactgtggaccagttttgctggatttcaatcccagcactattacttacacttactgcctgttacttaacctgtgtctcaatgtccttatctgtaaattggacctaatagggttgtgagtcttaaataagataatacttgtaaagcacataaaacagtgctttggaccagtaagggttcaataaatattagctatcactaattttatccttccttgtatatctgtatctctaatacatgggcactaaataaatgtttgctgaaaaataactgaaaagctaaagcttaatatacatattgcagtgacgtgaaagagcaaaagttctagagttagaatgtctgtgctcttgagatcactttatgggatacattatcttgagcaagtcatataaactccctgagcctgtctgcccacttggtaaagtaaggataatgatgatgatggtagtgactacacttcacttggtactaagcaattaatgtacaggacaaaagaagattatacaacttttaaaatgatgtttaaggagtattttaatgacagggtaaaatgcttccgagaaataacagaaaattatacataaaatataattcagtcatgaaaaactatagagaaaaaaaggtaaaaataaaactaaa

SEQ ID NO: 720036 - DNA, 2227 bp, Homo sapiens
cactccagcctgggtgacaagagcaagactccatctcaaaagaaaaaaaaaattcttgttatattcaaactattgtaagttaaagaaaaaattgctctgtataacaccagtcccaagatgtgctctgcaaaacagttccatggtcgagtaatttggagaataaaatgaattttacccggcctaaggaggttcttaaataaggaaaactttaagtcaatgtttttcaaatttatttggcaacaccaaccttctttttgaaatgttaactattagttaacatcccattaaattaatactataaggaacacactttaggaaatgctgctttaaaaataagaatgccaagtgctcacctaagcaaaactggtattcaggctggctagtgcattgtaattataaactatgctacatttttattataaatacattacaaggaaagagccaatataatcactgttcttttttatcaccagtcatggttgtatgtcaaagtttaagtcctttgcacatgtaagtcctctaattaggcacaaatttcaagaattatcagatgcaacaaaatcctgctgcaacagtacaatgcaaacagacacatcaagataaatgtaattgaatttaacctcagaattccattttcatcggaaaaccaaacctacagtctagaaaactttcattttaacaccagtgaccataatgtggtgccctgaattagtttagcactttcttttcttgttttctgagacagtctcactctgtcgcccaggctggagtgcagtggcacaatctcggctcactgcgacctccacctcctgggttaaagagatttttgtgcctcagcctcccgagtagctgcgattacaggtgtgtgccatcatgcccggctaaatttttgtatttttagtagagatggggtttcacagtgttgcccaggctggtctcaaactcctggcctcaagtgatccatccgcctaggcttcccaaaatgctgggattacaggcatgagccaccacaatcrgcctagaacttttttttttctttttttgagacagagtctcatactgttgctcaggctggagtgcaatggcgcgatctcagaccactgcaacctctctgcctctcgggttcaagtgattctcctgcctcagcctcccgagtacctgggattacaggcgcccgccaccatgcccggctaattttttgtatttttagtagagacggggtttcactatgttggtcaggctggtctcgaactcctgacctcgtgatccacccgcctcggcctccaaaagtgctgggattataaggtgtgagacactgctcccagccagaacttttttttaatgacatcatttaagcatacaaaatagttttgcaattagcgacaaatataaaatagaatgtctcatttttaatattaaacaaaatgatactcaataaacttgactgcttattattagccttgtaatttagaaagaagtacagccttcataaagaaactttcacaaataaatgtttcatatacatgcacataaaaaacttctcttattaatttaccttattttctgagcttcgaggattgattgagtgtgcactgtggaccagttttgctggatttcaatcccagcactattacttacacttactgcctgttacttaacctgtgtctcaatgtccttatctgtaaattggacctaatagggttgtgagtcttaaataagataatacttgtaaagcacataaaacagtgctttggaccagtaagggttcaataaatattagctatcactaattttatccttccttgtatatctgtatctctaatacatgggcactaaataaatgtttgctgaaaaataactgaaaagctaaagcttaatatacatattgcagtgacgtgaaagagcaaaagttctagagttagaatgtctgtgctcttgagatcactttatgggatacattatcttgagcaagtcatataaactccctgagcctgtctgcccacttggtaaagtaaggataatgatgatgatggtagtgactacacttcacttggtactaagcaattaatgtacaggacaaaagaagattatacaacttttaaaatgatgtttaaggagtattttaatgacagggtaaaatgcttccgagaaataacagaaaattatacataaaatataattcagtcatgaaaaactatagagaaaaaaaggtaaaaataaaactaaa

SEQ ID NO: 720037 - DNA, 2227 bp, Homo sapiens
cactccagcctgggtgacaagagcaagactccatctcaaaagaaaaaaaaaattcttgttatattcaaactattgtaagttaaagaaaaaattgctctgtataacaccagtcccaagatgtgctctgcaaaacagttccatggtcgagtaatttggagaataaaatgaattttacccggcctaaggaggttcttaaataaggaaaactttaagtcaatgtttttcaaatttatttggcaacaccaaccttctttttgaaatgttaactattagttaacatcccattaaattaatactataaggaacacactttaggaaatgctgctttaaaaataagaatgccaagtgctcacctaagcaaaactggtattcaggctggctagtgcattgtaattataaactatgctacatttttattataaatacattacaaggaaagagccaatataatcactgttcttttttatcaccagtcatggttgtatgtcaaagtttaagtcctttgcacatgtaagtcctctaattaggcacaaatttcaagaattatcagatgcaacaaaatcctgctgcaacagtacaatgcaaacagacacatcaagataaatgtaattgaatttaacctcagaattccattttcatcggaaaaccaaacctacagtctagaaaactttcattttaacaccagtgaccataatgtggtgccctgaattagtttagcactttcttttcttgttttctgagacagtctcactctgtcgcccaggctggagtgcagtggcacaatctcggctcactgcgacctccacctcctgggttaaagagatttttgtgcctcagcctcccgagtagctgcgattacaggtgtgtgccatcatgcccggctaaatttttgtatttttagtagagatggggtttcacagtgttgcccaggctggtctcaaactcctggcctcaagtgatccatccgcctaggcttcccaaaatgctgggattacaggcatgagccaccacaatcagcctagaacttttttttttctttttttgagacagagtctcatactgttgctcaggctggagtgcaatggcgcgatctcagaccactgcaacctctctgcctctcgggttcaagtgattctcctgcctcagcctcccgagtacctgggattacaggcgcccgccaccatgcccggctaattttttgtatttttagtagagacggggtttcactatgttggtcaggctggtctcgaactcctgacctcgtgatccacccgcctcggcctccaaaagtgctgggattataaggtgtgagacactgctcccagccagaacttttttttaatgacatcatttaagcatacaaaatagttttgcaattagcgacaaatataaaatagaatgtctcatttttaatattaaacaaaatgatactcaataaacttgactgcttattattagccttgtaatttagaaagaagtacagccttcataaagaaactttcacaaataaatgtttcatatacatgcacataaaaaacttctcttattaatttaccttattttctgagcttcgaggattgattgagtgtgcactgtggaccagttttgctggatttcaatcccagcactattacttacacttactgcctgttacttaacctgtgtctcaatgtccttatctgyaaattggacctaatagggttgtgagtcttaaataagataatacttgtaaagcacataaaacagtgctttggaccagtaagggttcaataaatattagctatcactaattttatccttccttgtatatctgtatctctaatacatgggcactaaataaatgtttgctgaaaaataactgaaaagctaaagcttaatatacatattgcagtgacgtgaaagagcaaaagttctagagttagaatgtctgtgctcttgagatcactttatgggatacattatcttgagcaagtcatataaactccctgagcctgtctgcccacttggtaaagtaaggataatgatgatgatggtagtgactacacttcacttggtactaagcaattaatgtacaggacaaaagaagattatacaacttttaaaatgatgtttaaggagtattttaatgacagggtaaaatgcttccgagaaataacagaaaattatacataaaatataattcagtcatgaaaaactatagagaaaaaaaggtaaaaataaaactaaa

SEQ ID NO: 720038 - DNA, 1396 bp, Homo sapiens
tgtcaagttccaaaacatttttcctgaatgcctttttattttatttttatttatttttaattttatttatttgttttttgagacggagtttcacttttgttgcctaggctggagtgcagtggtgccatctcggctcactgcaacctctaccacttaggttcaagcaattctcctgcctcagcctcctgagtagctgggattacaggcgcccgccaccatgccaagctaattttttgtatttttagtagagacagggtttcaccacgttggccaggctggtcccgaactcctgacctcaggtgatccacccactttggcctcccaaaatgctaagattgtaggtgtgagccactgcacctgtcgaatgcctttttagagtgctgacactccaccgcccttgacagtgactctccttgtctctattagattgttacaggtcagactgatttttgtttcttctctttcttgggcagagctcgaaagagcattccagacacatatgcagagcacctcattgctggcggactcatgacgcaggaggaggtgtctgaaataaaatcctcctactatgccaagttgaatgatcacttaaataacatggcccactacaggccccctgccctgaacctgcaggcccactggcagggcctggctcagccagaagcgcaaatcaccacctggagtacaggtgtgcccctcgacctcctgcggtttgttggcatgaagtctgtagaggtgccaagagagctgcagatgcacagtcacctgctgaagacacatgttcaggtgggcagcctccaaatggctggttattgcttctccttcctgctcagcaaaggagctgacgttggtctggtgttttcagttgtctgattcatttgacaaatatttattgtgtgtcgttaggttctagaaactgatcctagtgttgttttggtactgatagtcagttacctcagattttctcttcttttctttttcctccatgtatttatttatttatgcatgttcatacattacatgtacctggaatacatgcacactataaraaatacagagatacaagaatgtctgtttttatttttccaaccagtgagtagaaaacactttgtttcaggtggcttaaataaaagaaacaaaagtcaacacacataccccaaggtagccccctaaacatgctcatgttttacgtattgtcttaggatcactataggatgacaaaccaccctggtggacctgggacttaggggttttctggaatgtgggactttaagtgctaaaacaaggagagcaaagagttaaatgtctttttctttcttaagcttggatgaaggaactttgccctctaaattattttattttatgttatttttggatggaatctcactctgtcacc

SEQ ID NO: 720039 - DNA, 1396 bp, Homo sapiens
tgtcaagttccaaaacatttttcctgaatgcctttttattttatttttatttatttttaattttatttatttgttttttgagacggagtttcacttttgttgcctaggctggagtgcagtggtgccatctcggctcactgcaacctctaccacttaggttcaagcaattctcctgcctcagcctcctgagtagctgggattacaggcgcccgccaccatgccaagctaattttttgtatttttagtagagacagggtttcaccacgttggccaggctggtcccgaactcctgacctcaggtgatccacccactttggcctcccaaaatgctaagattgtaggtgtgagccactgcacctgtcgaatgcctttttagagtgctgacactccaccgcccttgacagtgactctccttgtctctattagattgttacaggtcagactgatttttgtttcttctctttcttgggcagagctcgaaagagcattccagacacatatgcagagcacctcattgctggcggactcatgacgcaggaggaggtgtctgaaataaaatcctcctactatgccaagttgaatgatcacttaaataacatggcccactacaggccccctgccctgaacctgcaggcccactggcagggcctggctcagccagaagcgcaaatcaccacctggagtacaggtgtgcccctcgacctcctgcggtttgttggcatgaagtctgtagaggtgccaagagagctgcagatgcacagtcacctgctgaagacacatgttcaggtgggcagcctccaaatggctggttattgcttctccttcctgctcagcaaaggagctgacgttggtctggtgttttcagttgtctgattcatttgacaaatatttattgtgtgtcgttaggttctagaaactgatcctagtgttgttttggtactgatagtcagttacctcagattttctcttcttttctttttcctccatgtatttatttatttatgcatgttcatacattacatgtacctggaatacatgcacactataagaaatacagagatacaagaatgtctgtttttatttttccaaccagtgagtagaaaacactttgtttcaggtggcttaaataaaagaaacaaaagtcaacacacataccccaaggtagccccctaaacatgctcatgttttacrtattgtcttaggatcactataggatgacaaaccaccctggtggacctgggacttaggggttttctggaatgtgggactttaagtgctaaaacaaggagagcaaagagttaaatgtctttttctttcttaagcttggatgaaggaactttgccctctaaattattttattttatgttatttttggatggaatctcactctgtcacc

SEQ ID NO: 720040 - DNA, 1396 bp, Homo sapiens
tgtcaagttccaaaacatttttcctgaatgcctttttattttatttttatttatttttaattttatttatttgttttttgagacggagtttcacttttgttgcctaggctggagtgcagtggtgccatctcggctcactgcaacctctaccacttaggttcaagcaattctcctgcctcagcctcctgagtagctgggattacaggcgcccgccaccatgccaagctaattttttgtatttttagtagagacagggtttcaccacgttggccaggctggtcccgaactcctgacctcaggtgatccacccactttggcctcccaaaatgctaagattgtaggtgtgagccactgcacctgtcgaatgcctttttagagtgctgacactccaccgcccttgacagtgactctccttgtctctattagattgttacaggtcagactgatttttgtttcttctctttcttgggcagagctcgaaagagcattccagacacatatgcagagcacctcattgctggcggactcatgacgcaggaggaggtgtctgaaataaaatcctcctactatgccaagttgaatgatcacttaaataacatggcccactacaggccccctgccctgaacctgcaggcccactggcagggcctggctcagccagaagcgcaaatcaccacctggagtacaggtgtgcccctcgacctcctgcggtttgttggcatgaagtctgtagaggtgccaagagagctgcagatgcacagtcacctgctgaagacacatgttcaggtgggcagcctccaaatggctggttattgcttctccttcctgctcagcaaaggagctgacgttggtctggtgttttcagttgtctgattcatttgacaaatatttattgtgtgtcgttaggttctagaaactgatcctagtgttgttttggtactgatagtcagttacctcagattttctcttcttttctttttcctccatgtatttatttatttatgcatgttcatacattacatgtacctggaatacatgcacactataagaaatacagagatacaagaatgtctgtttttatttttccaaccagtgagtagaaaacactttgtttcaggtggcttaaataaaagaaacaaaagtcaacacacataccccaaggtagccccctaaacatgctcatgttttacgtattgtcttaggatcactataggatgacaaaccaccctggtggrcctgggacttaggggttttctggaatgtgggactttaagtgctaaaacaaggagagcaaagagttaaatgtctttttctttcttaagcttggatgaaggaactttgccctctaaattattttattttatgttatttttggatggaatctcactctgtcacc

SEQ ID NO: 720041 - DNA, 1396 bp, Homo sapiens
tgtcaagttccaaaacatttttcctgaatgcctttttattttatttttatttatttttaattttatttatttgttttttgagacggagtttcacttttgttgcctaggctggagtgcagtggtgccatctcggctcactgcaacctctaccacttaggttcaagcaattctcctgcctcagcctcctgagtagctgggattacaggcgcccgccaccatgccaagctaattttttgtatttttagtagagacagggtttcaccacgttggccaggctggtcccgaactcctgacctcaggtgatccacccactttggcctcccaaaatgctaagattgtaggtgtgagccactgcacctgtcgaatgcctttttagagtgctgacactccaccgcccttgacagtgactctccttgtctctattagattgttacaggtcagactgatttttgtttcttctctttcttgggcagagctcgaaagagcattccagacacatatgcagagcacctcattgctggcggactcatgacgcaggaggaggtgtctgaaataaaatcctcctactatgccaagttgaatgatcacttaaataacatggcccactacaggccccctgccctgaacctgcaggcccactggcagggcctggctcagccagaagcgcaaatcaccacctggagtacaggtgtgcccctcgacctcctgcggtttgttggcatgaagtctgtagaggtgccaagagagctgcagatgcacagtcacctgctgaagacacatgttcaggtgggcagcctccaaatggctggttattgcttctccttcctgctcagcaaaggagctgacgttggtctggtgttttcagttgtctgattcatttgacaaatatttattgtgtgtcgttaggttctagaaactgatcctagtgttgttttggtactgatagtcagttacctcagattttctcttcttttctttttcctccatgtatttatttatttatgcatgttcatacattacatgtacctggaatacatgcacactataagaaatacagagatacaagaatgtctgtttttatttttccaaccagtgagtagaaaacactttgtttcaggtggcttaaataaaagaaacaaaagtcaacacacataccccaaggtagccccctaaacatgctcatgttttacgtattgtcttaggatcactataggatgacaaaccaccctggtggacctgggacttaggggttttctggaatgtgggactttaagtgctaaaacaaggaragcaaagagttaaatgtctttttctttcttaagcttggatgaaggaactttgccctctaaattattttattttatgttatttttggatggaatctcactctgtcacc

SEQ ID NO: 720042 - DNA, 1166 bp, Homo sapiens
  misc_feature 767: n = A,T,C or G
gaaaattctcaggattaagccagtatataagaatttacagtcaccacaccttattattaggttatttatgggaatctgactttttttttcttgcttgcttaaggttttaatgttcgtctaagtggccaagatgttggtcgtggaactttcagtcagaggcatgcaatsgtggtttgccaggagacggatgacacctacatccccctgaaccatatggacccaaatcagaaggggtttctagaggtgagatgtttctatagctgttgtaaaatccaggtgccaacgattacacttccaggattcttagaacaagtaggaaggagtgctggcaactttgggttcagtacttttggaagtaaaggagtgctaaatgggtggatgaggtgggtctgtcaatttggaatgcaagtaacccctagagagtaggctggagctttcttcttctggtgacatatctgtaatcatgtaaatgtcaaatcaatgtgtgttttgtcaactcaaagttgacattatcatctgcatattgctgtaattcattaaagttagtcaaagatatggataagtcagtattccttgcctacttaaggatagcaaaatcgcacatcctcaaggttacctgttccctaaggtatgattggcttgacgaatgtacacataaccgtgtatttctttcttttttttcggagacttaatcttgctctgttgcccacagctggaggacaatggtgccatcttggctcactgcaacctccacctcccaggctcangggatcctcatgtttcagcctcccgagtagctgggaccacgggaatgaggtgccattcctggctaatttttttatttttagtagatggaatttcaccatgttgcccaggctggtcttgaactcctggcctcaagcagtccacctgccttggcctcccaaagcactggaagtataggtgtgagccactgcacccagccagatataaccatgtatttctgtgtggcagcctctgtgccctctgtagtgccttaaggatagtagtggagtcttttcatttatttatctcaaacaattattcaagtgtctagcacatgatgtttatgaaaataacttattccttaaggtaagttgagtggcatgtcatcttctttcctactctagccattagtttgagaacat

SEQ ID NO: 720043 - DNA, 584 bp, Homo sapiens
tattgatttttctgcatacgtcttcttcctcaaccaggaagcaaatggagacttgggagtgcactgattgcggccgctaccatctttagagtttcattcacaaacagcgatctatttttacctccatattctaaacaaggacaaagtcctcacaagaagcctgcagtcctttaatttagccttttgatctacaaaggacaaagcacaactgttctcttttctgtcactaaactaggtgtcacactaatatttactcatgtccactatacagagaataccattcatgcaggtttttgggaaacaaggctaagacttaacaattttccaaggatccaaagcaagtgaaataagttcataaatactctgctcaatatgagatcatgtattcaattagaaatttcaaaaggaaaagaaagtaggtaacttggaaaaaggttcaaagaacaaaaagaatcatatatgyctttacgggttaagttgtaggaaaagttaatacttgcacaatcagtagcagcacttgtaaaacctttaccatgaaaagtggttcttcagatatgcgatgtcgtaaatttatataatttgca

SEQ ID NO: 720044 - DNA, 1914 bp, Homo sapiens
taaatgaatagttgatgggtcctggagtcccactgggtgagtctgcattttaaatttgtcacttctagctgcrtgacttgggcaaattattttaatctctttgggcttcccagtcctaaaggggaatagtattagtttcaccctcaagtgcttgctaagaatatttggtaaaataatacatgtaaaggacatggaagtgtttctggcacagattaagccctccatactataaaccatattgttatacttaatattaagtgaaaacatctgtgatatatttaaagattttaatatttgcattagtttgaattttataactgcctttgtattgatgaagaaatatataataaaaaattaagtaaaagttactctgagtctaatgcatgtgtaatgcatgaaaagcttgacacaaaaagtaagtggtttggagaaatcaggaaagggggcaagcttcagaaactcccaagagactaatagcatagactatcaaaaaagacagatttgtcacagacttacaaataaattactgaagacaacattagtagactaacctactttcaacacaacatgaaactctattccagattcatttccaacttttaaaaatactatattaacttttcagtaaatatgtgtatagtatctgcaattgaaaagttgaagaaaacattgtaacagaaaagtccaccagtatatctgtctcttgtattcagtgtgtaccataaaaagtagcaataatatccactaaaagcagaacacaacagctaatatgaaaatgtctaagtagtaaaggattcctgaactgtgaattcattgaagttcattctatattatggattgttttgaatgatgctaatgtatatgatatatgcatgtttgtacactttgcatgtattttaggaattcattcaaaatcattttgcatgttgtttgctttttatttactaaagttattgaaatatggaccttttataatctaattacgttgaaaggcacagggctgtattagatagtttgaagaattttaacaacacgtacacgtatttaatccatagtcctaccaggttatagaatacttttgtgtacccagaaagttatcttgatgccccttttttgccaatcatagtgtctactagaagcgaacattattctgatttctatcaccatagattaattttgttcattccagaacttcttggaaatcatgcaatatgtcctctcatgccaagcttccttcacccagcataatatatttttgagattcatccattttgttctgtgcataagtaatatgttcctttttgtattgcattttgtatatttatttactgctagatatttgtgtcgcttcctgtttttagctattatgactagtgccgctgtgaatcatcatgtataagaatttttctagacacttttgtctagtgcaaaggatacatgaatagtggatggataaatggattcctgggtcataaggtggggcatgttttaatttattagaaatagccagagtatttttcaaaatgatttcaccattaattcccataagcaaaaggtaggaatcctggttgctctatatcctggggaatattcaggatttcaagtatttcatttgatcaattctactaggtatgtgatatcacacagtgaaattaatatctgtgtatttaatgactattgatattgagcacttttcaaatattatcttcttgtgaagtgccttttcaagtcttttgtcccttttttggtgaaatcatttgtctttttattattgagttagaggctttctttatatatgtatttgaaataactttgtcaactataaatgtttggaactgtttctcccactgtcagttgtgagagaaatatttctaaatttttaaaatattcagattctaaaagctgtcttttgaa

SEQ ID NO: 720045 - DNA, 1930 bp, Homo sapiens
aagaaagcaaagtgaactgaataaattgtatcttaaatagactaaagaaaagcttttgtatttgtcttttctcaactaagcagtttccatagtgcctagcaaggtctcagaaatgtactcagtgaagagggttaaatggtaactctttcagaacagaaaggattccctacagagtccagcagaggcagagcactattttgcccagcctggccttgaactcctgggctccggcactgcagccatcctcccacctcaatcttcccagcagttgggactacaggcctgtgccatggcacctggctaaggatagctattatgagagtagtaatgtaagatgaaactaaaaagactcataatagtaggattaaaaagcacaaaaattttaaagattctccggtacatttatttcacaaacttttttgtacagttgacccttacacatgggtttgaactgggtgggtacacttatgcgcatacttttttcaatcaaatgcaggtgaggtcacacagatcagcatttgtgcgtgggatgtgaaactcatgtgtatggagggtcaattggagggccaacttttctacatatgggttctgcaagactttctgtgagacttgagtatgggcagattttggtatatgtgtggccctggaactagtccccagtgtatacaagggatgactgtattttaatggtttatagtgttaaaaagagaaaaatgtccacgtaaccacaattttgaacactgaactattttaatatgaattaatatgtcttatatttattaccaattgatcttcaaattgcagcagcccatgagttaggttgtaagtgttcttgccattccaccccagctctcactgagtcagtttaaaatatacacacatagaagcagacacaagccttttgtaaagtaaacaaatcttttttactgtaaataactgttcctcaatggaactttttgtatccagtttactcttttctaaagctgggatattcatattaaatacccaacaacctctataaagcaaagagtctatctctgtgaaaacacaagtaattcttgatggcaatatttttctttttytttttttttttttttgagacggagtctcgctgtcgcccaggctggagctcactgcacactccgccccccggggttcacgccattctcctgcctcagcctcccgagtagctgggactacaggcgcccgccacctcgcccggctaattttttgtatttttagtagagacggggtttcaccgtgttagccaggatggtcttgatctcctgaccttatgatccgcccgcctcggcctcccaaagtgctgggattacaggcgtgagccacagcgcccggcccaatatttttcttaattcacctaaacaaatgcagtttggaaggccaaaaggagaaaaaaacacttcagattatcaaaaccaaaagagatatgaaaaaataacatatttaacaatgtaggtgggaattttaaatacaagatcctgttgaaaatattgatattcaaagaaacaaacagctttggatccatagccacaatttaggttttcctagattaaaatcagaagtgattttattgttggaagatacattaattctttgacatcagaataagaggcttgacaatttaatttctaattaagagactgaatagacaaaggatcaaatacaaacagtagtgcaggaagaaaataaattggaagaaatatttgttcaaccagtagtaataattaagaccaccattttaaaattttctatacacaaagaatgagaaaatattgttataatattattattatacttctttctttttcagtattagtggacccacattatctcctgtcagttcattgtgtttattatgtgaatcatcatgggcaggaaactaaaaagaaaaaagaattacaagtgttaa

SEQ ID NO: 720046 - DNA, 601 bp, Homo sapiens
ggaaactattactgtaaaagtgaartaactcagaaatggaaaactaaacattgtgtgttctcactgatatgtgggagctaagctatgaggatgcaaaggcataagaatgatacaatggacttggggggatttggggagaagagtaggagggaggcgagggataaaagactacaaatagggtgcagtatacacttgggtgatggatgcacttgggtgatgtgtgctccaaaatctcacaaatcaccaataaagaacttactcatgtaaccaacatgagttataaagaacaactaatgacctgtaataacctgtggaaaaataaataaataaataagaagaaaaaagagatagtattcaataaaataaaaggtgaagaacaatgtctggtataccagtcagctgagttacaaaaacaaaaatctgtgtctgtgtgtacatgtgtgttttattttatatctttccttttgtgtttatacatatccatacccacacacagaatctgcttgtacagggatagaatgtctctagaaacagttacaaggaagttatcacactggtttattccatgggtggaggtacgggagcttgtgttcaaaggaaa

SEQ ID NO: 720047 - DNA, 601 bp, Homo sapiens
ggaaactattactgtaaaagtgaagtaactcagaaatggaaaactaaacattgtgtgttctcactgatatgtgggagctaagctatgaggatgcaaaggcataagaatgatacaatggacttggggggatttggggagaagagtaggagggaggcgagggataaaagactacaaatagggtgcagtatacacttgggtgatggatgcacttgggtgatgtgtgctccaaaatctcacaaatcaccaataaagaacttactcatgtaaccaacatgagttataaagaacaactaatgacctgtaataacctgtggaaaaataaataaataaataagaagaaaaaagagatagtattcaataaaataaaaggtgaagaacratgtctggtataccagtcagctgagttacaaaaacaaaaatctgtgtctgtgtgtacatgtgtgttttattttatatctttccttttgtgtttatacatatccatacccacacacagaatctgcttgtacagggatagaatgtctctagaaacagttacaaggaagttatcacactggtttattccatgggtggaggtacgggagcttgtgttcaaaggaaa

SEQ ID NO: 720048 - DNA, 602 bp, Homo sapiens
atctgatatttaccacttacatgttaggtgaccttgatagagctgagttattttatatctctaaactttagttaccttatttatataaatgaggaaaatactcttccttcatagaattgtcattaggattccatgatataatatatgaaagtcacaggaagattaactgaactcaaagtgctattattattgttattattgactgctaccactgctcttgctacaattgtagtcattatagtccatgttgtaacttcataaatttcactaaaattttctagtattttttaacaaatatatatttattagataatatagtcatttagtatagtatataaatctgactataaatgttttacatataaactgatgtattcrtgagtatctgtgctattcatattaccatataaataataaaatattctagaaaatatactgtttattataaaaaagatattacacacatatattatacatataatgtattcttatatcatatatttatatgagagaatgagagatggggaaattggcctgccataggttcctttttctctgccggaatcatctttcccagcccccatagttgctgctatctattt

SEQ ID NO: 720049 - DNA, 830 bp, Homo sapiens
gttttgcttcacaaagataaattaaacattatgaaataagaatagtcatatggtcactaaattctgccaattcaaccacctaattaattctctcccttcatcctttccaattggaacacaaggaagagcaacaaataggkggcaaaagctaaaaagccttccataatttcactattaaaactgatcatttctcggccgggtgcggtggcttacgcctgtaatctcagcactttgggaggccaaggagggcagatcacgaagtcaagagttcgagaccagcctgaccaatgtggtgaaaccccatctctactaaaaatacaaaaattagctgggcatggtggcgggcacctgtaatcccagctactcaggaggctgaggcaggaaaatcacttgaatctgggaggcggagtttacagtgaaccaagatcatgccactgcactccagcctgggcgacaaagcgagactccaactcaaaaaaaaaaaaaaactgatcatttctcatcttctcattgtctgccttagaaacacttccatggtagctcctagttcactgctgtaattacttactttttcagttttacataccaaattatatgatcttttagacacactcccattcacttctatattcacaacattcttccacttgtgactgacccattaatagctccttagtaaatgtttattgcctatatgaagaaatggcatattataaagcaaaggcaattgagtcaaactttgagttcacaaaagaacaagctgaaggccagagacatgaagtgaggtctcagctcatactgttatttaatatgcagcagtaaaaatctaa

SEQ ID NO: 720050 - DNA, 646 bp, Homo sapiens
aatttctgaaggaagatgatgtgctcattctacaggactttcagtgatattatacaaaacaacattgtgtttaaaacattgggtcaattgaaatatacatatatatatatacacacacacacacayacacatatatatatatataatgactgttgatattagaggaacaatctataatcaatgagtagtttacaaagtgaatttaaatcaaatactgtttctcatactctataaaccttagcacccagagcaaacacttgtataatatattatcagttagtatttttgatggataacacacaaattgtatgaaaatgtaatccacaattgaaaaatgaaaagtatcatgttctggacaactttcttaattagtatcttaaaatctgagtcattgaattgatttggcacatgtgatatgacaatgtttataaaataaaagctacaaaaatattgtggtgtttgtaatattaaaatttattacttgccttataaaataaacattcaaaaaatgaaaaattgttaaatcggtaagacttgcatgcaatgaatcaggttacagatttgtaaagttcattagaacataattcctcatactgaattgccttttaacagtagattcagctcaagtttctaaaaacaaatatta

SEQ ID NO: 720051 - DNA, 646 bp, Homo sapiens
aatttctgaaggaagatgatgtgctcattctacaggactttcagtgatattatacaaaacaacattgtgtttaaaacattgggtcaattgaaatatacatatatatatatacacacacacacacatayacatatatatatatataatgactgttgatattagaggaacaatctataatcaatgagtagtttacaaagtgaatttaaatcaaatactgtttctcatactctataaaccttagcacccagagcaaacacttgtataatatattatcagttagtatttttgatggataacacacaaattgtatgaaaatgtaatccacaattgaaaaatgaaaagtatcatgttctggacaactttcttaattagtatcttaaaatctgagtcattgaattgatttggcacatgtgatatgacaatgtttataaaataaaagctacaaaaatattgtggtgtttgtaatattaaaatttattacttgccttataaaataaacattcaaaaaatgaaaaattgttaaatcggtaagacttgcatgcaatgaatcaggttacagatttgtaaagttcattagaacataattcctcatactgaattgccttttaacagtagattcagctcaagtttctaaaaacaaatatta

SEQ ID NO: 720052 - DNA, 646 bp, Homo sapiens
aatttctgaaggaagatgatgtgctcattctacaggactttcagtgatattatacaaaacaacattgtgtttaaaacattgggtcaattgaaatatacatatatatatatacacacacacacacatacacayatatatatatataatgactgttgatattagaggaacaatctataatcaatgagtagtttacaaagtgaatttaaatcaaatactgtttctcatactctataaaccttagcacccagagcaaacacttgtataatatattatcagttagtatttttgatggataacacacaaattgtatgaaaatgtaatccacaattgaaaaatgaaaagtatcatgttctggacaactttcttaattagtatcttaaaatctgagtcattgaattgatttggcacatgtgatatgacaatgtttataaaataaaagctacaaaaatattgtggtgtttgtaatattaaaatttattacttgccttataaaataaacattcaaaaaatgaaaaattgttaaatcggtaagacttgcatgcaatgaatcaggttacagatttgtaaagttcattagaacataattcctcatactgaattgccttttaacagtagattcagctcaagtttctaaaaacaaatatta

SEQ ID NO: 720053 - DNA, 646 bp, Homo sapiens
aatttctgaaggaagatgatgtgctcattctacaggactttcagtgatattatacaaaacaacattgtgtttaaaacattgggtcaattgaaatatacatatatatatatacacacacacacacatacacatatatatatatataatgactgttgatattagaggaacaatctataatcaatgagtagtttacaaagtgaatttaaatcaaatactgtttctcatactctataaaccttagcacccagagcaaacacttgtataatatattatcagttagtatttttgatggataacayacaaattgtatgaaaatgtaatccacaattgaaaaatgaaaagtatcatgttctggacaactttcttaattagtatcttaaaatctgagtcattgaattgatttggcacatgtgatatgacaatgtttataaaataaaagctacaaaaatattgtggtgtttgtaatattaaaatttattacttgccttataaaataaacattcaaaaaatgaaaaattgttaaatcggtaagacttgcatgcaatgaatcaggttacagatttgtaaagttcattagaacataattcctcatactgaattgccttttaacagtagattcagctcaagtttctaaaaacaaatatta

SEQ ID NO: 720054 - DNA, 646 bp, Homo sapiens
aatttctgaaggaagatgatgtgctcattctacaggactttcagtgatattatacaaaacaacattgtgtttaaaacattgggtcaattgaaatatacatatatatatatacacacacacacacatacacatatatatatatataatgactgttgatattagaggaacaatctataatcaatgagtagtttacaaagtgaatttaaatcaaatactgtttctcatactctataaaccttagcacccagagcaaacacttgtataatatattatcagttagtatttttgatggataacacacaaattgtatgaaaatgtaatccacaattgaaaaatgaaaagtatcatgttctgkacaactttcttaattagtatcttaaaatctgagtcattgaattgatttggcacatgtgatatgacaatgtttataaaataaaagctacaaaaatattgtggtgtttgtaatattaaaatttattacttgccttataaaataaacattcaaaaaatgaaaaattgttaaatcggtaagacttgcatgcaatgaatcaggttacagatttgtaaagttcattagaacataattcctcatactgaattgccttttaacagtagattcagctcaagtttctaaaaacaaatatta

SEQ ID NO: 720055 - DNA, 592 bp, Homo sapiens
tattaatacatcatgaaattcaacaaagattcagtggcctttaaggaagaacaaagaatatgttcacacttcatcatacaatattatctatcctgtcattatttattttcaagcatcctggcaatagtgtcctttgtggatcaattataatagtttcaaattccatagatgagcttataccaaggtcagatgataataggttgctattgagttatgcctatattagaagggattatcaaaattggcacattttattaataacaattttgaattccttttattcatgaaaaataaaggaattacaggttgacctcaaccattttctagttcaagtaakatatgcatcataagacattttagaacaacatacaccatgagcttttaaaaagtattaaagatgtttggttaatgagagagtcagaagtctatgaactacctgtgtatatacaaacctctagaactctaaatgcccaaaggcaaagctcatctaactttctataagatccaataatcttaatatttgtttactgccaaagaggctaagagatgttgttatcagtttttggaagaccaatatgagatgctataggaa

SEQ ID NO: 720056 - DNA, 1100 bp, Homo sapiens
tatttgtattttcctatgtgcatctttaagcctatgttttgttctttaacttctgtctgataattctattatttaaattgtttttcttgtctgtcgatttgtttctggatgttgttatccttaacaatatactgattcttctctgtgtatgtgtgtctctctctccatgtctctctaaacacatgcacacaaactctctctctctctctcatgtatgctatattgcatacaaatgatttaccaaaataattgactttatttttaatacagacctacaagttagttactttcatattcacgttacagttgaggaaactgagactcaaagggaaaaatgacttggccaagtttatacacccaattagtgtcaggatagtttaagattaccttgttgtctactatggagataagttcctccagaagttttgcttatgcaagcattacccatatcagatcatcttaaatcagggtgaaaatatgagtatctgaacaactcagatttggtcccagacttcaagtatgctcaagagctggttcttgttttctccttcattggagtgtattaaccttatgattctagcttagaatagcaaaagtctctgggcagactctctatattttgtcagccatagactataatttctgtctttttcatctgagaattctatctgaataaaagttaacttggcttgcaaggaaaagttccccaaattcagtgacagttttcctctttgagctcccatcttctttaactcttatcatgtttttctggtagctctgttctgcttcttcgtttgacttccattgaattgggtaactttttttttcctcttcccgatgtacataaatgacttaaagtatatcaatatcactatattctctataacacacaaataactagcataaatacgttgcatttagacagtatagtctaaatacaagttccctgtcctattttgtaggtctttgaatgttgtttaaaaaaaatgcaactaagacatgttaaatttcactaagtttatttgaccaagaaaaaggtttgagaagtaggcaccatcccagaacaaagatygttcagagtgactccacatccagagtgg

SEQ ID NO: 720057 - DNA, 575 bp, Homo sapiens
tccttaggtttagcagtaaagacctgtaagatttcttctgttaggatcatctagccattccaaacatttctcttagatttgattctttcaagacaaatcaacccaataaaaatctcataaataaaggtgagctagctaccacatttggtgttctcatctgaccaaaccaaattttatgtatacattcaattctcaatccaacccagtctgtttgcctaarccattccagacaaacttccactttgaaggttttaaatgcataagtcagatagcaatccttcagttgccccagaggcacatcacgttctttgaatgcttcagtatagtcctcttcatttagcaatcagtgaggcaatacactggcatcatgatccctttttttaggaactctgtacaaaattccctttgaaaatataaattttggaaatgagtgatgagcaaaggggtttcattaacattatcacaatctcttgatatatctgcttgataatgtagcacctattatttggggccattaggaccttggcagaaattctggtaaatgtaaagaaaccacatttaacatccagttaatt

SEQ ID NO: 720058 - DNA, 1308 bp, Homo sapiens
tgactatctgtttttattaagcacatccatagaatgataaagacaaacaaaatagaaaaatatctaattttgaggaatgtattttaccaatggttttgaggcccagaaattggctgatttgcccaaagtcaaaaaatgaagttgaggcaaaactaccccaagacgatgtagcaactagaacacaattttttattttcagtccagtatgacattcrcagaacccctttttatacaatttctttgaaattctaacaatgcctgtgaagtaatgaaaggtatatcaaggtcaaaataaccacaacttgagatgtccaaaaactttttctttctttcaatggtgtctcatcattttaagtggtgctgctttctacagataaccacagtcaaatttcatggtttaacttaacattttgagataaaagataaggggattagagtgtaaactagaaatgattttcaagtgactgaacagagatgttcatatttttagggatccctttgcaaattttaaggatttaagttttgaggattttgagttgcaaatttggggatttaagaaaattgatacacaataaaaacaagttgctgctgcagtgtagtggtacaactgtcgttgcctattaagtggaactacttgaggggccaaatgtaccttcttgtcactctgtagacatcgccaggggaagaggaatagcacaatgtaaattaaaatagacacaaatcacacatagccggcagtgcaaatttctccccctattccttccaggggcaaagacaaaaaacattatctaaacttagatattgtcagttgacaacataagcacttacaaaagaaaacaaaaatcactgaaacactgctatgtaatttgaaactaaagagatagaagcagaaacaaaaatgatttttgttctcaaatggaatgtggatgaaaggtacaaataaccatgtcagatggcatgcctcaaataaatagccagaggtaggtagttacacttgcatcctttaaaacaaaactttatcattttgaagttagaaaaaagttttttgcactgtttagcttctcatcaataaaagattggctatttggatttcaaaaaattttttcgatacttagattttttaatttaaattacatcttaggaaaaacatagtgcttcagacattataaaggcgacatgtataattataacttcttagaattaagatgcgacctttctgtgaaaacagtaccaaaaccttttaagaataaatattttaaattccataaagaaatattttcatgtttgaaaatacagtatcaatttgaa

SEQ ID NO: 720059 - DNA, 1308 bp, Homo sapiens
tgactatctgtttttattaagcacatccatagaatgataaagacaaacaaaatagaaaaatatctaattttgaggaatgtattttaccaatggttttgaggcccagaaattggctgatttgcccaaagtcaaaaaatgaagttgaggcaaaactaccccaagacgatgtagcaactagaacacaattttttattttcagtccagtatgacattcacagaacccctttttatacaatttctttgaaattctaacaatgcctgtgaagtaatgaaaggtatatcaaggtcaaaataaccacaacttgagatgtccaaaaactttttctttctttcaatggtgtctcatcattttaagtggtgctgctttctacagataaccacagtcaaatttcatggtttaacttaacattttgagataaaagataaggggattagagtgtaaactagaaatgattttcaagtgactgaacagagatgttcatatttttagggatccctttgcaaattttaaggatttaagttttgaggattttgagttgcaaatttggggatttaagaaaattgatacacaataaaaacaagttgctgctgcagtgtagtggtacaactgtcgttgcctattaagtggaactacttgaggggccaaatgtaccttcttgtcactctgtagacatcgccaggggaagaggaatagcacaatgtaaattaaaatagacacaaatcacacatagccggcagtgcaaatttctccccctattccttccaggggcaaagacaaaaaacattatctaaacttagatattgtcagttgacaacataagcacttacaaaagaaaacaaaaatcactgaaacactgctatgtaatttgaaactaaagagatagaagcagaaacaaaaatgatttttgttctcaaatggaatgtggatgaaaggtacaaataacmatgtcagatggcatgcctcaaataaatagccagaggtaggtagttacacttgcatcctttaaaacaaaactttatcattttgaagttagaaaaaagttttttgcactgtttagcttctcatcaataaaagattggctatttggatttcaaaaaattttttcgatacttagattttttaatttaaattacatcttaggaaaaacatagtgcttcagacattataaaggcgacatgtataattataacttcttagaattaagatgcgacctttctgtgaaaacagtaccaaaaccttttaagaataaatattttaaattccataaagaaatattttcatgtttgaaaatacagtatcaatttgaa

SEQ ID NO: 720060 - DNA, 1278 bp, Homo sapiens
tgactaaaatataattatgttatccaaggttatttttctaattgaggcatttataaatatccatgtggtactttctagtttatgatacttttagggatctctacaaggatacttgcataatatatgtggagagatgtgttcaatcaagtagtcacctaagcagcagaagttgaattataaaaacctaatactgcttttgagattggatgtcaccgcattttacagataactgaaaataatcataactatcaaaagagtaaactaaatggggcatgaatgacttgccagagaattggaagtataaatttttcctacaaatgttagtatttattataatttacttgaaaaaaatggcaaaaaaaattccatgtggctcacaagagtttactgtatagagcttataataattaacttagaaacatttaagaatatgttagccagtaatatttgataaacaattaataaatggattatacattcacctcagtctttgtttttaaaatgtgagatacttcagataaatttttacaagtctcccatttaaatatatgttttatggatactgcctaaaaatcataagcaatattgataaaagtaggatattaaggaaattaatcattttcattcctaatgaaagtggcctgattttttaatacagaaaatttgatatccaaaactttgcatttaagtttggcatgttattagtcaacttgcttaacttcctgcactgttttctacatttgctttgctcttattaaactgaaatgataagcatcctgataaatgaatagttgcattgtatttatatttctctgctacatatgtaacaaatttggattaaccctgtctgtggcattcgtaaatttagaataacgctttattgtctgcattgggagaaacctttcaacctcttgtccatttggataatgaattattgctattcctgtgatatactggcactacaytccatccttcttacaatttcagcaagtaaagtgtgcaaagtttgtcatttgtcaaattttaatgaagtttggggaacaaaggaggtgtatcacaatagcattggagattacacaataatatagatatacaactttggtcttagactgcactgcagccatcctcacttgctggtactcattatacaggactctgacttgtatggttatcatgttctgaggccttttaaccataaatttatgactttgtttatcaatcaaaaggagtattcatatgttctactaaacagaaggcttttgtctcaagggaatacgc

SEQ ID NO: 720061 - DNA, 655 bp, Homo sapiens
gcaatttagtcttgtatttttattatttagcctagcacgagtaaagaggcttcctaacagaaaagaaaaggaaagaaaaccctgtaggagaagcggcatccatcaactggcgcttaatgaaattgtatgactctttaaattcaagtmctcatttttattaagaatatctaaaaaattcagaattatttatgtgcaaaaagatattcatggctttgcttttcacctaataaatagcagaaagctaaagcattttcttatcttagaaatatgcctataatagtatctatgaaaaactaatgctctgcgacagaaagagcagcacttctttgttttatgtgagaatgttcctgctcagagacaaagggtttttctgcttctttcattacaaatccttttattctatatggctgtggttggttgggcctattcattccataacttgcatccttattggggaagggcatgttactttcaatagaggtttgtgccactgctgcttaatcccccatcctcttccagcttaccaacacttaaatcaagctgtatctatctagtgcttatcactttcttgttcagtcttgcttttggatgaacatactaaatacactaatagcacactgagtatgttgtattttagaaatacatggtaacatgt

SEQ ID NO: 720062 - DNA, 655 bp, Homo sapiens
gcaatttagtcttgtatttttattatttagcctagcacgagtaaagaggcttcctaacagaaaagaaaaggaaagaaaaccctgtaggagaagcggcatccatcaactggcgcttaatgaaattgtatgactctttaaattcaagtactcatttttattaagaatatctaaaaaattcagaattatttatgtgcaaaaagatattcatggctttgcttttcacctaataaatagcagaaagctaaagcattttcttaycttagaaatatgcctataatagtatctatgaaaaactaatgctctgcgacagaaagagcagcacttctttgttttatgtgagaatgttcctgctcagagacaaagggtttttctgcttctttcattacaaatccttttattctatatggctgtggttggttgggcctattcattccataacttgcatccttattggggaagggcatgttactttcaatagaggtttgtgccactgctgcttaatcccccatcctcttccagcttaccaacacttaaatcaagctgtatctatctagtgcttatcactttcttgttcagtcttgcttttggatgaacatactaaatacactaatagcacactgagtatgttgtattttagaaatacatggtaacatgt

SEQ ID NO: 720063 - DNA, 684 bp, Homo sapiens
aaccaggaagcttttattttagcagctaaaaggaagagaaagatttactagcataatagcttctggacgagctactattaatagtagatttgattcctgctgtctgtcctgtattcatgcaaagcaaaatcttctataatcagaatatatcacatctctttggacaagatccaacttcttactgtgaaacatatggttataaaagcatggtggattattttgcttcctaagaggtgtttaaaaagctactttcacagataactcacttgaaagaatagttcactttttccataattaaatatacagtaaacagcctacctctattacttaaaagggcaactgtaaatgattagtacaatgtagcaatggatagaaaaagaagccctgtgtttaaaaatggtgygaacacctgtgtttctatgaaggcagcagacgttcacatacgcgtgcatcaagacatgaaagatgctttgtagcttcgtaaagggactgctttccatgaaatggtatcaacttaaattttaaaatgtattcaagagagaaaactttctatggtccacatgaggcttgaaaatatggaaaagatgcagtgagaactcaacacagtgatcactaattgggagttattttttcctagagtatttcttcaggatggtagaaacaaatgggtttagctgaaaagca

SEQ ID NO: 720064 - DNA, 1001 bp, Homo sapiens
ttctgggtcagatccagtacccccaccatctgccacacctactaccccttctccccagcacgatctcagctcactgcaacctccrcctccccggttcaaatgattctcctgcctcagcctcccaggtggctgggactgcaggtgtgtgccaccacgcccagctaatttctgtgttttttagtagagactgggtttcaccatgttggccaggctggtctcgaactcctgacctcaagtgatcctcctgccttggcctcccaaagtgatgggattacaggtgtgagccaccgcacccagccttcccagctcttgctctccatgtccctccagtgtctctgattagctgaactcagccagcatcctgtggataaggagcctgagaagtgtttgcccagacagcccatgagactcagcatagggcaggagaagggtggcgagtggatctaagagctagcaggcaaatgattgcacgaggccctaccctttatgtgaaggagggcagcagacagtttccttccttgacaacagggctgtagcagggaacaaaggggatctgataggaggaggacaagaacactaatggagtagagagaaaccataggtgaagaatggaccttccctgtgtcgtggtgcttcagtgttgctgggaacaaggcttgactctggtcataaagtagtacctttaatgcttccaactcatctagctcttgtagtgccagtaactcctgtatgccccattgcgagtagtctccagtatccattcagatcagctcccctgcactcatatgcagcccccctccattgttctcttcctgactttctgactctcttagttccagaggccccctctgctgacacaccacttcaggcctctcttgttaaggagatttaggacacttctctttggttttgcccccagagcaaaacctggcctgctcctggacctggttgcaaagaattttaactcatggtctcacatggagacctaggcattctaatta

SEQ ID NO: 720065 - DNA, 1001 bp, Homo sapiens
ttctgggtcagatccagtacccccaccatctgccacacctactaccccttctccccagcacgatctcagctcactgcaacctccacctccccggttcaaatgattctcctgcctcagcctcccaggtggctgggactgcaggtgtgtgccaccacgcccagctaatttytgtgttttttagtagagactgggtttcaccatgttggccaggctggtctcgaactcctgacctcaagtgatcctcctgccttggcctcccaaagtgatgggattacaggtgtgagccaccgcacccagccttcccagctcttgctctccatgtccctccagtgtctctgattagctgaactcagccagcatcctgtggataaggagcctgagaagtgtttgcccagacagcccatgagactcagcatagggcaggagaagggtggcgagtggatctaagagctagcaggcaaatgattgcacgaggccctaccctttatgtgaaggagggcagcagacagtttccttccttgacaacagggctgtagcagggaacaaaggggatctgataggaggaggacaagaacactaatggagtagagagaaaccataggtgaagaatggaccttccctgtgtcgtggtgcttcagtgttgctgggaacaaggcttgactctggtcataaagtagtacctttaatgcttccaactcatctagctcttgtagtgccagtaactcctgtatgccccattgcgagtagtctccagtatccattcagatcagctcccctgcactcatatgcagcccccctccattgttctcttcctgactttctgactctcttagttccagaggccccctctgctgacacaccacttcaggcctctcttgttaaggagatttaggacacttctctttggttttgcccccagagcaaaacctggcctgctcctggacctggttgcaaagaattttaactcatggtctcacatggagacctaggcattctaatta

SEQ ID NO: 720066 - DNA, 645 bp, Homo sapiens
tggtgtcaaggcgtgaggaaatgatggggactgtgaggatctgaggggacccgcctcatctgaaggggcacctgctcctcagctctggctctcccttgcccttcctccatgagggctccgtgttgcctgatctgttaattttttgcaaaacaagcaggaaattcagacttttatttgaaatytctcaaactctaaatgttggcttgaatttcttaaaacacaatgcactcagagtctaaagacttcagaaggccatatatggccactggctgccattttgagacccctgaattaggcgattctttgagaagaaaagaacctcctgacttcccacttacaggctttttagctttttttttccccccagaaacctcagtgggtgtttttttttttataacagaacactagactaggagttgggaggctggatatgccaactctccatttcctaacttcatgacccagggcaagcccttaatttcttacatccttggctttataaatctatcaattcataatatatatttcactactatctcacagattaaattcacccaactgatatttattgaaaatgtacttgagcatatcctattttatttaaccctcaagaagtctttatgaggtagatatttctaacatatg

SEQ ID NO: 720067 - DNA, 645 bp, Homo sapiens
tggtgtcaaggcgtgaggaaatgatggggactgtgaggatctgaggggacccgcctcatctgaaggggcacctgctcctcagctctggctctcccttgcccttcctccatgagggctccgtgttgcctgatctgttaattttttgcaaaacaagcaggaaattcagacttttatttgaaatctctcaaactctaaatgttggcttgaatttcttaaaacacaatgcactcagagtctaaagacttcagaaggccatatatggccactggctgccattttgagacccctgaattaggcgattctttgagaagaaaagaacctcctgacttcccacttacaggctttttagctttttttttccccccagaaacctcagtgggtgtttttttttttataacagaacactrgactaggagttgggaggctggatatgccaactctccatttcctaacttcatgacccagggcaagcccttaatttcttacatccttggctttataaatctatcaattcataatatatatttcactactatctcacagattaaattcacccaactgatatttattgaaaatgtacttgagcatatcctattttatttaaccctcaagaagtctttatgaggtagatatttctaacatatg

SEQ ID NO: 720068 - DNA, 1166 bp, Homo sapiens
ttttgtaaaacatttctaaggagttctgaggaccaagttttctttctatattttaagtgagatttgacttatgcccaattcttctggaacgcatcccctgaaatggatatttttattcattttaatagtactttatttatcttattttgttgacattgagtactatttgccaagcacyatggtaagcgcttcatttctgggtctcatttatcctcctgcagccctataaggtagatgctattatgggtatcttcaagttgccaacgaggacgctgaagcttaggtaggttaaataatttacaaaaactataatggcagcactaagagtccaatatagatctgccaatcccaagaacttgaacagctcctgagaatgaagaatgaacagcccttgatcttgaagatctgttttccaggctccaaaatctaaactgggctctatctacatctgccttcctgggccaaacatttataagcatcagtgagagaagattgcctggatttgtttactttgtggtcctgaattttcagacaagcgcaaattcccatgaaagaagaacagacaatagctgtatcccagtagatcatttccctgttaccacctgtgctgaatttgcatttcattcattcattcatttattcagtcagtcattcaacagatcctgttgaataccatgttcagagaaatgtgtggactaaaaggatgatgcagacccaagagttgtccttaaggagcttacagcagagtgggaattttaggtgcccagatggaaatttgtccatttgggagtagtgtggggtgggaaggaaagaattagttaagactaaaaaaaaaagttcttaaaacttcatcaccctttagccattgccctattgctcttctctcagccaacctttgtaaaagctttctgcattcactatttctcattctcacctccggtttactcgccatttcactgcttctgccccctccactactccagtagaattgctcttgccaaagttactagggacttgccagttgctaaattcatggaatacactctggtctaatcttatttggcctttctgctgcatttggcagtgctgattttgtactcttgtaaagttcttcctcccttggccttgcttactctcctgattctactcacactttttggaagttc

SEQ ID NO: 720069 - DNA, 1166 bp, Homo sapiens
ttttgtaaaacatttctaaggagttctgaggaccaagttttctttctatattttaagtgagatttgacttatgcccaattcttctggaacgcatcccctgaaatggatatttttattcattttaatagtactttatttatcttattttgttgacattgagtactatttgccaagcactatggtaagcgcttcatttctgggtctcatttatcctcctgcagccctataaggtagatgctattatgggtatcttcaagttgccaacgaggacgctgaagcttaggtaggttaaataatttacaaaaactataatggcagcactaagagtccaatatagatctgccaatcccaagaacttgaacagctcctgagaatgaagaatgaacagcccttgatcttgaagatctgttttccaggctccaaaatctaaactgggctctatctayatctgccttcctgggccaaacatttataagcatcagtgagagaagattgcctggatttgtttactttgtggtcctgaattttcagacaagcgcaaattcccatgaaagaagaacagacaatagctgtatcccagtagatcatttccctgttaccacctgtgctgaatttgcatttcattcattcattcatttattcagtcagtcattcaacagatcctgttgaataccatgttcagagaaatgtgtggactaaaaggatgatgcagacccaagagttgtccttaaggagcttacagcagagtgggaattttaggtgcccagatggaaatttgtccatttgggagtagtgtggggtgggaaggaaagaattagttaagactaaaaaaaaaagttcttaaaacttcatcaccctttagccattgccctattgctcttctctcagccaacctttgtaaaagctttctgcattcactatttctcattctcacctccggtttactcgccatttcactgcttctgccccctccactactccagtagaattgctcttgccaaagttactagggacttgccagttgctaaattcatggaatacactctggtctaatcttatttggcctttctgctgcatttggcagtgctgattttgtactcttgtaaagttcttcctcccttggccttgcttactctcctgattctactcacactttttggaagttc

SEQ ID NO: 720070 - DNA, 1166 bp, Homo sapiens
ttttgtaaaacatttctaaggagttctgaggaccaagttttctttctatattttaagtgagatttgacttatgcccaattcttctggaacgcatcccctgaaatggatatttttattcattttaatagtactttatttatcttattttgttgacattgagtactatttgccaagcactatggtaagcgcttcatttctgggtctcatttatcctcctgcagccctataaggtagatgctattatgggtatcttcaagttgccaacgaggacgctgaagcttaggtaggttaaataatttacaaaaactataatggcagcactaagagtccaatatagatctgccaatcccaagaacttgaacagctcctgagaatgaagaatgaacagcccttgatcttgaagatctgttttccaggctccaaaatctaaactgggctctatctacatctgccttcctgggccaaacatttataagcatcagtgagagaagattgcctggatttgtttactttgtggtcctgaattttcagacaagcgcaaattcccatgaaagaagaacagacaatagctgtatcccagtagatcatttccctgttaccacctgtgctgaatttgcatttcattcattcattcatttattcagtcagtcattcaacagatcctgttgaataccatgttcagagaaatgtgtggactaaaaggatgatgcagacccaagagttgtccttaaggagcttacagcagagtgggaattttaggtgcccagatggaaatttgtccatttgggagtagtgtggggtgggaaggaaagaattagttaagactaaaaraaaaagttcttaaaacttcatcaccctttagccattgccctattgctcttctctcagccaacctttgtaaaagctttctgcattcactatttctcattctcacctccggtttactcgccatttcactgcttctgccccctccactactccagtagaattgctcttgccaaagttactagggacttgccagttgctaaattcatggaatacactctggtctaatcttatttggcctttctgctgcatttggcagtgctgattttgtactcttgtaaagttcttcctcccttggccttgcttactctcctgattctactcacactttttggaagttc

SEQ ID NO: 720071 - DNA, 635 bp, Homo sapiens
ttttctatgcctatacatactgtttactatggacattttttctaccctactacctcattctttatttctttatttatttattttttagagttgaggtcttgctcacttacccaggctggagtgcagtggcacaatcactgcagccttgaactcctgggctcaagtgatccttctgcctcagcctcccatgtagctaggactatagtgtggcaccatacctggataattwaaaaaaattctttttttagagagaaggtcttgctatgctgctcaggctggtctcgaactcctggcctcaagtgattctcccacctcggcctctcaaatctctgggattataggtgtgagccacagtatctggcagctaccttattcttctaaattctgcattaaatttcattgtgtgactttaccgtggtttaacagttctatgctttatgaacattttggatatttctggttcatttctatccagaaaagacaaatcctatgttaaacacatgtatctttgcttacttgtgtgtctgtatctcatagctatagaacttatcccgcattgtcagactttcctccaaagtggttggcctgtctcaatagtgtttgagaatgcccttttccctagacttctagaaata

SEQ ID NO: 720072 - DNA, 1245 bp, Homo sapiens
gactatccagacaaggtgcattgtaacctgcatgtttccgttggggttagcagtagaactcagatagcttcatctcttgggaaatagatatcaaagaaagatccagagacagaaagctttagaaaaggaaagaacaggtaacctcagaagaaaactatgtgcaaaattaccaagatttccaaatttacattaatccatcgatagtggaaaaagcaatgactttcacgtacttgtgttgtattcataagggtcatgccatagcttcggatgtgactaattagggagaccaggtttatttgaggtttttattatttgagagtgaaactatagccagatgtaataaccatgttattaatgatcccaagatgcaatttttttcccatactcaaagtgctttgttatattagaagcaaggaagagcgttagttttcacttctacacaacaaggtttcataatctattataaaagcctgtagcaggctgggtatggtggctcacgcctgtaatcccagccctttaggatgccaaagcgggcggatcacttgtggtcaggagttcaaaccagcctagccaacatggtgaaaccccgtctctactaaaaaaaaaaacaaaaattagccgggctgttgtgggctgtagtgcacctgtagtcccagctgctcacgagtctgaggcaggagaattgcttgaacctgggaggcggaggttgcagtgagaygagatcgcaccatctcactccagcctgggtgacagagacaggctccagcaaaataaataataaataaataaataaagcctgaaacaataagcagaaatgaactagaatgggccaatgctacaagaaactaggaaacaaaaggaaactgcagaatcagcagaggcagacagcaacgcaaggtgtaaaatagaaactcccttgccacccaagtggatagaaaacagttttagacaaacatactttgtcattaatttaactcctttgaaagccaaaataagatgcctcaaacctctccttgggattggaagttgcgacttgagcaaaacttttgttttccctttttatagtttatatttgtgtgtgtccaatatcaactgcatctataattctgttattttgtattgtccgtatgcaccacagtgcacattcactttcccttccattgcttcttaaactttgcaatcatttggaggaaaccataaaaaataagattttgtaaatgtttttttcgaaatgccctgtgtaaa

SEQ ID NO: 720073 - DNA, 2308 bp, Homo sapiens
cagcctcagcctcccaaagtgctgagattataggcgtgagccaccgcgcccggcccctattagtattttataaaaatcattctgaggaagaattggaaaagagcgaaagtggaaacagaagggtattgcaattgtcctggtgaaagrtgatggggtcttggactatggtggtgaccgtaaagatagagaaatgtagacagattcaagagatacttagaaaatatatgtgttacagcttagtaatatggcttcttaattgggaattgtcaattatttgctagcctatgtaaaataccctctatacaaaagaatttagaaaggtgtcatagtggataagaacttaggctgtgattcagacagagatcatcatttactagccgggtgacctcagacaattcagctaaccactctgtgaaatagggataataatgtgtaactcataggattgctatgaggattaaagaaataatatgtgtataaactctgtttatgtatgtgtgtatgtctggcatatagtaagcattttaaaatgtcagctatttttaatattgatctataaacattagtctgattaaaatggaaaaagcttacgtgtgccccataataatctcttccctggcttaactgagctagttatcacaatgtaattgtgtgttataccttttacaactttcaaaccatatcgcattcattcttcaaaacctcacaacaaaactcaattcctccctgatttatttatttttaactttttttttttccaagacggggtcttgctctatcacccaggctggagtgcagtagtgcaatctcggctcactgcagcctctgcctcccgggtttaagcaattctcctacctcagtctcctgagtagctgggattacaggggcgtgccattatgcctggctaatttttgcatttttagtagagacagggttttaccatattggtcaggctgctcttgaactactaacctcaggtgatccacctgccttggccttccaaagtgctgggattataggcatgagccaccatgcccagcctcccccgattgattgattgattgattttatttttttgatacggagtttcattcttgttgcccaggctggagtgcaattgcacgatctcagctcaccgcaacctccgcctccctggttcaagcgattctcctgccgcaacctccctagtagctgggattataggcatgcgccaccatacccagctaattctgtatttttagtagagacagggtttctccaggttggtcaggctggtcttaaactcccgacttcaggtgatccaccggcctcggcctcccaaagtggtgggattacaggcgtgagccaccgcgcctgaccccccgatttatttttaaacccatcccactggtcactctgctcaatttggtaatttgttagcatttctaaatttagatccctaaggctataattagttttagcttgtctgtgagtccttttgtatttgtttttcgtgcatacttacctagcttccctaccttcagatgacaaagttctttctctgaggaaaaaattgtgggaacttctttatatgcttctgctcctaaggcgtgtggcattcaatgaatagcgttatttccctacccttttagggactttttgtttttcaatgtttttttcttctacatctgtgttctgcctttacctgaatgcttcctgaatggcaaacagatttcttttttaattgacacaagcgaagagtagaagaataaagagaagaaggtaggatttttttttttttagttttttttttttgagacggagtcttgctctgtcgcccaggctgcagtgcagtggagcgatcttggctcactgcaagctccgccttccgggttcactccattctcctgcctcagcctccccagtagctgggactacaggcgtccgccaccatgcctggctaatttttttgtatttttagtagagacggggtttcactctgttagccaggatggtctccatttcctgacctcgtgatctgtccacctcggccttccaaagtgctgggattacaggcgtgagccaccgcgcccggctcgaaggtaggattttttaggacttacaggtttagctgatgctggggtcgctctgcatgcaacttcagacaaagctaatgggtcagcagaggtaggcagggtcagggtggtggttgcattcacgggctttggagtcaggtgcctgggtttgcgttgatgctgtgtcccaggctagctctatggctttaagcaagttctttcaaccctcggacctctgggttatcatgggaccc

SEQ ID NO: 720074 - DNA, 1054 bp, Homo sapiens
tttttgctttattatgctcaagtataacaaacttaccgcttcccaaatttaattttgtttctttctcttaatgttaaaaattgccatctgacaaatgaatcatagtaaggattaacatcagtggtgatgaaggaacgacgccagtctacctataaaaggaaaattttaaaaggcaattactgagaaatacacaaattttgtttaaataagaattcctatgaatcaattatttactcttctaacttagaatcagatcaactattaaaaataattttccaagttccactattaaaagtatatcacaattactttaatttacttaaagtatatttttaagcatatacatatacatattaacaaacatatagaagctataataaattaagaagaaacatttaatcctacctttatgtattcctaaatattcaagttaaacttgggcttcttcatattctttgaataaagctcctttctactaattgttaatatgtcaatatacattctaattcaacaaatagtgaagtattcattgttatgagacccataggcaaygttaggttctagtctaacaataacagtactaattctttagtggcatacaggggaaatatattattctaaaattaggagttggtccaaatctcatataatcacacaaatatacagacatatctgggagatattgtgggtttggttctaaaccaccacaacaaaacaagtcacacaaattttttgatttcccaaggcatatataagttatgtttatactatattgaattatgttaagtgtgcaataaagttatatttaaaaagacaatgtatataccttaattttaaaatacatcattgctataaaatgctaataatcatctgagccttcagttgagttgtaatctttgtgctggtggagagtcttgcctcgatgacggctgctgactgatgagagaagcggctactgaaggttgtgatggctatggcaatttcttaaactaagacaacaatgaagtttgccacatccattgactcttcctttcacaaagatttctctgtagca

SEQ ID NO: 720075 - DNA, 1054 bp, Homo sapiens
tttttgctttattatgctcaagtataacaaacttaccgcttcccaaatttaattttgtttctttctcttaatgttaaaaattgccatctgacaaatgaatcatagtaaggattaacatcagtggtgatgaaggaacgacgccagtctacctataaaaggaaaattttaaaaggcaattactgagaaatacacaaattttgtttaaataagaattcctatgaatcaattatttactcttctaacttagaatcagatcaactattaaaaataattttccaagttccactattaaaagtatatcacaattactttaatttacttaaagtatatttttaagcatatacatatacatattaacaaacatatagaagctataataaattaagaagaaacatttaatcctacctttatgtattcctaaatattcaagttaaacttgggcttcttcatattctttgaataaagctcctttctactaattgttaatatgtcaatatacattctaattcaacaaatagtgaagtattcattgttatgagacccataggcaatgttaggttctagtctaacaataacagtactaattctttagtggcatacaggggaaatatattattctaaaattaggagttggtccaaatctcatataatcacacaaatatacagacatatctgggagatattgtgggtttggttctaaaccaccacaacaaaacaagtcacacaaattttttgatttcccaaggcatatataagttatgtttatactatattgaattatgttaagtgtgcaataaagttatatttaaaaagacaatgtatataccttaattttaaaatacatcattgctataaaatgctaataatcatctgagccttcagttgagttgtaatctttgtgctggtggagagtcttgcctcgatgacggctgctgactgatgagagaagyggctactgaaggttgtgatggctatggcaatttcttaaactaagacaacaatgaagtttgccacatccattgactcttcctttcacaaagatttctctgtagca

SEQ ID NO: 720076 - DNA, 1422 bp, Homo sapiens
tgtatttttagtagagacggggtttcaccatgttagccaggatggtctcgatctcctgacctcatgatctgcctgcctcggcctcccaaagtgctgggattacaggcttgagccaccgcgcctggccagaaagataattttttgctttgatactttaaaaaaatgatctagtacattttatgtgttgggcactgtgctagtactgggaatgcacatataaatcagaaaaatataaaacttcaaccaacataaatatcaaccactatcaaaccttttttcctttagctttatccttaattattatatcttctgttttaacactggtttcttcctcttcctcttcttcatctggaaaatcaggggggcaaccatacagctctatttctcttttcaacttatcagcacatgcctacaacgaatattagagataatgaagttcaaaatcaaggtagacacaatttcagttttttactgtttttattgccaactaaaattgactctgaaattttttgcaatatattgatacctatgtggctccactacagaaaactgaaacggaggctgggagcagtggctcacgcctataatcccagcaccttgggaggctgaggcaggcagatcacttgtcaggagttcgagaccagcctggccaacatgatgtctctactaaatataaaaattagctgggtgtggtagcacacgcctgtaatcccagctacttgggaggttgaggtgacaggatcacttaaaaccaagaggcacagggtgcagtgagccgagatcacatcactgcactctagcctgggcaacaaagcaagaatgagtcccatgtctcaaaaaaataaaattaaattaaaaaaaggtataaatcatgtacctcaaaattcactaatttataaagtagtattttacctaatttactcaaaaacatttattcaacacccagaatattcaatatagtatactatataccatatatattagatatataaagatgtaggaaacataatgtgttatcattttggataacattaataacaytgtttctcaatttaaagattactgtcaggaggggggagggatagcattaggagatatacctaatgtaaatgacgagttaatgggtgcagcacaccaatatggcacatgtatacacatgtaacaaagctgcacattgtgcacatgtaccccagaacttaaagtataataataaaaaataaataaaaacaaaaataaaatcccaccagcaagaaagaaagaaagaaagaaagatagattactgtcacatatactctattagttatcatcacaagcctaccaagtagataggataggctttaagtcagaaaacaaacagagatgaagtgatttacccaaggtcatacagctagcaaagttacagacttaaccttggactttcca

SEQ ID NO: 720077 - DNA, 622 bp, Homo sapiens
attactgtgcatttgtagagtctacactgaagagagatttcaaaattcacaaagaaaaaatgaatcacaaaaataggtccagaaatcgtactagcctcagatttctcaacaatccagaattaaagagaagactaatagagaaatgtcttcagaaatctgagtgcaagtaattttgagtctataaatttatacccaaactatcatttactaaagtagaaaaatgtattttcagaagtgcaaagacaaaaaaaatatctaacatgtacccttgtttgttagatatatgccaacaaaaggaggagttaaccaagaaagaggaatacgtgaagtccaaaaataggtggtcttacatagggctgagtagtagagagatcaatacagcaagcttgggaactactagatgatacaaattacaggaagacacagagaccaagagaaaggtcttggaagtcatggggtaaactggtagatgtgatttaatgatgtagaaaaaagcactgaaagtggttttataaatgtatttgtgcatcctagaagtagcagcaataagcaaatgaaaaacaaggtaatttactcmatgaaaaacaaaatatcacacaaagaaagtaaccatagtacagca

SEQ ID NO: 720078 - DNA, 1071 bp, Homo sapiens
tcaaattttcattaagaactcccacagcaaataaaaaaggggaaaaatgatgttagcatttctcattgttactttctaattatcatggtttgtaacatggggaaatgcctgtcttgctgcttcaatgagaacagatggtaaaatttttaagtaattggttattccaacttctatgagatgcatgatgttttattgtattgtttgtctggtttttgtttgcggaacatgtggagattgagatctttcgaacacacatcttttaatgcttaaattaagtaaaatgtgttagtctgacctaaactacatttacacttttctccctttgatatgatgatacttcaaagagaaattagtcctttacaaaaatataacattaacattaaaaattaaatatatagctttcaaacagcacaaaatttgctaatattgaaacgtacttttaaaaatgtataaataggggtagcatgtctttgacaaacactgattataacatgtgttccaaaatagttgttcacaccaattcagtgtgatgtgtcttttatctaagtcaaatgctatctaaaatataaggtcatatgtaagatattaagttttattaatggagcttcataagcatgacgtagataatggctcagaataataatttactattagatgagaaattcatcctctatattgttttcccaaaatatttcatctgacttcataaactctgcactgtaatatgcacttctgatatacaattttaaaagtattccataaagaatgattatttataaatttctagactgcattatattactgttagttgtaagttttgtttcttagggctttatgaaacaaarctttggagcaaaacaaacaaaacagaaaaagtggctgtgaactggtttcctttttatcttattgtgacgttttatagtatacatgtcccagaagctagagctttcttactatgggtactttgttctcagtttgatttcttgcaaatggtttaaaaacaaggcatagtggcagctgcttttgtgagcaaatgttttgattagggagagaaagcagctggaaatgcta

SEQ ID NO: 720079 - DNA, 676 bp, Homo sapiens
ggcctccttccctgtgtctttatctgttttcccttctcttcacctataaggacttgtcattagatttagggcctgccccagtccgggatgatctcatgttgattctaaattacatcttcagacacccctttttttttccatttaaggtcacatttacacgttccaaatggacatatcttttaggggctactattgaaacctgttataactctttttcttccccctgtcctggagaatgctagccataacttttctgctcatgctcaggtaggattcagccactttaagttaccaacaaggtctcaatttagtaactagaatatctaattctgggcttggcgcggtggctcacgcctgtaatcccagcactttgggaggccgaggygggcagatcatgaggtcaggagatcgaggccatcctggccaacatggtgaaaccccgtctctaataaaaatacaaaaacttagtcgggtgtggtgggacacacctgtagtcccaattactcaggaggctgaggcaggagaatcatttgaacctgagaggcggaggttgccatgagccaagatcacaccactgcactccagcctgggtgacagagtgagactctgtctcaaaaaaaaaaaaaaagaaatgaaaaaaaaagagaatatctacttctggggaactgatgaagct

SEQ ID NO: 720080 - DNA, 1205 bp, Homo sapiens
ctaacatccccatcaaatttgaaaagattctctataatgaccaagggaattacagtcctgtcactgggaagtttaactgctctattcctgggacatatgttttttcctaccatattacggtgagggggcgacctgctcgaatcagtctggtggcccagaataagaagcagttcaagtccagagaaactctctatggtcaggaaatagaccaggcctctctcctcgtcatcttgaaattaagtgcaggagaccaagtctggcttgaggtgtcaaaagattggaatggggtgtatgtcagtgctgaggatgacagcatttttactgggttccttttgtacccagaggaaacttctggaatttcaccataaatttgtgtcctgaatcctgtagtttagattcagtggaataagtcagttaacacagagtagtgctattaaaaaataacttccattttttcaagattataaaaataatacagaaaaatttaaaaagtcacctagtcaattattattcctattttaaggcacctcctttaaaaatatttatatgtatttcagagcatatgtctattaactttgtaggtagcttttaaaatttggcattattagcattagtcattccatttaagcataataattaatatttgtatacaaagtatgaatgggatttataattaataaatgtattcttgctaaatatcttctatatctcagatcaatgtgtgtcacttctttctgtgtgaattgcagagtatgacagcaagtttttgactctcttgggtgggttgccttctgacaaaatggagctattctcatgttagtttaattcatggagaygacacagaaagggtggcaaagactagctaaaggatatttaaaatttatcagtgtgtaaaggtttgcttagaaaacttatattatatggacttgtgtattgggtaaaatgtaagaaaaagttgatgatcatagtgaagatgaaatcattcatcaaattattgtgcttagaagaactgaatgtccccaaaagaatcaagaataaaatgaaatcattatggatctgaatttttgccttttcttcatgatagaacatttaattaggataaattctttgacatcattatcatcatttctataataattaattccagttattcagagataacattgctggagcaggtggggatttgggagttcatttgcaatgca

SEQ ID NO: 720081 - DNA, 1205 bp, Homo sapiens
ctaacatccccatcaaatttgaaaagattctctataatgaccaagggaattacagtcctgtcactgggaagtttaactgctctattcctgggacatatgttttttcctaccatattacggtgagggggcgacctgctcgaatcagtctggtggcccagaataagaagcagttcaagtccagagaaactctctatggtcaggaaatagaccaggcctctctcctcgtcatcttgaaattaagtgcaggagaccaagtctggcttgaggtgtcaaaagattggaatggggtgtatgtcagtgctgaggatgacagcatttttactgggttccttttgtacccagaggaaacttctggaatttcaccataaatttgtgtcctgaatcctgtagtttagattcagtggaataagtcagttaacacagagtagtgctattaaaaaataacttccattttttcaagattataaaaataatacagaaaaatttaaaaagtcacctagtcaattattattcctattttaaggcacctcctttaaaaatatttatatgtatttcagagcatatgtctattaactttgtaggtagcttttaaaatttggcattattagcattagtcattccatttaagcataataattaatatttgtatacaaagtatgaatgggatttataattaataaatgtattcttgctaaatatcttctatatctcagatcaatgtgtgtcacttctttctgtgtgaattgcagagtatgacagcaagtttttgactctcttgggtgggttgccttctgacaaaatggagctattctcatgttagtttaattcatggagatgacacagaaagggtggcaaagactagctaaaggatatttaaaatttatcagtgtgtaaaggtttgcttagaaaacttatattatatggacttgtgtattgggtaaaatgtaagaaaaagttgatgatcatagtgaagatgaaatcattcatcaaattattgtgcttagaagaactgaatgtccccaaaagaatcaagaataaaatgaaatcattatkgatctgaatttttgccttttcttcatgatagaacatttaattaggataaattctttgacatcattatcatcatttctataataattaattccagttattcagagataacattgctggagcaggtggggatttgggagttcatttgcaatgca

SEQ ID NO: 720082 - DNA, 1139 bp, Homo sapiens
  misc_feature 63, 94: n = A,T,C or G
tgagattctattatattaackgtttatagcccccttaaaggaactatgcaatgagattaggcntgtcacagaccattccaccaccagacatttntatcgactatgttggtgccctttcaataccaaattgatgagcaatcatggcagacaatcttattaagctagtttgcatatttatgaagactgtagcttaataaactgttacagggcaatgaaagtttatggagatcactagaaatgtcagaatagtactccaaagacgcagtaaaacttagtaattttcttttaaatcccaacccatctaaaataaaaaccaggggattttttagtatccctggctcattcataacaaaattcaattttctaatgtagtgtcctgtttacctaatattgagttgactatattgaagtcttgccatgggcaagggtataggtaacaaatttaagggatttaagtttaatttcatgaaagttgacttctactctctttaactatacatataaaagttgatgaatagttaggcatagagagaaaggggaaatggtagctaagattataaacaatacaccataccaataaaactgtaacgatactactcctaaagctaaaatattatcacactgtggtttggaactagatataaatcagatcctcttgttttaagcagatcatttgtcagcttagagtttatctctacagtggtgactattattgctccaacaaaaattatagtaaaacttctaagtgtatatcaactgaaagtaactgatacatttataatgataatagcctttaaaagcaagattctgtaagctacttatggatctccagttgtagcctaatcttttttcttccagtgacggcatccaccaacttttcaccattcctgattatgttagtctcctccctctgtgaagcacggaacgctgggagaacctggacccatttttacggctgagaaagcatggaaaagaaaaatacctcaagctgtactgtaattccagctcatcacagaatagagagttattaaaatgatttctgctaaaatcaaattttaaaatgtttctaaaatgtattttttgtccttttaagtaactgacaaacatagaagttgcccctgagaaaattacagtggaat

SEQ ID NO: 720083 - DNA, 1139 bp, Homo sapiens
  misc_feature 63, 94: n = A,T,C or G
tgagattctattatattaactgtttatagcccccttaaaggaactatgcaatgagattaggcntgtcacagaccattccaccaccagacatttntatcgactatgttggtgccctttcaataccaaattgatgagcaatcatggcagacaatcttattaagctagtttgcatatttatgaagactgtagcttaataaactgttacagggcaatgaaagtttatggagatcactagaaatgtcagaatagtactccaaagacgcagtaaaacttagtaattttcttttaaatcccaacccatctaaaataaaaaccaggggattttttagtatccctggctcattcataacaaaattcaattttctaatgtagtgtcctgtttacctaatattgagttgactatattgaagtcttgccatgggcaagggtataggtaacaaatttaagggatttaagtttaatttcatgaaagttgamttctactctctttaactatacatataaaagttgatgaatagttaggcatagagagaaaggggaaatggtagctaagattataaacaatacaccataccaataaaactgtaacgatactactcctaaagctaaaatattatcacactgtggtttggaactagatataaatcagatcctcttgttttaagcagatcatttgtcagcttagagtttatctctacagtggtgactattattgctccaacaaaaattatagtaaaacttctaagtgtatatcaactgaaagtaactgatacatttataatgataatagcctttaaaagcaagattctgtaagctacttatggatctccagttgtagcctaatcttttttcttccagtgacggcatccaccaacttttcaccattcctgattatgttagtctcctccctctgtgaagcacggaacgctgggagaacctggacccatttttacggctgagaaagcatggaaaagaaaaatacctcaagctgtactgtaattccagctcatcacagaatagagagttattaaaatgatttctgctaaaatcaaattttaaaatgtttctaaaatgtattttttgtccttttaagtaactgacaaacatagaagttgcccctgagaaaattacagtggaat

SEQ ID NO: 720084 - DNA, 488 bp, Homo sapiens
aaaattagaagtaaattgagcccatcttgcttagcacagcatccaaaaacatgatttaaggatttaatattcayccctgaccagagatcagtgattggtgttaaatttgttataaaaatggggatgaagaacaaattaaaacacagtctcaataacaatcagatgctaatggatgggggccgggatgagttttcagaaatgaccttgatttctcatgagacactgtagcacctactccacccctccaccctcccatcccagccagcccattcctgggcaggcactggacagacccagactgcctgagcctgcaccagtctagactctggaaccagccctgggaggctgcatgggacaaccctgcctctgtcactccatcagcgtcactaagcttccctctaaggtccccaaatgcctctcacgtgcctagcatttagctgctgcaccgagcatgctcactgacaaacttttggccaagaagagccttt

SEQ ID NO: 720085 - DNA, 684 bp, Homo sapiens
tgttttgtagatgcctcatgttaaatttagatgatgaattcatcttagactaattatactatttcagtgctatgatgaaggtattaatatatagatatcctaaaatcaaaaagcttatttttatacttatataaaatataaaaattttaaagcttatatttgtcggttcattcacttttaattccattttttcaytaactctaattttttgaagggtgttttaatctcacctttttcttttaggtgtttttgtggtcgcttggtcaagcaacatgcttgttttactgcaagtcttgccatgaaatactcagatgtgaaattgggtgaccattttaatcaggcaatagaagaatggtctgtggaaaagcatacagaacagagcccaacggatgcttatggagtcataaattttcaagggggttctcattcctacagagctaaggtatgtcacatattggatttttcttcatttatgttgttatttaaataataaacatcacaatttgtgtagcaatattgacaaaaagttggtctcagtaatttatttgtatattttaaagtacaaaggtgcatacaaatatagaattgtatctttctggtggattgaacctttcatcattataaaatgtgttttgtttcttgtcatttttcttgacatggtttgctttttctgcaatcagtgta

SEQ ID NO: 720086 - DNA, 684 bp, Homo sapiens
tgttttgtagatgcctcatgttaaatttagatgatgaattcatcttagactaattatactatttcagtgctatgatgaaggtattaatatatagatatcctaaaatcaaaaagcttatttttatacttatataaaatataaaaattttaaagcttatatttgtcggttcattcacttttaattccattttttcattaactctaattttttgaagggtsttttaatctcacctttttcttttaggtgtttttgtggtcgcttggtcaagcaacatgcttgttttactgcaagtcttgccatgaaatactcagatgtgaaattgggtgaccattttaatcaggcaatagaagaatggtctgtggaaaagcatacagaacagagcccaacggatgcttatggagtcataaattttcaagggggttctcattcctacagagctaaggtatgtcacatattggatttttcttcatttatgttgttatttaaataataaacatcacaatttgtgtagcaatattgacaaaaagttggtctcagtaatttatttgtatattttaaagtacaaaggtgcatacaaatatagaattgtatctttctggtggattgaacctttcatcattataaaatgtgttttgtttcttgtcatttttcttgacatggtttgctttttctgcaatcagtgta

SEQ ID NO: 720087 - DNA, 1018 bp, Homo sapiens
taagagcaatgcccagcataatggatgcagtgcatcgtttgaattggcaaagccctcattagtcacatttaaaaaaaaaaaaaactgttttctgattttcagatggagatccacagcaaatgatgggatgctacaaatcagctctaataactgaagacaaattacaaatataggaaattaatgattaggagaaatcaaaagggaaataaattacagaaaactgaaaaatgtaataatgcaaatcaggggtttccctgaatttatgtgtaaaagcaatgtctacagaatttgcagcaaaatgaagcccatcttctttggttttggtttgactgttaaaaatctgaaacttgttttttcttttttgcaattgccttcaataagactggagtcatgactacctttttgcttttgcttttgcttttttttttttttttttttggcaaagtctacaaaaatgagtatttgaaaactttaggacaggtttcaagaggtaggctagtgaccatgcaacttgtaggaaaatacatgttgtcattattgacctgagaaatgcaagggtacaagtgacaagattccatttggttggtgctactactgaacacaagggaagtggggccctaacctcagctccacaagttaaaggccaccctctggcctccttcatccatttctccctactagacaaaaaggacatgtccacccagagcctgtgtccccacttctgggatctcggctcactgcaacttctgcctccagggttcaagcgattctcctgcctcagcctccaatgtagctgggattaaaggcacccgccatgatgcctggctaatttttgtattttagtagagaygagatttcaccatgttggccaggctggtctcaagctcctgaccttaagcgatcctcccgcctcagcctcacaaagtgctgggattacaggcatgagccaccacgcctggcaatcctacttctaaggctaattgcagcctctctcttgggtcaagggcagactgctcta

SEQ ID NO: 720088 - DNA, 1082 bp, Homo sapiens
  misc_feature 651, 652, 653, 654, 655, 656, 657, 658, 659, 660, 661, 662,663, 664, 665, 666, 667, 668, 669, 670, 671, 672, 673, 674,675, 676, 677, 678, 679, 680, 681, 682, 683, 684, 685, 686,687, 688, 689, 690, 691, 692, 693, 694, 695, 696, 697: n = A,T,C or G
  misc_feature 698, 699, 700, 701, 702, 703, 704, 705, 706, 707, 708, 709,710, 711, 712, 713, 714, 715, 716, 717, 718, 719, 720, 721,722, 723, 724, 725, 726, 727, 728, 729, 730, 731, 732, 733,734, 735, 736, 737, 738, 739, 740, 741, 742, 743, 744: n = A,T,C or G
  misc_feature 745, 746, 747, 748, 749, 750: n = A,T,C or G
gccagatttatgcttctctctacccaaacatcttagtgtatagtaaagagtaacagagtagcattgccacagtatatctcgcctccagccacagggcggttttctcctatctcagaatagaactaatgtacgattgggttttacaatgagacattccgttcccaggggcacataggagacggaggccttcctcttatctcaactgcaagaagcctttctcttttactaatcctcctcagcacagatcctttactggtgttgggctgtgrgaccgtcaggtctttcccttcccacaaggccatatctcaggctgtctcagtgggcagaaaccttggtcaatacccaggctttcttgggcagaggtccctgcggctttctgcagtgcgttttgcccctggttagtagagaatggagaatggtgatgacttttaccaggcatactgcctgcaaacatattattaacaaggcataacttgcacagccctagatcccttaaaccttgattcaatacagcacatgtttctgtgagcacagggttggggcttaagttacagattaacagcatctcaaagcagaacaattttttttagtacagttcaaaatggagtttcttatgtcttccttttctacatagacacaataacggtctgnnnnnnnnnnnnnnnnnnnnnnnnnnnnnnnnnnnnnnnnnnnnnnnnnnnnnnnnnnnnnnnnnnnnnnnnnnnnnnnnnnnnnnnnnnnnnnnnnnnnattcatttagtaacaatcttacgaagtggatgctattattcctcccattttacacattgagctgcagaggtgaatgtgcagaggttaagctgcttggctagtgtaataagtgaaggcccttactaataaatgtctcatctccatgtccgttatcggcatctgcattgcagctgccgaaatgagcttcctaagtcaaatgagagctctgcttccctagttaagctgtcgtctgtagtcaacaggcgttctccagcaaggtatatggattatccttcatcatctacatcctgcctacctgacccagcctcagatcctgccactgatgccccatt

SEQ ID NO: 720089 - DNA, 615 bp, Homo sapiens
tgctatcagatcataagccctattacatacatgtttgtaaagtaacactagttcacgtgttccctgcctgccccaaccacaaggagaaaaccaagctccgtagtaaagagcagaagacttttgacaagcagccagacctcctgaataatttctaacacagaatcttccctaggcagcatgctatccctatccagagatcaaaacggatctaggtcatttgaggaagtagccaggcaaaggatattgaagagctgcagtaaaacggaatgttaattatgcagctaggaaggacaattttttatagtaaaaaaaaaaaagcaaattatrtatagactagatagatacatacatacaaatgtgcatatgtatgtacctatatgtgtatatcatatgtataagaaattatttaattttaaattgaggatttttttttcaacagcaagagaaggagctacctgtaaactaaaatacctgaaaacttacagttcaggatgtgtaaccagcaggaattacgatcacttttctctttcctcatcacctccccttgccaaaaactatgtatgtacacatagacataaatatatcatttattacttatagaataatgcaattgaa

SEQ ID NO: 720090 - DNA, 679 bp, Homo sapiens
tttgtgtagcactcgagtcaaatatttctgccctatctcctaggaaatatagaacaaatcgaaattgaaaaaatgtaaggaagtcatcctgaatggttgctaaagaaacaaaataaagcatcaggttttcctaaccatggattccacggccgacaatttgaacagtaaggccaaccttggccatgtgtggcccagagccggcccgcacctgtrcaggtgtggctcatattccattcttttctgttggttttggttaacatttacatcctccactgcaggtgagaggctgactggagggtgctttcctggcagccaaggcaaatggccatggaccagatggcaccgggtgtgtgtggaagggccggcggtccttctctcctcttctgcggagtcctcggtgttgcaggcctggagtgcagcagtggaggcagaagccagactacatttccaagaccctccttctgccagctgcttctgctgggggtctgcctgcgagaggcactgatagaaggtgaaagcaggaagaagaaatgagcctctgtggcctccggccccttgaagggacctctggccacggcagcagccagagggtgtgggctcctggttcccgatcaggaccccgcgcagccccatcagcacagtggcaaagcctccaacaggccagtgccgtgctggccgg

SEQ ID NO: 720091 - DNA, 679 bp, Homo sapiens
tttgtgtagcactcgagtcaaatatttctgccctatctcctaggaaatatagaacaaatcgaaattgaaaaaatgtaaggaagtcatcctgaatggttgctaaagaaacaaaataaagcatcaggttttcctaaccatggattccacggccgacaatttgaacagtaaggccaaccttggccatgtgtggcccagagccggcccgcacctgtgcaggtgtggctcatattccattcttttctgttggttttggttaacatttacatcctccactgcaggtgagaggctgactggagggtgctttcctggcagccaaggcaaatggccatggaccagatggcaccgggtgtgtgtggaagggccggcggtccttctcycctcttctgcggagtcctcggtgttgcaggcctggagtgcagcagtggaggcagaagccagactacatttccaagaccctccttctgccagctgcttctgctgggggtctgcctgcgagaggcactgatagaaggtgaaagcaggaagaagaaatgagcctctgtggcctccggccccttgaagggacctctggccacggcagcagccagagggtgtgggctcctggttcccgatcaggaccccgcgcagccccatcagcacagtggcaaagcctccaacaggccagtgccgtgctggccgg

SEQ ID NO: 720092 - DNA, 562 bp, Homo sapiens
taacaataagcagtttgcagtgaggactgtactgggtaatattgggaatcattaatttaaagatggatacatttcgctggactaaatcaaggcgtgtttctccttttttctggcgtgcacctgctgtgataatcactagattggagtttgcagtgaccaggtaatctgaggaaagattagaataaacaatcgattatgaaagaaaacatctggcatttaagtatacttcctgttcacttcaatcaccacactatgtttaccaaagagtgggttcccttaaatcttctagtatgcctagactactttttaatttcaggaaattagcactaagtttcccttgtacattttttttaataataawaaaaaaaaaaaaaacgtaagtcatgtgcagtggctcacccctgtaatcccagcactttgggaggtcgaggtgggtccatcaaatgaggttaggagttcaggaccagactggccaacatggcaaaaccccatctctactaaaaatacaaaaattagccaggcacagtggcggatgcctgtagtcccagctacaaggagactg

SEQ ID NO: 720093 - DNA, 1483 bp, Homo sapiens
gtgatattaaggaatcacagttatttagctgtgataacggcctggaggttatgttttataaaattggcccttatcaattagagacgcataatgtgatggcccaatacacggaattttctttaaaatatggccaggtgcagtggcttatgcctgtaatcccagcactttgggaggtggaggcgggtgcatcacctgaggtcaggagttcaagaccagcctggccaatgtgggaaatcccatctctactaaaaatacaaaaattagctgggtatggtggtgcatgcctgtaatcccagcttcttgggaggctgaggcaggagaatcttagagcctgggaggcagagtttgcagtgagccaagattgtgccactgcactcccgcctgtgcaacacagcaaaaactctgtctccagaataaaataaaataaataaaatatatacattgataaaatggtgacaattgttgaggcttgctgatgggtaagtaggagttcattatactagtttctctgtttttgaatgtatttgaaaatttttataatttataagaaaaagtttaaaattttttataagtttttaaaactatattgaaacacattattattattattattattatyattattatcattattattaaaaaaaggatttaaaggtaacaatcaggttaacattcacttgtggtagccaggtatatagtatgtgttcattgatgtaatgattctcctcctgggatattggagagaatactcacactaattgtcactaatgatactctacgaagccaaaaagagccaaggggaaggattgattgaaaggaggtggatgaacacccgaaaagcaggaggcatgttgatagtgtaaggttccgagaaggagttggggtgggatcctgagtcaaggtgaaggaaggggcccatggagacaggggtacatgtgttggtgtctgaaagaggagagacatcttagagacatctctaaatctccgataattagaagtgaggtcaaatgcaagaagggtgggggatcggcaattagaaaattggagtttgaagagatttgacaaagttattgagggggatggggagtgtgtttactggaggaacacagtagaattgcaaggaagttacaatattagcaagatttgttattgaaacaatggaccacggaccttaagctggatatgttgagaacaattgaaggaaaatgcccatggactaagaggaaaaagaggtgttgttagtgtggctaccctgatgatgttgaagagatagaactacctccagctgggtggggcatgttggctctcgcctgtaatcccagcactttgggggtcataggtgggggaataacgttaggtcgggagctctagaccagcatgaccaacatggagaaaaccccgtctctactaaaaatacaaaattagctgggtgtggtggcacatgcctgtaatcccagctacttgggaggctgaggcaggagaa

SEQ ID NO: 720094 - DNA, 615 bp, Homo sapiens
cagtagttcacaaagtatagtccctggacagcagcatcagcgtcactgggagcttgttagaagtgcaaattgttaggctccacccagacctgctgaattatgaaatctgggggttgggtccaggaaactgtgtttgttaagttctccaggtgattctgatgcacactgaattttgagaaccactgtcacacattcttggacatacgttcacaggcacacacactcatattcaggtaaaatcaagttaaaataaatattaaataaaaaagaagccatataagagctgcctgtggatggtgtttgggagaaggaggtagtgagccgtgctaagaagaggcttgggaggaaggagtgagatatccttgccattgcaaggataagtgtcaggcctcttagttcagtggaatttctctcctcttcctccagagttggtgctgtgagccccactatagcaactggaggaggagcaggaaatgtgggtcttaaggaaataactcaatatttattaggattctttccattgtaaataaragaaacccatcacaaacagttttggtcaaaaatgaacacttatcggcttacaaaatttaaaagtccagaggtagattggcttca

SEQ ID NO: 720095 - DNA, 601 bp, Homo sapiens
aaccaggcttctgtttcaaagcatcctggggggctgtaaagattcctgggcccatcccatggtatacctctgtcttaagacttctataatctctctcagcaatattttacaaatttcactatagagctcctttatatctttaaacaaatttgttcatattttatgctttttgatgctattttaaatggtattgtttttctgttgatatatagatacttttccagtttttctgttagtatacagaaataccataaattatttttactactacccttgtatcttgtcccttgctaaattcactctttgtcctagcaatctttttgtatatttcattagatcttgtacatacacaattacagtgtctgtaaacaaaggcagttgtacttcttcctttccaatcattatgtcttttatttattttttctygtcttatggcattgattacaaagttgaatagaaaagtcataagagtgtacatccttgcctttttcctgatttacttggtcataatgcattatgattacctttttaaaaataatattcagttctgttttctagtgtttttctaaagctttctgtatctatgtgctcattcacgagg

SEQ ID NO: 720096 - DNA, 3546 bp, Homo sapiens
  misc_feature 524, 525, 526, 527, 528, 529, 530, 531, 532, 533, 534, 535,536, 537, 538, 539, 540, 541, 542, 543, 544, 545, 546, 547,548, 549, 550, 551, 552, 553, 554, 555, 556, 557, 558, 559,560, 561, 562, 563, 564, 565, 566, 567, 568, 569, 570: n = A,T,C or G
  misc_feature 571, 572, 573, 574, 575, 576, 577, 578, 579, 580, 581, 582,583, 584, 585, 586, 587, 588, 589, 590, 591, 592, 593, 594,595, 596, 597, 598, 599, 600, 601, 602, 603, 604, 605, 606,607, 608, 609, 610, 611, 612, 613, 614, 615, 616, 617: n = A,T,C or G
  misc_feature 618, 619, 620, 621, 622, 623: n = A,T,C or G
gttactcaacgcccccgcccccagcctcagttttcttaattattaaatgagaataagatctgccccaaatgtcaccttattagagagttcttccttctctccatgtgccccatcccaatcacaactttcttcctccctctaaaagtagccaccattctgactgttaggaagaaaccctcgacattctttgtcttcatcaccgagctgcccctcaactatggttgagtcttacccattgttttaaattcgatgtcttttaagtctcttttcatttatagattcctcctctattcctttctttttcttatcgttttgttattattgttgttgaagaactcaggtcatttacttgtagtttcccacagtctagattttgctgattgcaggctcattgtgcagttcagcatgttcctgtgtatttactgccaattggcagctggatggaaaggcttaattagatctgagttcaattcctttggcagtgttattggtggtgatgtgttcttttatccgaaggcacatannnnnnnnnnnnnnnnnnnnnnnnnnnnnnnnnnnnnnnnnnnnnnnnnnnnnnnnnnnnnnnnnnnnnnnnnnnnnnnnnnnnnnnnnnnnnnnnnnnntcaaattcagttttctttactgtaccacaccagtcactaccatcttagctgagacacttgccttttttgggtgaagacagcatgtcatcagcataatgtcagcactctgtaacctttatttcctgcatggccataccctgcttttgggactgagagccggctacgacgtatacctgtaataggaataaagatagaacgttaatttccttgtaggtttcttggttcctttacaactttttaaatttagcttgaatttagttttgttatgaattaattattccattgtttgttcacttgttcatttttaaaaatctattaagcaaatgattattgaacatctcctttgtacatctcaggcttagaataagattgggactgagccatcacattattcacagttagtgagggaaacagataagaaattaattgttataatagttaagacaaaagtacagacttcatcgtgaaatatttggaccaaacgtaagaatcaaacattaatgctgctgacagattgggagtacaatagtgtatatgggaagccaggctggggggctgatgcaggaaatgataaccaaattgttctctgtcctgagccaggttgaaggacacattgaaatagccaggagtgttttgtagcctgttcagtgcaggcctaggttggattatcagaacaatggactgacccttccccaaatttaatttaaaacatttaaatcagattttctacaaagttttctattaaaaattaataaaaaatttaaaataacacaaatatctatatgtagagagagatgattgtgtttaaattcattattaacatctgtaatgaggatgatttatggtcactacaataaatgctttattcagagatgtttttggtcttgttcgtggctgtgtctggcccagaataggtactcaatacatctttattggattttaatacatttaaagggatttaaaaattaaatatagatagatggcaatgattgagtttgccacagaagtgtttttaatatattcatatggttctgacctaagtatcctatttttaaaaattataaactaagcatttttcaaatagacaaagaagctgatgaatatttgtattattacaagttaaatgtggattgttatataattatagaatgttaagaatggaagagctttacaaattatctagtcccaccctaaaattaatgtaaatagttagataatatttttatatgactcaaaaatgtttaaaaagatatacattgaaaaaaatctcactcccatcccatgtctttctactccattccctttccggttctctatagacagtcacttttattagtttcttatgtatctttccaggatttctttatgcaaatgcgagtatatgttctcatttattctcttccttccacagaaggtggcatactatatacactactctgcatctcagtgtttttacttaacaatgcatcttggcaatcttttcataccactacgtagctccctcttcttttttttttttttttcacaatgcctattagtctattatgtgttgtatcatagcttcttaaatcaccctttgtaggggaatgatttatgatagccagtctttggctatcataaacagtgctgcaagtgaataaccttgtaaatgcattgtttcctctgtatgctgatattatttataggaccagttcccagtggtaggattgccaggtcaacggaaatgcatttgtaattttgrtggcaaatttcctccatagcagtcccgtcattttataggtgaggaaactgaggcattggtagttaagtcaaccactgggagtggcaaagccaggacatatatccaggaggcatttctagaccaagtctgggtcaggtgcctttcctccatgcccctacactagcctataccttccctggcagagccttcatcataggttttgtaactgttggcttactttcctgtctttcttctacactataagttctctgagtgagggcagggcccatgtctacatgctcaccattgtaggtctaatacctagcacaggggctagtacagagttggtgcttgataaatatttgttgaataaatggagacaagcgaagccttctattcatagtccagtactcattatattccatctcacacctttacactcaacgtaaaaaaacaaacaaacaaaaacataccagccagacaaataaatgtaggatatggagagatatctatttagagctgttcatgtgaaaaagatttggggtatttagggttcttatgaaaagatttggtactcagctgtccaaaaatctcatgtaaaacaaggtttcattaatggaaatgctgtttcaagaacaaaggacgtaataattccgacagctgtctctgaggttttaagtagtataatcctgggtgttgcatcctaagaggcttggaggtgaagaagagaaccaacaatggaaggtgatcaggcttgtgagcaatctgaatttctaccaagtactctctgtagtccaaaatagacattagtggcctctctttatagatgagaaatctgaggaccagggaacttaaatatttctaagagtcaaacattaagtagttgaatttggattcaaatctggattagcttcaaaccatagtctgtcctcttactccctgtactcgttgtctttccctacattgttcacaatgggaaagggactcttaataggtctggccaggctcctgttggttcagggctagattggtttgaatctagtagtcctcacaaccgagtgagcaggatagatggggcctaacaggaaagtcttcagacaaagcaaagtttgaatggctgacatctgtctaaaatgccattgttttaaaaagtgaattgtgcacgagttgtgcaaagcttggaaacctattgtcatacattta

SEQ ID NO: 720097 - DNA, 590 bp, Homo sapiens
agattctcctgccttagcctcccgagtagctgggattacaggcatgcgccaccatgcccggctaattttatatttttagtagagacagggttgagatggggtttctccatgttggtcaggctggtctcgaactcctgagctcaggtgatccgcctgcctcagcctcccaaagtgctgggattataggcgtgagccactgtacccggccttgtagttttcatcatataagtcctgtgcatgttttgttagatttcttttttcaaacaatcataagtggtatatatttttggtgaggacacgttcatcactaataatttttatatattttttgtgtatcctttgactctgttgaactcagttattggtttcagggcttttttttggatagattatactgatttttcagatatcaaaatagccttgcatttytggaatgaatcccacttggtcaagctgcatatttctttttatatgttttgaattataattgctgctattttgttaaggagttttgcatctatatgcatgtagatatccttttttgttctgttcttgtttggtttgagataggttgatactcactttttaaa

SEQ ID NO: 720098 - DNA, 1446 bp, Homo sapiens
tagaatagtcttacgatataatctgtgattccagtgatgacagtwttgtaatgaattataataaatgatatattgaattgtaatgaaacacttaaaacaagattatggcattatttagattacatataatcttagctataatatttttgtgtttatgactcacaatcttgaattactacagattactatttttgatttaaggaaaaagagcagagatataattattctgaaggagatagtattctctaatagaaccataaagatctattgtggtattaggatagtccctgggttattgtaaagagattccaaagtatactgagttaataagttctgatgtagcactttaggatgactttaattaacaatattatatagtttcaaatagctagaaggcagctatttaatgttccaaacacaaagaaatgataaatgtttaacatgatagatatgataattatatactatatatatcacgacatcgctacgtgcctgataattatgtataattatggtgaattttaaaaatttaaacatttaaatttttaaaaaatggcatctcaggctttttgagcaactctgctccgccagatcattcaagggcttaagagtcctccattgcattgctcctgtctatacctgggccattgacaccttcatgtgcagaagtgcgcacaaaaacggacctccaaaaaaggtattttttaaagcaaataatgtaagacgtgtaggtgtgactttcactcatgttccattgtcaaggtcttgagcatatggtacaccttcaagggaagatgtaaaacacttagcctataattaggtgattatgggaaaaggtggcaaaagttatggaaacaactagcattctactaaaagagagattgttcatttgccttctctctttataaaaagctattcaatgggaggccaaggcgggcggataacaaggtcgggagatcgagaccatcctggctaacacggtgaaaccccatctctactaaaaatacaaaaaagttagccaagcgtggtggcgggcgcctgtagtcccagctactcgggaggctgaggcaggagaatggcatgaacccgggaggtggagcttgcagtgagccgagatcacgccactgaactccagcctgggcgacagagtgagattctgtctcaaaaaaaaaaaaaagaaagaaagaaaaaaactattcaagttacagtgtttgaatattgaatttgacatttcagcatgcttttttcctggtattccatttttaatataaatattcagggaaatttatttgattttttttaattgcacataatccattataactacaacagataaccagaaaagaaaatggtttcttggaatctacagcctctacttagctttggaatcaaaaatgagttgttttatatcaattgggcaaaaataaagtttttatacaatgtatt

SEQ ID NO: 720099 - DNA, 959 bp, Homo sapiens
tgaaacaaggaataaaactatgattttgtactgagaccacaagacagcacagttttacacagactgcacacacccatctctctgccactctgtctagacttttaattattattattattattattattatttttgagacagtcttgctctgtcgctcaggctggagtgcagtggcacgatgatctcggcagactgcaacctccacctcctgggttcaagcaattatcctgccttagcctcctgagtagctggggttataggcacgtgccaccacatctgcctaatttttatatatttagtagagacggggtttcaccatgttggccaggctggtcttgaactcctgacctcaggtgatccacctgcctcggcttcccaaagtgttgggattacaggcgagagccaccatgcctggcctaaacttatattaattttatattgcacaaatagattatggtgatggagaaatttattctctggaactggacaaagtagaaagcagacagtcacagtgaatctcatcacctaaaggtgaccacttttgcatttggtggctatgccttcaggtttttcctaagcatgtacaaatgtaagttgctatttgcaaattgagacttttgttctatatgctatatattttttgtgcaactttcttttctttttttttttttttttagagacagagtcttgctctgtcacccaggctggagtgcaatggtgygatctcagctcactgccacctctgcctcctgggttcaagtgattcttctgcctcagcctcccgagcagctgggattacaggtgcatgccaccatccctggctaattttttatattttagtagagacagggtttcactgtgttgcccaggctggtctcgaactcctgagctcaggcaatctacccgctttggtctcccaaaattctgggattacaggcgtgagccaccacacccagcct

SEQ ID NO: 720100 - DNA, 836 bp, Homo sapiens
actggataatgcaaatcatatatacagacttaactgtgtagcacccagtctaaaaatatttatagttatacaaaagagagaagtaaataaaaaccaaagtcatggtcacatctaaccagaacaaaactaaagatttgccagctggcttcatgacgcaaggtttagtaactgactatatcctgggctcagcagtaggcccctagcccctcactaaagtattaaatctgcaaagacagctctatgcagcaggctggcagtagcttctgcccattatgagggtcagcagccctgcaaaggcaaggcagagactctttgttcagcagcttcctaccctcattttctttccaataggaaacaaaccaccccaaaggtcccatcaactctgccaaacctctctgcttcccaactgcagctttaccagaagagataaaaaggagaaactgcttttactgtttggaaacaatcgtggagctcatgttcgggaaaaagtgaacamagtgagatcacacttctccctaggtatttggggttatttctcactggtgttatatggatctgggaaagtgaaataggggacaaaaaatgagataacagaaaaggtctcgatgctaggattaaagctgagtggacaggcccggtgcggtggctcacgtctgtgatcccagcactttgggaggctgagatgggtggatcacttgaagtcaaaagttcaagactagcctggccaacatggtgaaaccccatctctactaaaaataccaaaatcagccagatatggcggcgggcacctgtaatcccagctactggggaagctgaggcaggaaaatcgcttgaac

SEQ ID NO: 720101 - DNA, 839 bp, Homo sapiens
ttattggctggaaaaagtacatagctgctgatttatctacttcaagtagcaggacaatatgcttaccttaaatagtcaaatgtagaaaagaacaatggtcctgaaacacagtccacgccgtcacaggaagaggagaggcctgagactatgaggagagggagagaccagtgatcaaaactgagctctacaacagtcctctctgttgggggaattaaaaagcaaaggatttgaacaagtaattcacagatggggtastacaaatggccaggaaacttctcaaataacttggaaaacgtgaaaccccaaggatagtgttaagagaccgctttaaagtgagatttctgttattcatgtttaaaatatgaagtattcatcagtcttctggaagagactgacacacaaaaaatataacaagtagcttgtattgatctttcaccaggagactttctgagaacttttcacatattagctcatataatccacatagcaactttatgaagtagacagttaattatttccattttgtagataaagaaaacaaggcgcacagaggcattccgtgttttgtccagggtcattcagtccttggcagagctggcatttggggtcaggcagctgggctcctgggcccgagcgcttaaacactgccttgtgctaccacctggtggtcaaaagcgatacacgcaacaatggaggtgagcccaggccagccaggagccggctccctggaggatgtgaacttgaagcagaaatcaggaaagacattccagggagagacagcagcactcgccaaggcacaaaaacagcagttactgctccatgcatgaggagcaagagac

SEQ ID NO: 720102 - DNA, 646 bp, Homo sapiens
cagcagctgcccactccctgctcaccttggtctggtaccaggactcagcctcagcccggctcctctgagcaatctcctcgtattgggccttgacctcagcgatgatgctgtccaggtccaggttgcggttgttgtccatggatagcaccacggatgtgtctgagatgtgggtctgcatctgggacagctcctgcagaacagaaggtcataagatcaacttcacatctgacatttacagagatacccaaccctatacatcttctcccctttgcagaccccatcagagtaaacagaaggatggtggagatgcttactgcatcatacaaggctctcaggaagttgatctcatctgtgagagtgtctgccttggcttgcagttcaaccttgttcatgtaggcagcatccacatcctggggaaagagccaacaacctggagttacctgagctcacctttccaatctacccatcttctagtcctcctgccaattctcctctcccaggsgagtgaggacacagagccacttctctccttctaaatgaatttgaacccccggcttcatctgctcaccttcttcagagtcacaaattcattctctgctgctgtgcgcttgttgatttcatcctcatatctacaggaagaaaggca

SEQ ID NO: 720103 - DNA, 646 bp, Homo sapiens
cagcagctgcccactccctgctcaccttggtctggtaccaggactcagcctcagcccggctcctctgagcaatctcctcgtattgggccttgacctcagcgatgatgctgtccaggtccaggttgcggttgttgtccatggatagcaccacggatgtgtctgagatgtgggtctgcatctgggacagctcctgcagaacagaaggtcataagatcaacttcacatctgacatttacagagatacccaaccctatacatcttctcccctttgcagaccccatcagagtaaacagaaggatggtggagatgcttactgcatcatacaaggctctcaggaagttgatctcatctgtgagagtgtctgccttggcttgcagttcaaccttgttcatgtaggcagcatccacatcctggggaaagagccaacaacctggagttacctgagctcacctttccaatctacccatcttctagtcctcctgccaattctcctctcccaggcgagygaggacacagagccacttctctccttctaaatgaatttgaacccccggcttcatctgctcaccttcttcagagtcacaaattcattctctgctgctgtgcgcttgttgatttcatcctcatatctacaggaagaaaggca

SEQ ID NO: 720104 - DNA, 599 bp, Homo sapiens
ggtgtttcagtttcatatctttaacccattttgagttgatttttgtgtatggtgtaagacagggtccagttttatttttttgcatgtggatatccagtttccttaacaccagttatttaagagactattcttgagactattctttgctcattgtgtcttttttttttttataccttaagttttagggtacatgtgcacaacatgcaggttagttacatatgtatacatgtgccatgttggtgtgctgcacccagtaactcgtcatttaacattagatatatctccaaatgctatccstaccccctacccccaccccacaacaggctccagtgtttgatgttccccttcctgtgtccatgtgttctcactgttcaattcccacctatgagtgagaacatacggtgtttggtttttttgtccttgcgatagtttgctgaaaatgtggcacatacacaccatggaatactatgcagccataaaaaatgataagttcatgtcctttatagggacatggatgaagctggaaaccatcattctcatcaagaagaggagttaatggtgattgtaggcagcctccacctccagaatcagatccagac

SEQ ID NO: 720105 - DNA, 1164 bp, Homo sapiens
tggtaaaatatgcattggggaattgtactggatacaatagctcttctcccaagtactggatacatcaaaactctagtttgtctgtattatgctgaaggatgtacacaatttcaaaagaataagaatggctgctttcactgtttcacaygacctcctattcttattgctttttgcctattttccttgagctatggaaggaaagccacaggtgcagtagcttgcaggtgtatttgcagagttggtaagtcataactctgcctgatatgccttcattctggccgaccacttagtaggaactccacatatggcaattaaatttaattgaatctatgatcctgaacacttttaaaatatgcatggtgaattattccttttaggaagagtactatgaaggttctagtggtataatttatttggttttattttgtttcataattcttgcagaaacacaccacatctgatttctggaaaataagttttttaatgaaaactttctaaagataaacttcacaataggcttctacattttatttccacttctatattatctctatcaaaattatttcttaaataactaccagacactggaaatggacatatcttaatcaagaattattatctctaaaatttgaaaaaaaaaaaaccattaacaataaccagtgaaatgcacaattaggaaagggttaataataaagaaacaacttgttaagtctttgtgttcaggtctgttaaatatatgtctaaagtcccaacttttgttgagacaatggcatacattatgagagagaaaaataaataaagcttattttctgaactcctttcttgcaataattgaactgaacaatcaaacaaagctaaagacctcaggtggttgacataaatgcatgaacagctgataaaagtgaagttgaatctattgggcgctcatgtcaaccttaagaggccccccttcacttatctcctcagtagacaagcgtttccacattcagttcatgcagatttaatgtgtacacttgctgcattgttgttctgaaaaacaaaatatgattttatttctatattcttgcccttcacctagattcttttcttcttaaatgcattatgctttctttctgtttctcccatagcatttgattctatttacattggttatttaataagaaa

SEQ ID NO: 720106 - DNA, 1212 bp, Homo sapiens
gtgaacaggcatgataggttcaggctggtcctctgggtgcttcattctgcccctatttgtgggaagggcagctcttctacccagcctcacccctgaccatgctggccaaagcctctgagatggaaatttagctgttctccttcctagatgtccctaaggtgcctttgtagtctgccatgcatgtgaattcgatggcccacatgccacaaaacatccgcaagcatcactaatattgacagttactggcctatttaggggaatgtgtaatgagtgcatccctgggagagtgagtctgcatccctggggtctgtaatcaagtgtgaattctaaggagaactactatccactcacccacattcagagttattcatgcttcgtggacttggaagggggcccagaagatgagaaatggtgacactcacactgcctcacactgggaccagggtgaatgaaactaaggagcacaagatatgctttggcagtaggtgttggggtaggtggcacaagtagaggcggtgctggtgtgggatgttcatgatcacacaaggtggcaccaatatttgcatttgtgaaccttgagacctgaagcccttttctggtaggagagctgggagtctgcttaaacgagtctctgcctaccaggtagagaggaaggcagaaagaacacctgtggtgggagagtttctcaaggagagaccccagagagaacacactggcgtgcccatccatggagggrtgtattggtagctgtgttccagtgacctgtgggttgcactcagaaggcccagactcatatcctccccactttttcctcctctctccatccctctctcaattctttcctctcataaatgtttattgaacacctactaagtgccaggcactaaagacacaaacatcgttccctagaggaactgaaaaatcagtatggaagacagacatatatttgcaacatacatatttacagcatagtgagcagtgtagagaagagagaacccgtgtactaaggcttggtccaggaggggaaaggaagctcaagaagagatgggcacaggccaaagcttgcaggtgtggctgaggctggcctgggtgtgtctgaggcagggctgaggagggctggccagaggaggcaggaggctgtggtcatgatatcccagacaaagggactcaggtatcatcctgaggcagtggcacctgaggcagttgcacctt

SEQ ID NO: 720107 - DNA, 1212 bp, Homo sapiens
gtgaacaggcatgataggttcaggctggtcctctgggtgcttcattctgcccctatttgtgggaagggcagctcttctacccagcctcacccctgaccatgctggccaaagcctctgagatggaaatttagctgttctccttcctagatgtccctaaggtgcctttgtagtctgccatgcatgtgaattcgatggcccacatgccacaaaacatccgcaagcatcactaatattgacagttactggcctatttaggggaatgtgtaatgagtgcatccctgggagagtgagtctgcatccctggggtctgtaatcaagtgtgaattctaaggagaactactatccactcacccacattcagagttattcatgcttcgtggacttggaagggggcccagaagatgagaaatggtgacactcacactgcctcacactgggaccagggtgaatgaaactaaggagcacaagatatgctttggcagtaggtgttggggtaggtggcacaagtagaggcggtgctggtgtgggatgttcatgatcacacaaggtggcaccaatatttgcatttgtgaaccttgagacctgaagcccttttctggtaggagagctgggagtctgcttaaacgagtctctgcctaccaggtagagaggaaggcagaaagaacacctgtggtgggagagtttctcaaggagagaccccagagagaacacactggcgtgcccatccatggaggggtgtattggtagctgtgttccagtgacctgtgggttgcactcagaaggcccagactcatatcctccccactttttcctcctctctccatccctctctcaattctttcctctcataaatgtttattgaacacctactaagtgccaggcactaargacacaaacatcgttccctagaggaactgaaaaatcagtatggaagacagacatatatttgcaacatacatatttacagcatagtgagcagtgtagagaagagagaacccgtgtactaaggcttggtccaggaggggaaaggaagctcaagaagagatgggcacaggccaaagcttgcaggtgtggctgaggctggcctgggtgtgtctgaggcagggctgaggagggctggccagaggaggcaggaggctgtggtcatgatatcccagacaaagggactcaggtatcatcctgaggcagtggcacctgaggcagttgcacctt

SEQ ID NO: 720108 - DNA, 1212 bp, Homo sapiens
gtgaacaggcatgataggttcaggctggtcctctgggtgcttcattctgcccctatttgtgggaagggcagctcttctacccagcctcacccctgaccatgctggccaaagcctctgagatggaaatttagctgttctccttcctagatgtccctaaggtgcctttgtagtctgccatgcatgtgaattcgatggcccacatgccacaaaacatccgcaagcatcactaatattgacagttactggcctatttaggggaatgtgtaatgagtgcatccctgggagagtgagtctgcatccctggggtctgtaatcaagtgtgaattctaaggagaactactatccactcacccacattcagagttattcatgcttcgtggacttggaagggggcccagaagatgagaaatggtgacactcacactgcctcacactgggaccagggtgaatgaaactaaggagcacaagatatgctttggcagtaggtgttggggtaggtggcacaagtagaggcggtgctggtgtgggatgttcatgatcacacaaggtggcaccaatatttgcatttgtgaaccttgagacctgaagcccttttctggtaggagagctgggagtctgcttaaacgagtctctgcctaccaggtagagaggaaggcagaaagaacacctgtggtgggagagtttctcaaggagagaccccagagagaacacactggcgtgcccatccatggaggggtgtattggtagctgtgttccagtgacctgtgggttgcactcagaaggcccagactcatatcctccccactttttcctcctctctccatccctctctcaattctttcctctcataaatgtttattgaacacctactaagtgccaggcactaaagacacaaacatcgttccctagaggaactgaaaaatcagtatggaagacagacatatatttgcaacatacatatttacagcatagtgagcagtgtagagaagagagaaccygtgtactaaggcttggtccaggaggggaaaggaagctcaagaagagatgggcacaggccaaagcttgcaggtgtggctgaggctggcctgggtgtgtctgaggcagggctgaggagggctggccagaggaggcaggaggctgtggtcatgatatcccagacaaagggactcaggtatcatcctgaggcagtggcacctgaggcagttgcacctt

SEQ ID NO: 720109 - DNA, 1212 bp, Homo sapiens
gtgaacaggcatgataggttcaggctggtcctctgggtgcttcattctgcccctatttgtgggaagggcagctcttctacccagcctcacccctgaccatgctggccaaagcctctgagatggaaatttagctgttctccttcctagatgtccctaaggtgcctttgtagtctgccatgcatgtgaattcgatggcccacatgccacaaaacatccgcaagcatcactaatattgacagttactggcctatttaggggaatgtgtaatgagtgcatccctgggagagtgagtctgcatccctggggtctgtaatcaagtgtgaattctaaggagaactactatccactcacccacattcagagttattcatgcttcgtggacttggaagggggcccagaagatgagaaatggtgacactcacactgcctcacactgggaccagggtgaatgaaactaaggagcacaagatatgctttggcagtaggtgttggggtaggtggcacaagtagaggcggtgctggtgtgggatgttcatgatcacacaaggtggcaccaatatttgcatttgtgaaccttgagacctgaagcccttttctggtaggagagctgggagtctgcttaaacgagtctctgcctaccaggtagagaggaaggcagaaagaacacctgtggtgggagagtttctcaaggagagaccccagagagaacacactggcgtgcccatccatggaggggtgtattggtagctgtgttccagtgacctgtgggttgcactcagaaggcccagactcatatcctccccactttttcctcctctctccatccctctctcaattctttcctctcataaatgtttattgaacacctactaagtgccaggcactaaagacacaaacatcgttccctagaggaactgaaaaatcagtatggaagacagacatatatttgcaacatacatatttacagcatagtgagcagtgtagagaagagagaacccgtgyactaaggcttggtccaggaggggaaaggaagctcaagaagagatgggcacaggccaaagcttgcaggtgtggctgaggctggcctgggtgtgtctgaggcagggctgaggagggctggccagaggaggcaggaggctgtggtcatgatatcccagacaaagggactcaggtatcatcctgaggcagtggcacctgaggcagttgcacctt

SEQ ID NO: 720110 - DNA, 634 bp, Homo sapiens
tattgatttgcctttctctaatgatcagtgatgttgagctttttttaagtttattggccacatgtatgtctttttttgagaagtgtctgttcatgttctttgcccactttttaatggggttgtttgtttttttcttgtaaatttgcttaagttctttgtagattctggatattagacttttgtcagatggatagacatcaacttcaatccattaaatgtgaaaactaatcttttttctcacaagctcatctgtatcatatgtgtggagatatttcctacagttctgggaaagtataggattcctaaaactggtggccatattttaatgatgttagaggcagtctgcactgagtgcatatcattaattctaataaatgagtcatcaaaagtcattatatttctttctattttctcatctctcaccctctctctctctctctctgtctctctgtctctacctctctctccatacccctmtccatacacacacacaaacacacactcacacacacacacacacacacacacacagagagagagagagagacggacccacaaatatacctggtgtaacaggcacagactttctcaagctgtaacacaatatttgcgagttataatgcctgatgacaat

SEQ ID NO: 720111 - DNA, 2724 bp, Homo sapiens
  misc_feature 842, 843, 844, 845, 846, 847, 848, 849, 850, 851, 852, 853,854, 855, 856, 857, 858, 859, 860, 861, 862, 863, 864, 865,866, 867, 868, 869, 870, 871, 872, 873, 874, 875, 876, 877,878, 879, 880, 881, 882, 883, 884, 885, 886, 887, 888: n = A,T,C or G
  misc_feature 889, 890, 891, 892, 893, 894, 895, 896, 897, 898, 899, 900,901, 902, 903, 904, 905, 906, 907, 908, 909, 910, 911, 912,913, 914, 915, 916, 917, 918, 919, 920, 921, 922, 923, 924,925, 926, 927, 928, 929, 930, 931, 932, 933, 934, 935: n = A,T,C or G
  misc_feature 936, 937, 938, 939, 940, 941: n = A,T,C or G
tgaagatgtgcatgaaaacacacatgcataactccccactacaccatgcacacggacacctatatgtaacccatcccctccacaacacaggcacaaaatsaagtccagtgagattctgaacatgtaaattgcatttaaattctcagctccttttcatcagtattttccaagtgctaaacagcaccatggactcaaaccacagcctcctatgtcactaagttcagactgaaacataatatggcctaagtgacaagcttggcagggaaatctcaaacatctggtatgtcaaagatcacatagctagtacatatttaatctaaaattgaaataattgacataatccttacattacttgtggggaaatgggatgtatgtgagtcatgtttcagacagttcatatgtaagataaatatttcaatccctaaataagatttgaccgagtgttacattaactgctgatatatccatagctgaataagaaatcattaatacctatgatgatactatgcaaatatattctaatattgaattttattttgctatcttttgtacattaaacagtttggctgttatcagttgttatttttactgtctgaaaaatacagagtgaaatctgtgcagaagatctttaaataaacaacattactaaacagtgattccagcaagtgatattttcttctgttgcctggctacaaagctttctaaacacacacacacacacacacacacacacacacacacacacacataacctcaacaggtttctgtttttgttactcttaagaaaattgtatgacttgtcatcctaagatgggtaagctaagcaacaaggacactcacannnnnnnnnnnnnnnnnnnnnnnnnnnnnnnnnnnnnnnnnnnnnnnnnnnnnnnnnnnnnnnnnnnnnnnnnnnnnnnnnnnnnnnnnnnnnnnnnnnntcctgtttaatttctaatataatattagattagatatgatatcaccacatcgtaatgataattgataggtgtaaccaacacaaacaaaggcctttcgggtccttcagggatctttgagtgaaaagaggatcctgatcacaaaacacttgtgaatggctgccttaatggaaaggacctggcctttggccccagatggacccaggcttgaatcctaacttctcccccttagctctgagggtgttggcaagcagcctgcctttgctgagcttcagcttgcttgtctgtggaacgcagatcatgctaatccccaaggaggttctgcaggtaggattgcaggagcctcagctggagctatagccgcagctgtggacagccctccagcaggtccactagccaccggctggaaaattgagtgattgcatctctccctttgtcctcagccttagctggtgcaaggaagctgctttagtgaacttccaggaactgagtcattcacatagactcactttcctttcctctcctgaagattcatgataaccatcatgcctcccactccttgtgtgctctgggataccagatggcaggaaatggaccatttcaatcacaaagggagctgtcctcaggacagccacaacaaatgccagctcagccggcatgtcctctaaggttgcaggtggaacaagtggagcacaaagcatcagaccaatgtctgcagttccaaagtggggagtcagtgtgcaaatgctggcgcctgcgtgtctccacggttactgacccagataccatgctttccctggggcagtcacctggacttgacctagtcaggtacagcatccacaaggaacagcatgagcagcatgtacctatgagtcaagtgctaggtgtgtatgtctgagttaatacatcatccatttgtggcttctcccactgtgtctgcctttaagatgtgaactcaaattctctgagcacattcatgatactaaggccttcagtagtcttcctggagagagaggctcttaagaaacagggcagcagacaggcaggcaatcttatgaatacaacgtggaagagggaaggcaaggcacgaccaccccagattttggaagcagtctgtgaacatatctgggtctgtgttattcagcagcccattgctgacttcacttataggattctagagcttttcattccctgtgggaatggagaccttttgggtttagattagatcattggatttggaagtgtggggagaagctgactcagctgtccttgctcaggctgtctctctgccatcttctcctcaagccacttggactccctcattaccgccccatggggattcctcctctcactgtgtgtcagcctcaaagagaaaatgattcagcagggacttgggttcctgtactgctaggtgcttctccatatggtctaacgattccttgcctcggaggatccacctcagacacgtcaggacaccagacaccagaacctgggaggtatgggtatgtagatctgaactagacatttttcagcatttctcagagagagacaatattttggcagaacatttctaggggatggggagtctgatgatggtggggtgccatgtgaatcttaggagtggcacccatcatgagctagaggattttaggtctaacagatgttgctacccctgttagtttcctcaggatctaaaacctgtcatttggaaagtggacttatgtgtggttgtgttctctaagacaaagttctcttcattctcctttagtttttataggtgttttga

SEQ ID NO: 720112 - DNA, 660 bp, Homo sapiens
tgatgcttctaattctattattctttccagatttattggctgaatttttttttaataagaacttcccctcatcaacaggggaatttggttaccctgcattcagtgcttacaggaaaggcaagataaatgcttacttcttaacttttaattgccaactttcggagtaaaaagttggtaccctagttaattccaaaatgttgaataaggtccactcttcccctcttttgaacttttccttgtttattcattgatatttatttatttatttgagaaagggtctggctcttttgcccaggctggagtgcagtggttcaatctcagctcactgtaacctctgcttcttaggctcaaatgatccttctacctcagcctcctgaatagctgggactataggcatgcgccaccacacctggctaatttttgtactttttgtagaaatagggtttggctatrttgtccaggctggtctcaaactcctagcctcaagcaatctacccgcctcagcctcccaaagtgctgggattataggcgtgaaccaccatgctcggcctcttttaatttttaatagtaactcgaatgtactttttaaaaaatatatttaatgtgttccagtcaattaattaattgtctttttaaaaaacattgtctcatctttggcca

SEQ ID NO: 720113 - DNA, 600 bp, Homo sapiens
cgaatgacagtgttggatctcagatcactagctcaatacactcagtgcctttcttccctcacgaccccctacccccaccccagggccccagagctctcacggccctctccccctgtaagcaggatggggatggaggmaataaactcaccactccagatgatagggacagggtgtatcatgtcttaaccaagaaccagacgaggacaaggtggagcctcgctctcacagccctctccccctgtaagcaggatgcagatggaggcaataaactcaccactccagatgatagggatggggtgtaccatgtcttaaccgagaaccagacgaggacaaggtggagcctcactggtgggattctagacacgcaacaggccagtggcaactgtggctgacatttattgctatacgccagtccctgtcagttgcaggcattgtttcagctactcctcaccacctaccccctagggacaggcagtggcactccccatgagaaggtgaggggagactcagatgctgagatgtaaaaaaccggcccaaggtcaaagctccggggagcagagccaggactttgcacggagcacccattctagctgacaactt

SEQ ID NO: 720114 - DNA, 600 bp, Homo sapiens
cgaatgacagtgttggatctcagatcactagctcaatacactcagtgcctttcttccctcacgaccccctacccccaccccagggccccagagctctcacggccctctccccctgtaagcaggatggggatggaggcaataaactcaccactccagatgatagggacagggtgtatcatgtcttaaccragaaccagacgaggacaaggtggagcctcgctctcacagccctctccccctgtaagcaggatgcagatggaggcaataaactcaccactccagatgatagggatggggtgtaccatgtcttaaccgagaaccagacgaggacaaggtggagcctcactggtgggattctagacacgcaacaggccagtggcaactgtggctgacatttattgctatacgccagtccctgtcagttgcaggcattgtttcagctactcctcaccacctaccccctagggacaggcagtggcactccccatgagaaggtgaggggagactcagatgctgagatgtaaaaaaccggcccaaggtcaaagctccggggagcagagccaggactttgcacggagcacccattctagctgacaactt

SEQ ID NO: 720115 - DNA, 875 bp, Homo sapiens
caggcatggtggcgctcacctgtagtctcagctacttgggaggctgaggtgggaggatcacttgagcctgggagttagaggccgcagtgagccaagatggcaccactgcactccagcccgggtgacaacaagatcttgtctcaaaaaaagtgtcctggagacttgcagttgagtytgatgcaccctcatccactcattcattcactcactcattcattcactcactcattcattcactcactcattctgggaccagatggctaagccccttggcaaggcccagttggggttgggggctgtggagcaggtgagaggcgcccactccaacagggctcttaggactttagggagagaaaggagcctgttcccggcagagggacctgcagagaccaggacaggatgcttgggccacggggcagatgggcaccaggacccacccttcttttcctaagggggtccctcatgtaggaagtttcctcctaacaggcaaagcaaggggcctccaccctgtgccctcagaccttaggggtccctggctgtaggagacaagacaccaactgcacctggggcagaaggagacagggcacccagagccttcttcctggccctgatcatgtggccagccaaggttctaaggggcgctgccgccaggctgccgttgcaggtaaagaagccgcgtgggtagagtggctgaagggggccttgcccgcaggaggcactcagaggccttgggccacctcgttcagtctgtgtcttcagggagcccagagggctgggaggatcagtgcccacccagtggcagggatggttggtgccagcaggctgtgatcctggagtgctccagtgtgagggacagagggtatggcataccctca

SEQ ID NO: 720116 - DNA, 1372 bp, Homo sapiens
  misc_feature 1217, 1272, 1273, 1274, 1275, 1276, 1277, 1278, 1279, 1280,1281, 1282, 1283, 1284, 1285, 1286, 1287, 1288, 1289, 1290,1291, 1292, 1293, 1294, 1295, 1296, 1297, 1298, 1299, 1300,1301, 1302, 1303, 1304, 1305, 1306, 1307, 1308, 1309: n = A,T,C or G
  misc_feature 1310, 1311, 1312, 1313, 1314, 1315, 1316, 1317, 1318, 1319,1320, 1321, 1322, 1323, 1324, 1325, 1326, 1327, 1328, 1329,1330, 1331, 1332, 1333, 1334, 1335, 1336, 1337, 1338, 1339,1340, 1341, 1342, 1343, 1344, 1345, 1346, 1347, 1348: n = A,T,C or G
  misc_feature 1349, 1350, 1351, 1352, 1353, 1354, 1355, 1356, 1357, 1358,1359, 1360, 1361, 1362, 1363, 1364, 1365, 1366, 1367, 1368,1369, 1370, 1371: n = A,T,C or G
tgtgctaggcagggttttaggggctttggataaaccagtgaacaaaactggcaaagatccktgttcttgttgtagctgaaagatacaaacaatagaaaatacatccaataaaataaataacaaattagatatacatttatatgtgttaacataatattgtaaattagtacaaatcatatataataagttaaataataaggaagattggggagagggaagtttgcagtgttaaagcagtgacagacgttccataaactggcgagtggacagataaaccatggtgcatccatacaatggaatcctattcagcagtaaaaatggaataaactgctgatagctgtgtgaccttcggcaagttacttaacctctctgatacttaactctgtgaaatggggctaataatcaaatcttccaggtaaggttcctatgaaagtgaattactgcatgtcaagtgcttagaacaatgcctgggcacagaggctgtaggctgtgtctgctgtcaacacctgtatttccgtctccatacctttcagactcactgaccctgagaactctttgtgcctgtgtttccatcttccccatcctagctttctgactctgtctcccccagcctccatcttggtgtctctgtatcagtgtctctgtgtctctatccctatctaactttctctgtttctgtcactgactttctttgcctttcttgcactctgagtttccatctctccagctccccatcactccctctcattccagatgttgctaacactgacttctcccagagaccactggacagtgggacatttttggttgctatgacttggcaaggagggtgctactggcatctagtgggcagagggcagggatgctgcgtaatatcctacagcacacagggcagtgcccacaacaaagaatgattcaatcagaagtgtcagtagcggccaggttgagaaattctgccctaggttatggtttcagggtctcaccgcctaaggtggagaggatcccttatggctgttgctgcccagagattccgtgggagggtggagaagggagacagctaaagaatcccagaatcccctccccaccaggtgctaacctgatgaccacagcagaaaccccctgcaccaggctcctgggatatgtcgtccacaatgtcacaggtgtgtgtgttgtgtgtgtgtggtgggagaggggtgtaagtgtggtgtgtcttaatnttttttggctcccataacaacataacacagacaggtggcttccaccacagaaatnnnnnnnnnnnnnnnnnnnnnnnnnnnnnnnnnnnnnnnnnnnnnnnnnnnnnnnnnnnnnnnnnnnnnnnnnnnnnnnnnnnnnnnnnnnnnnnnnnnnt

SEQ ID NO: 720117 - DNA, 570 bp, Homo sapiens
aagagataatattaaatttgaatgtgcacattattcacttaggaatcttactaaaatccagattctaactcagcatgtctggaatgacgtctgagattctgcattattaataaactcccaagtgatgctaatactgttggcccatgagccacactctaactagatcagaaaaacccaccccttccagtcctaggcctatcactaaytggctgtgttagtgatattaccagccatcttgggaatctggatttcctctttcacaagggagttatttgcctacccacatgtatgaatgctcttaaggaaaatctaaccatggagattctaaggtatcaaaggataaatcacagatagtatccacattttaaaaggatttatttaaatagaagcttagaattcacaaggggccattgacaagtatttttgataaatcattctacttaattcaataaatgtttattgttcttttaggtgaagggttttctcaagttaccttgcagcaattccaaaatagtgacaatgtccctgccctattgaagtttgtaacttgcaaggtattagtagtactga

SEQ ID NO: 720118 - DNA, 578 bp, Homo sapiens
ttgtcaaagcagtcagtgattcaaggagagaggaatggaccttcttctctacctagctatttttaacctgctgtagctctcatctcctgctggacataatatcacagactcttacaattacagcccatcaaccatcctcctatgaagttctctttctattaaagataaaaattaatctcgattattttcctcccacacttgacattatctattatctgacttctatctgtgcaatacacatgggctttgtaacataacttttcacaatctagcaccactttgtattctaaacctcacttccagtactcctctgyaagaagctataccagtctcagaacataccttatcatttcaggactccaggccatgcacatgttttttcctctgctagaaacaatacattctctttgcccaacccccaccccacctcccctttctctctctctctttctttctgtgccttcttgacttccctaggcagaggtggtctgtcttagtgtgggctgcaataataaattaccatagactggatggcttaaatgacaaacatttatttctcacagttttggaggtgagaa

SEQ ID NO: 720119 - DNA, 587 bp, Homo sapiens
agggggtgccaatgcagggagttggaatagctgtcatgcacaaagcattttgatgagcgttaattcttgtgatacttatgatagcacagtgttgtgggtggtattttttaatctcattgtatttatgaggagccttgggctcataaagagtttgaactagtgcccaaatatgtagtctgctcttttggtgctctccctgctacccctcatggactcttagtactgacaaaggcagtggtgtgccaccacgtggctctttccaaaaagcctctgtgtgatcttccaaaatcttcgaatggaagagttgcaacagattggctaggctaaccctgtctggttcttgaatgatttatccatgctccctgagaaaccccagccttgtttctttcttctgcccatttccactcatgaatctgcatgcttgtctcactcctacctggcatacctcttctctcaggaatcccctcaagccaagcagctcatgactttggtaacttgatggagagrtcaaatcatggcattcctccaccatcctctgctcttatgtgcaagcttcacaaccttcctaaaagcccgtactcctcacc

SEQ ID NO: 720120 - DNA, 665 bp, Homo sapiens
caaagatctcttctcataagcaggagttttttgttttttacacaaaacaaaacaaaacagttatcctgattggatccatgaggactagctcacttggctgtgcctcaggagaggtccagaatgactttcttggacttgaacgagctcagaagcattggcactttctcgtttacactggccttgattttgggtagaggttgagcaggctgaagtcccctctctgaagccatcattggatggtaaaatgcatctgcagccagatgttccagctctagcagggtcacaactgcactgagatgaacacaagggggcagtctttcccacagaatttcgtcaratcagagcggaattgagtgcagtttcaatgtgagcgcatgcgtgagcctgtgctctgtccacactagtgctcgtgtgtaaaacgtgtagcctgtaactctgtttataaagagcctcagggtgaagggcatatgaatgctgagtagattttgtgcttcactgtgctacagtttcgttaacacaacccaggcctcctcagtgtaggttatagactatatccccctgcctagcccagagtcttacacatggcaggcaggcaggttggtaggtagggcaggcagcaggtaggcaggcaggcaggcaggcaggcactttttattattggaggc

SEQ ID NO: 720121 - DNA, 1197 bp, Homo sapiens
gctatgatcaattatggaaaatgaaggtaagaaaacagcttacttttcggggcattcctaagcacagtagacaagaatgctccaacagactatgttgtgcattgaaaaaaaaattttatcacatcatataattaagcaactgtgagaggcttcttcattgaatttgttttctaagaaaaaagcaagggccttttttaaggacataggttatcctttcctgcttttaattatgtcactcagatttttttaatattgacattattggcttcaattaaagttgtatcatcacacaaattaaatggaaccacctagaacaaatattagcaagtttctaaaacatgaaaaatagatactatcgaaataatagctttattttggctctaagatttggctgtttgaaaattgactcatatttggccttaccagaggaaatccaatatcacacagtaaatttcaccactttttttaagcaggaaaatatcaagttggaaaggtgaagtgacactgaaaaatggattgcagaaaaatcctctcataatgggaggaagggagagcagataatgagggatcctgattaaacacaacgctactacccagcagtgaagtgaagcacaaagtgtgcagagaaaatcagatcctgacagccagttctgcactgtgcctataatatcaatggaaaaaacctcagatgtaatccttggttggttgttcctacttcatttcctgaacaaataattcagtactcctttattatacactggttgcttaatcagaaacttggttccaraacaaccaagagaaataggaacattgccctcacacacagatcacaatgcacagggctcctgtcacatgagtaaaaatcatgcacagttaaaaatggactttctttcccctgtctttcatgtcacaggcttcatattgatggggaagctgcctattaggggaatagatgacttctcatgtgtattaatgaaagcaatgtattgcaggctgggtagctggtagaaatgttgtgggcgtttgtaagtggaagatttacgccattataaccctaatatattcctgcagagtaacaacacagcctatctaatatacaatgatggagtccctaaacctgtgaattacagcagaaagtatggacacaccaaaggtatgacaaagattcttggtttctctttcctactggaaatcaac

SEQ ID NO: 720122 - DNA, 1161 bp, Homo sapiens
gatggtgataagtgctaaggagaaaaaataaaacagagaaaggggagaggtaatgtccataatggggagtaatactatagtgttagatagagtggcaggaaatcccttacctaagaggtgaaatatttgagtgaaattgttgaggagtcggagagcaaaccatggggatatatggaagaagaatgttccatgcacagttaatagcacttgcaaagatcctgactagaaaatatgtactctactccagctatgctatgcagtasacatggggtagagtcatagaagatgaggccagacaggatctaagagactctataaagatttggcattttaggtattgtgcagttttgagtaaagaagtgaaacgttctcatttttttttaaataggctgtagtgctaataatggaattaaagacggcaagggtgaaaatagagtggatgtctagaagactggattttgatttttttttttttttttttagacagagtcttgctgtcacccaggctggagtgcaatggcacgatctcggctcactgcaacctctgcctcctgagttcaagcgattctcctgccttagcctcctgagtagctgggattacaggtgcctggcaccacgcctggggctaagttttgtatttttagtagagctggggtttccccatgttggccaggctagtctggaactcctgacctcaggtaatccacccggcttagcctcccaaagtgctgggattacagacgtgagccactgtgcccggcctggattttgattttataatcaccccatcatttattctggaatatgcatgccctcatgaactgagaatttgttactaatttccaggggtatttgtcatgattaaggtttgttattaataatgagttaccatatagtaaaaaagttgaacacaaagtagggaatcctttctagaaattgaaccattggctgaatagtagtcatcaaggagatttttatttaaaaaacaagtgatcagatttgggaatagaaatacaatcatgattctaattaatattatgtgtttttaaaaacatcccatgttacgaaattgtgacatgtagaatgaatttaggacatttagatggaaaagagcagtttgttcctgactattaatgtaggttcacacgatttcaactagga

SEQ ID NO: 720123 - DNA, 607 bp, Homo sapiens
actattagtttaagtttgcttctcataggtcaatactaatgagtacattccctaactaaagtactaagaatttataaaaggcagcacccttcagttacattttaaatgatccaaaacgtttttggtcacatctcttagattaacatacattttgtacacatgacatttgatctggaaggcacaaattaatgtactgaagcatgctttaataaagccaacagggtctttagtttttaattctctgaaattcagtccactgtctgtttgccaccaagaacttatatactgcatttccttcatgttttatctttaatctaacaaatgagaacaaaatataaagtctgttctacctcagtccaaacgcctctaccacactggcttactcaattacatctgactttctcttgcatttccaattcccaatctttgctatactgctctacagctgggttcagttagagcaataacatcaagagttaatccaaatcagttggtagtactttaagttatccccataaacattgcagattttttaaaaactctaaatatttgccaggtacacaaaaacaaaactagtacttggkgactccattaggccaatgctcta

SEQ ID NO: 720124 - DNA, 908 bp, Homo sapiens
caaatctgaacaaatttcaaatgcttggtgtgatacagagtataaagattgctatctactatacaattatgttaatagtaaaaaaaaactaattagaaaaatttttgatataaaaaacacatgcataaataagttattggtcaaggaagaaatacaaacaatagtaatttgattatttaagacttaatgattactaaaatatatctattcatgcttgtgagatacagctaaatgctacttggagggaacatttattgtcttgcatgcatgagcagaaaattttaaaaacactaaaaatctaaaaattaggaggttatgaagtgaacaaaataatataaaagaaagttaaaagaggaatagtgaaaggaaaagaaactaatcaaattcaaaagaaacgtccartagggaagatagttaccctgcaggacaacaaatcttagacaccagaactagttttagatcaaactttagaaactagaatagatgatttttcatgagtttcaatccttttaagttacagtagtaagatatatttttatttatgaaatccagcttacctaattgaaaactgtgtgtttgaacatcttgtgttctctcttatgttcaaagctatgcaatttttataagaaaatagatatttataatatttaatttccaagtaactaatgttgtaacatctttgcttagactttatttgcgtgtgtgtatttatgtatgtatataatgtatgtatatatatttaatactgtttattccatttgatacttaccagcaactagttaaatgctttgggagaaaaacacaggaagaggatggagcaataatggatggcagtaaaggccaaaacacaccagcattctcaatgttgtactcagaaattagaaaaagaaaagttgagattatgagtg

SEQ ID NO: 720125 - DNA, 908 bp, Homo sapiens
caaatctgaacaaatttcaaatgcttggtgtgatacagagtataaagattgctatctactatacaattatgttaatagtaaaaaaaaactaattagaaaaatttttgatataaaaaacacatgcataaataagttattggtcaaggaagaaatacaaacaatagtaatttgattatttaagacttaatgattactaaaatatatctattcatgcttgtgagatacagctaaatgctacttggagggaacatttattgtcttgcatgcatgagcagaaaattttaaaaacactaaaaatctaaaaattaggaggttatgaagtgaacaaaataatataaaagaaagttaaaagaggaatagtgaaaggaaaagaaactaatcaaattcaaaagaaacgtccaatagggaagatagttaccctgcaggacaacaaatcttagacaccagaactagttttagatcaaactttagaaactagaatagatgatttttcatgagtttcaatccttttaagttacagtagtaagatatatttttatttatgaaatccagcttacctaattgaaaactgtgtgtttgaacatcttgtgttctctcttatgttcaaagctatgcaatttttataagaaaatagatatttataatatttaatttccaagtaactaatgttgtaacatctttgyttagactttatttgcgtgtgtgtatttatgtatgtatataatgtatgtatatatatttaatactgtttattccatttgatacttaccagcaactagttaaatgctttgggagaaaaacacaggaagaggatggagcaataatggatggcagtaaaggccaaaacacaccagcattctcaatgttgtactcagaaattagaaaaagaaaagttgagattatgagtg

SEQ ID NO: 720126 - DNA, 908 bp, Homo sapiens
caaatctgaacaaatttcaaatgcttggtgtgatacagagtataaagattgctatctactatacaattatgttaatagtaaaaaaaaactaattagaaaaatttttgatataaaaaacacatgcataaataagttattggtcaaggaagaaatacaaacaatagtaatttgattatttaagacttaatgattactaaaatatatctattcatgcttgtgagatacagctaaatgctacttggagggaacatttattgtcttgcatgcatgagcagaaaattttaaaaacactaaaaatctaaaaattaggaggttatgaagtgaacaaaataatataaaagaaagttaaaagaggaatagtgaaaggaaaagaaactaatcaaattcaaaagaaacgtccaatagggaagatagttaccctgcaggacaacaaatcttagacaccagaactagttttagatcaaactttagaaactagaatagatgatttttcatgagtttcaatccttttaagttacagtagtaagatatatttttatttatgaaatccagcttacctaattgaaaactgtgtgtttgaacatcttgtgttctctcttatgttcaaagctatgcaatttttataagaaaatagatatttataatatttaatttccaagtaactaatgttgtaacatctttgcttagactttatttgcgtgtgtgtatttatgtatgtatataatgtatgtatatatatttaatactgtttattccatttgatacttaccagcaactagttaaatrctttgggagaaaaacacaggaagaggatggagcaataatggatggcagtaaaggccaaaacacaccagcattctcaatgttgtactcagaaattagaaaaagaaaagttgagattatgagtg

SEQ ID NO: 720127 - DNA, 3133 bp, Homo sapiens
tggttttcactgggaaatcctttcaccagtcagcccagttagagattctgaagtatgtcaaatctttctgtgaatgcattgtctctggaattgtgtgtaaattcttagaaaaatttgcagatctttcttcaggagcatgtaatctcttgctctctttgttatctatctgtagaactgtaggttatctggagttgctataaccccctagctctcttttgttctcagcagtcctcagacatcaagagcgtccagtcagacagaaaacagtctgtcaggctgactgggaaaagttggaattctggatgcacactccagctttttccttctccaaggggaagccaggagttgagggttttctcccactcattgcgtcttgatccaaggaaggatggtatgataagtgaatgtatgctaacccaaacttccccaactcatttgttcttaatatccccaayctggaaagctttcctgttagcgcttaaattcaggcaagacagaaaacaatcacttggaaactcccctgaagtctgaacactgaatgtgtgtttcagcattctctttcacttctgtgggggaatcaggaactgtagagtattctcccaatcttgttatactgagtcacaggaggaatgatggtggattgagtgacagtccaaacggtggctttatcagcaggcatgcaatctggcatcctttccttttagcacttagattcagcatagataggtgctagtgccctcccaaaaagtcaaaatgctggacatatggtctagacttttatttctcttcctagagatgagctgggagtttggagctttctctctattgtgttgtactgctgagggatgatgagtgagtgcaacaaatttacctgttggtttagatgtgcctggcttgaagcctaccagggaatccagagtctttaaattcacctctgtacttgttacaaaggggatttatctgtgtattattgtcgagctggtgtctccttggagaggagggtggaggggctttgaggctttctattgcatcatcttgctggtgtcctgacaggaattttaaactgggctcctttccccacattgttggagaatggatcctggctgattataggtactcatgaaatactggataaattattatttatcatttacttacaaatacttcaaatttttattatgggaaataagtttttaatcactattaaagtttgttgaagcactaattcattactgtgaaaagtggggaggggaataaaaatcaagcttttgtctatttctcttgcttttcctgtccaaactgtgttttggtgtaatcaataaacatttgagaggaaatgttcttttagaaattattccagctaataaatgaagaaaaaaatgaaagaatgtagtaccctgttataacacctagtaaaataatggttgaaacaagttttctaatgaatgctaaaactatcagttgaaaagttgctgcaaacctttactgtggaggactgtagctgacattaatttcttagctgaagtacaagttggagacagtaggactctttgaatttaaaagggattttggtgtcattattttttcttttacagtctcttttttcacataaaaatcaactattaactgattggttttatggtcttttggaaagagactatataaattctgctttttgtatgaagatctcttttacattgtcagaggaaattttatctctggtaagctctaatttcatctttcaattttattttgaatttctttctttgtcttttgttttatcagcaccttgtttaatttaaaatagattcaatgtcaacagtcaaggagttaactcaggaaactaatttatccagaaatacaaatatttttgcatatattttatcctttgttttagatctttaatatgtaatttctaaaaatgaaatatggacagtttgcttgatttctgagcatagtcaatgaataattttaccaaaataagaaaacatttttcgaggttttttttttttttttttccttgagactgagtcttgctctatcacccaggctggagtggggtggtgtgatcttggcacactgcaacctctgccttccaagttcaagcaattctcctgcctcagcctcctgattagctgagattacagttgcccaccaccacacccagcaaattttttgtttttttattagagacgtggtttcaccatgttggccaggctggtctccaactcctgacttcaaatgatccgctcacctcgacctcccaaaatgttgggactgcaggcgtaagccaccacgcccggcctggagcattttgatataatgaattactggggaaaccttttaatataatattagacagcccatttaaaaagaatccagtataattattatattctttatatgactacatttcacagtgaagtaacttagcactctgtatttataatgctttgaaaatacatattagttgctgattttatattccaaacagaaattataggacaccatattatataaacacaagaattcaatattaattttcacactttaaaacaataatcttggccctgagcagtggcttgagcctgtattcccagcactttggaaggtcgaggcaggcggatcacaaggtcagaagattgagaccatcctggctaacacggtgaaaccccgtctctaataaaaatacaaaaaaaaaaaaaagtagccgggcgtagtcgcaggcgcctgtagtcccgctactcgagacgctgaggcaggagaatggcattaacccaggaggctgagctcgcagtgagccgagatggcgccactgcactccagcctggatgacacagcgagactccgtctcaaaaaaaaaaaaaaatcttttcaatttttaaaattgttctcaaactactcatcagagaaatttaacatctccatttacgtttctatgatgttatacagaaatattttatttctttccccagaataatataggcaaaatctctccttctgactatacacacctggtattgttattttatttaagggtttctatctcttcctattctgaatgattactgtctttttgagctttcttgcagtaaccactttaaatagtctctagacaactttctagattcta

SEQ ID NO: 720128 - DNA, 3133 bp, Homo sapiens
tggttttcactgggaaatcctttcaccagtcagcccagttagagattctgaagtatgtcaaatctttctgtgaatgcattgtctctggaattgtgtgtaaattcttagaaaaatttgcagatctttcttcaggagcatgtaatctcttgctctctttgttatctatctgtagaactgtaggttatctggagttgctataaccccctagctctcttttgttctcagcagtcctcagacatcaagagcgtccagtcagacagaaaacagtctgtcaggctgactgggaaaagttggaattctggatgcacactccagctttttccttctccaaggggaagccaggagttgagggttttctcccactcattgcgtcttgatccaaggaaggatggtatgataagtgaatgtatgctaacccaaacttccccaactcatttgttcttaatatccccaacctggaaagctttcctgttagcgcttaaattcaggcaagacagaaaacaatcacttggaaactcccctgaagtctgaacactgaatgtgtgtttcagcattctctttcacttctgtgggggaatcaggaactgtagagtattctcccaatcttgttatactgagtcacaggaggaatgatggtggattgagtgacagtccaaacggtggctttatcagcaggcatgcaatctggcatcctttccttttagcacttagattcagcatagataggtgctagtgccctcccaaaaagtcaaaatgctggacatatggtctagacttttatttctcttcctagagatgagctgggagtttggagctttctctctattgtgttgtactgctgagggatgatgagtgagtgcaacaaatttacctgttggtttagatgtgcctggcttgaagcctaccagggaatccagagtctttaaattcacctctgtacttgttacaaaggggatttatctgtgtattattgtcgagctggtgtctccttggagaggagggtggaggggctttgaggctttctattgcatcatcttgctggtgtcctgacaggaattttaaactgggctcctttccccacattgttggagaatggatcctggctgattataggtactcatgaaatactggataaattattatttatcatttacttacaaatacttcaaatttttattatgggaaataagtttttaatcactattaaagtttgttgaagcactaattcattactgtgaaaagtggggaggggaataaaaatcaagcttttgtctatttctcttgcttttcctgtccaaactgtgttttggtgtaatcaataaacatttgagaggaaatgttcttttagaaattattccagctaataaatgaagaaaaaaatgaaagaatgtagtaccctgttataacacctagtaaaataatggttgaaacaagttttctaatgaatgctaaaactatcagttgaaaagttgctgcaaacctttactgtggaggactgtagctgacattaatttcttagctgaagtacaagttggagacagtaggactctttgaatttaaaagggattttggtgtcattattttttcttttacagtctcttttttcacataaaaatcaactattaactgattggttttatggtcttttggaaagagactatataaattctgctttttgtatgaagatctcttttacattgtcagaggaaattttatctctggtaagctctaatttcatctttcaattttattttgaatttctttctttgtcttttgttttatcagcaccttgtttaatttaaaatagattcaatgtcaacagtcaaggagttaactcaggaaactaatttatccagaaatacaaatatttttgcatatattttatcctttgttttagatctttaatatgtaatttctaaaaatgaaatatggacagtttgcttgatttctgagcatagtcaatgaataattttaccaaaataagaaaacatttttcgaggttttttttttttttttttccttgagactgagtcttgctctatcacccaggctggagtggggtggtgtgatcttggcacactgcaacctctgccttccaagttcaagcaattctcctgcctcagcctcctgattagctgagattacagttgcccaccaccacacccagcaaattttttgtttttttattagagasgtggtttcaccatgttggccaggctggtctccaactcctgacttcaaatgatccgctcacctcgacctcccaaaatgttgggactgcaggcgtaagccaccacgcccggcctggagcattttgatataatgaattactggggaaaccttttaatataatattagacagcccatttaaaaagaatccagtataattattatattctttatatgactacatttcacagtgaagtaacttagcactctgtatttataatgctttgaaaatacatattagttgctgattttatattccaaacagaaattataggacaccatattatataaacacaagaattcaatattaattttcacactttaaaacaataatcttggccctgagcagtggcttgagcctgtattcccagcactttggaaggtcgaggcaggcggatcacaaggtcagaagattgagaccatcctggctaacacggtgaaaccccgtctctaataaaaatacaaaaaaaaaaaaaagtagccgggcgtagtcgcaggcgcctgtagtcccgctactcgagacgctgaggcaggagaatggcattaacccaggaggctgagctcgcagtgagccgagatggcgccactgcactccagcctggatgacacagcgagactccgtctcaaaaaaaaaaaaaaatcttttcaatttttaaaattgttctcaaactactcatcagagaaatttaacatctccatttacgtttctatgatgttatacagaaatattttatttctttccccagaataatataggcaaaatctctccttctgactatacacacctggtattgttattttatttaagggtttctatctcttcctattctgaatgattactgtctttttgagctttcttgcagtaaccactttaaatagtctctagacaactttctagattcta

SEQ ID NO: 720129 - DNA, 3133 bp, Homo sapiens
tggttttcactgggaaatcctttcaccagtcagcccagttagagattctgaagtatgtcaaatctttctgtgaatgcattgtctctggaattgtgtgtaaattcttagaaaaatttgcagatctttcttcaggagcatgtaatctcttgctctctttgttatctatctgtagaactgtaggttatctggagttgctataaccccctagctctcttttgttctcagcagtcctcagacatcaagagcgtccagtcagacagaaaacagtctgtcaggctgactgggaaaagttggaattctggatgcacactccagctttttccttctccaaggggaagccaggagttgagggttttctcccactcattgcgtcttgatccaaggaaggatggtatgataagtgaatgtatgctaacccaaacttccccaactcatttgttcttaatatccccaacctggaaagctttcctgttagcgcttaaattcaggcaagacagaaaacaatcacttggaaactcccctgaagtctgaacactgaatgtgtgtttcagcattctctttcacttctgtgggggaatcaggaactgtagagtattctcccaatcttgttatactgagtcacaggaggaatgatggtggattgagtgacagtccaaacggtggctttatcagcaggcatgcaatctggcatcctttccttttagcacttagattcagcatagataggtgctagtgccctcccaaaaagtcaaaatgctggacatatggtctagacttttatttctcttcctagagatgagctgggagtttggagctttctctctattgtgttgtactgctgagggatgatgagtgagtgcaacaaatttacctgttggtttagatgtgcctggcttgaagcctaccagggaatccagagtctttaaattcacctctgtacttgttacaaaggggatttatctgtgtattattgtcgagctggtgtctccttggagaggagggtggaggggctttgaggctttctattgcatcatcttgctggtgtcctgacaggaattttaaactgggctcctttccccacattgttggagaatggatcctggctgattataggtactcatgaaatactggataaattattatttatcatttacttacaaatacttcaaatttttattatgggaaataagtttttaatcactattaaagtttgttgaagcactaattcattactgtgaaaagtggggaggggaataaaaatcaagcttttgtctatttctcttgcttttcctgtccaaactgtgttttggtgtaatcaataaacatttgagaggaaatgttcttttagaaattattccagctaataaatgaagaaaaaaatgaaagaatgtagtaccctgttataacacctagtaaaataatggttgaaacaagttttctaatgaatgctaaaactatcagttgaaaagttgctgcaaacctttactgtggaggactgtagctgacattaatttcttagctgaagtacaagttggagacagtaggactctttgaatttaaaagggattttggtgtcattattttttcttttacagtctcttttttcacataaaaatcaactattaactgattggttttatggtcttttggaaagagactatataaattctgctttttgtatgaagatctcttttacattgtcagaggaaattttatctctggtaagctctaatttcatctttcaattttattttgaatttctttctttgtcttttgttttatcagcaccttgtttaatttaaaatagattcaatgtcaacagtcaaggagttaactcaggaaactaatttatccagaaatacaaatatttttgcatatattttatcctttgttttagatctttaatatgtaatttctaaaaatgaaatatggacagtttgcttgatttctgagcatagtcaatgaataattttaccaaaataagaaaacatttttcgaggttttttttttttttttttccttgagactgagtcttgctctatcacccaggctggagtggggtggtgtgatcttggcacactgcaacctctgccttccaagttcaagcaattctcctgcctcagcctcctgattagctgagattacagttgcccaccaccacacccagcaaattttttgtttttttattagagacgtggtttcaccatgttggccaggctggtctccaactcctgacttcaaatgatccgcycacctcgacctcccaaaatgttgggactgcaggcgtaagccaccacgcccggcctggagcattttgatataatgaattactggggaaaccttttaatataatattagacagcccatttaaaaagaatccagtataattattatattctttatatgactacatttcacagtgaagtaacttagcactctgtatttataatgctttgaaaatacatattagttgctgattttatattccaaacagaaattataggacaccatattatataaacacaagaattcaatattaattttcacactttaaaacaataatcttggccctgagcagtggcttgagcctgtattcccagcactttggaaggtcgaggcaggcggatcacaaggtcagaagattgagaccatcctggctaacacggtgaaaccccgtctctaataaaaatacaaaaaaaaaaaaaagtagccgggcgtagtcgcaggcgcctgtagtcccgctactcgagacgctgaggcaggagaatggcattaacccaggaggctgagctcgcagtgagccgagatggcgccactgcactccagcctggatgacacagcgagactccgtctcaaaaaaaaaaaaaaatcttttcaatttttaaaattgttctcaaactactcatcagagaaatttaacatctccatttacgtttctatgatgttatacagaaatattttatttctttccccagaataatataggcaaaatctctccttctgactatacacacctggtattgttattttatttaagggtttctatctcttcctattctgaatgattactgtctttttgagctttcttgcagtaaccactttaaatagtctctagacaactttctagattcta

SEQ ID NO: 720130 - DNA, 1306 bp, Homo sapiens
tttcataatttatgtgtaacttttctcacaagctacttgtctgtatagttagattcatccaactgtcatatgttttgtttcttttttgtttcatatatatgttctagttatttttaatgatagaattgaatactattaaatgtatactggatacatttcactacaacctgcagactctgctcttctatttctatgtatgtatacaatgacaatccctacataagccatcaatagcagtattagtcataataacccagaaggggaaagaacctgaaggtctgtgaaaaacagaatgaataaattgcagtgaaaacaaatgcatcatggttrctttcaaccaccaggttaaactgcacaaacataatgttgaatggatgaaaccactaaacaaaattaaaatttgtgattccgtttatataaatgtcagaaagaggaaaatctaatttacggcacagtgagtttggctagtgtttacttttgtaggggattagtgtctagaaggagggaaacaaagggatatctggaattctgtgaatattctttttcttgatctgggtattggctttgtgagtatttggtttgtaaggaaaaaaagactacacactttttttacagttctgatattgcctatataataaaataaaatgcaaaataaacataataaacaacatatgaaatataattagtatgattttatttcaagaaaatatagagggaaaagactggaagaagactgaacaaaacaaaaattgacaaatggtatctaattacactaaagcctttctgcacagcaaaagaaactatcaatgaagtaaacacgcaacatacaggatgggagaatatatttccaaactatagattttacaaaggttcaatatgcagcatccataaggaatttaaaccaatttacaagaaaaaaaaaattaaaaagtgggcaaatgaaagcaacagacacttttcaaaagaagacatacatatggccaacaggcatatgaaaaaacgctcaatattaataattgttagaggaatgcaaatctaaaccacagtaagatgccatctcacaccatttagaatggttattactgaaaagtcaaaacaaacaaacaaacagatgttagtgagactgcagagaaaggtaacatttatacaatattggtgggagtataaattagctcaaccattgtggaaggcaatgtggtgattcctcaaagagctaaaaacagaactaccattcaagccagctatccaattactgggtaatacccagtaaggaatatcaattaccctctcatagaatatcaattat

SEQ ID NO: 720131 - DNA, 649 bp, Homo sapiens
aactggagttcaccagcatatgtcctttaaagaaactctggagtggaaaatgccactaatgtttcttgcagaaataatagaaacttccttgacattgcaaacatactgaacttgatttggatcctagctttgctgcttattttctttataacttgctcaacatctctgagcctcagtttccttgcttctctataccacccacctttcgtaggacttccctgggrattcattcattcaaaaatctacttgttatcatgctaaaagcttttcttattttgtctaatacaatcttagataatcttattgaagatattttcctcacttaacaggagaggaaagtaaagtaatttttgagaacacttggatagtaagttgtaaagccacgaatggaatcctgatctatctgactccaaaatccaagcttgtaacaactatgttctcatttgacaaactaatacatggaagcactcaataaatattctattcagttaatcattcaacaattatgtagaacctattgtatgctggatattcccccaaaagtgtaggtaaagagcatatcagtggagttttcagtgagattaaaaaatgaagtgatctgctatctgcaagatacagaatgataaactaaaaggtcagacttcattcc

SEQ ID NO: 720132 - DNA, 649 bp, Homo sapiens
aactggagttcaccagcatatgtcctttaaagaaactctggagtggaaaatgccactaatgtttcttgcagaaataatagaaacttccttgacattgcaaacatactgaacttgatttggatcctagctttgctgcttattttctttataacttgctcaacatctctgagcctcagtttccttgcttctctataccacccacctttcgtaggacttccctggggattcattcattcaaaaatctacttgttatcatgctaaaagcttttcttattttgtctaatacaatcttagataatcttattgaagatattttcctcacttaacaggagaggaaagtaaagtaatttttgagaacacttggatagtaagttgtaaagccacgaatggaatcctgatctatctgactccaaaatccaagcttgtaacaactatgttctcatttgacaaactaatacatggaagcactcartaaatattctattcagttaatcattcaacaattatgtagaacctattgtatgctggatattcccccaaaagtgtaggtaaagagcatatcagtggagttttcagtgagattaaaaaatgaagtgatctgctatctgcaagatacagaatgataaactaaaaggtcagacttcattcc

SEQ ID NO: 720133 - DNA, 649 bp, Homo sapiens
taaaatggtgtttatgaaataattaaaggcatgaggacatatatcatattaggtgaatgaaataatgtacaaaattgtatctgcaatcatttcatttttgttatgtgtaaatgaaaaacaggatgctaatacattaaattgttaagaattattatcttctggaaggtatgaataggtgagaattttttttgactttttacatagtccaaaaagtcaacaatgagagtgttgcatatttagaatcataatcttattaaatttttttaatcttcaccataatgagtttatcttagatgtataaattaggatrctccaaagaacaaaagatgtgaaaataagagccctaaataaatatgaacaaccatgatttttttaattgaagatattaaacaagaaaagggtacatattaatagcaatcactgcattgtcacatgttgaaaataaagatgtgtctgggattgacataaaagattatttacatctatttatgtaacagtcttctccattttgccttgtaaaaattggattatttccagttggggaacttgactgagtctaactcactcaccttttgagaagccaaactgcgtaggctttctaagactaggtatgaacttataaaatagggatgataacacttacatcaat

SEQ ID NO: 720134 - DNA, 1017 bp, Homo sapiens
gatgcaagcctgtagtcctagctactcaggaggctgaagccagaggatcacttgagcccaggagttcgaatccagcctgggcaagactggatggagttcaaatccagcctgggcaagacaagatgtagtgagactctgtttctgaaataaatcaactagtgggggaattaggataaataatgtcatcacttacgggcagatggccttcccaggatgttatcctcagccaatggggctagggcctaggatgcgcatttcagaataccaacaattccacctggtttggggcactgaatggtttggggaactaaaggttcatctttgtttgcttgtgtaataaaggagcaagctaaaagtcatagtctgagggtaaattgactgaaaaggatggggatcctcaatctgggagacagttttaatatgcttatatcaatctgaataaagcatctggagtaattttaaccgagcstcctctgcattgtgggcttaagtgagacctgatggctcgtccacacggcaatgggtagagagcactgaattccagctactcaggaggctgaggcaggagaattgctttaacccaggaggtggaggttgcagtgagttgagattgagccactgtactccagcctgggcaacagagtgagactctgtctcaaaaaaaagaaaaagaaaaacaaattcttaacatcccaacagaatgctgctactaatagttatcaattgcgtatctattgagtatctattgcgtggagaaagcagggctggagagccaatgccatgtattatagctgggccctggaatcaaacttccaggattgaccccttgctgtcctgtttatggctttgtgatcacgtaacctttctgggcctcaattttttcatctataaaataagagtgggccgggagcagtggctcatgcctgtaattccaacactttgggaggctgaggtgggtaaatcgcttgagcccaggaattcaagaccagccagggcaacatggcaaaaccctatctc

SEQ ID NO: 720135 - DNA, 2158 bp, Homo sapiens
atcacccatatgtcttagactggaggaagactggggcccagtgaaataagctctcacacaagttggaattagtgcatagcagattccatctgtttttgccactggcttccttctccctcatatcaggacaaagttcttgctataaaagaaaaaaaaaaagtcaaaatatcatagtttcattcccacaggcagtttggctttggttatgtatttgactcttagacctgtaccttgtgcccagcactgaggatacaacgcagaatgggacatgccccagcctcctctcagagccactaagatgtggagaattcttgctgaggaacaaacacatgtttttgcctgtctgtggttttcgaagtttaaaaaatgtttgcgccttcatctctgtaatgtacatgtctaggttctttatttttaatttaacttttgccaatgctaatctttgcctgtttgtactaaaggagtaggacgtggtggttgctagccaatttcctgaaaatataaattaaaaggaaaaagtaagacaaaacaggatcccagaaaaggataaggcctgtaacctcaggacttttctacttttttttttcttttcttcctttttttttttttttttttttttttgtgacacggtctcactctgtcacccaggctctggagtgcagtggctcagtctcagctcagtgtgtagcctcaacctcctgggctcaagccatccttccaggtcagctttccaaagtggtgggattgttgacgtgagctactgtgcccagagaggacttttctttttaccctggcagtgcccccgcaacttagcttgttaagaaaaaagatttcactaaatttagttacgaattttatgtagattgcacatgttaatacagtgttttattttccagctcatgcggatgatttattcccatttttcttgagacatgccaaacaaatatttcctgtgttggactgtaaggatgatctacgtaaaatcagtgacttaagaataccacctaactggttagtttctccatttgtggatttgaaattttcagtttctaatcttggatgattcgtggtcattatttttttttattgtattctagataacaaattataaggagtctggattaggttgttttcctaaaataaaaagaggcagttaactcttttaggcaattcactggtatcttaccttgatccggattgagtgtggttttaggttttattagggcagatctagaatagccctgacttaaggatgtygtccttaagtgtaagctatggccttcctggtgttttagctgagcgcctgggtgttaatgagttctttccaccatggctggaactgcaacatcacctagcacttgagacgtctttgagactttccactgaaacccttggtaggctgctcattcctagaccctgccgattcttaccttgtacatggttagcccagcccttggccaggaattcgcagggaacccccacacagacttctgggctctccttctatgcacccttctcttccacagtctattcttcacattttagctgctgaagcagctctgaacttaatctctgctgctcgcttcagtgggactgtcatattctgcttgggttccacctccctatgccttgctggggtgcagtacggctcatcccaagtgttcttttctttcaaggattgcagtcctgcactgccttgtggcccatgtccccacacatttattgcatgtattttgccccactttgtacttgattttttttgtttgtttttgagagagagtctcactctgtcacccaggctggagtgcagtggtgcgttctcggctcactgcaacctgcacctcacaggttcaagtgattctcctgcctcagcctcctgagtagctgggattacaggcgtgtgctaccacacctggttaatttttgtatttttaatagatacgggggctcaccatgttggccaggctggtctcgagctcctgacctcaagtgatcctcctgccttgacctcccaaagtgctgggattacaggcgtgagccaccatgcctcgcctgtacttgtttttagtgggagggcaagtctagtgccagttattccactatggccagaggtagaagactctgttattatatttgtgtatgttggaattcaggggcc

SEQ ID NO: 720136 - DNA, 653 bp, Homo sapiens
tttttaattttttttttttttttgtagacacagtgtcttgctatgttgcccaagctggtcttgaacccctggtctcaagtgattaccctgcctcagcctcccaaagtgctgggattacaggtgtaagccactgcattcagtctacttacgacttttaaaatctcaccctataactttttaaggctattctttataatgtacacattatttatatgtgattttttaaaaaatgagctataactcacataccaaaagactcaccctttaaagtgtataattcagtggttttctgtatattcataaggttgtgcaaccatcatcactaattccagaaaattttcatcactctataaggaaacccatacccattaccagccattctcattcgatccttcccccagcccctggcaaccactaatctactttctgtgtctgtgaatttgccttctggccatttcgcataagtggactyataaagatatataatctcaaaataattaaaatatatgtactgaggaatgtgtgatatggttaggctttgtgtcccaacccacatctcattttgaattataatccccatagtccccataatccccacatgtcaagggagagaccaggtggaaggagttggatcatgggggcggttccccccc

SEQ ID NO: 720137 - DNA, 709 bp, Homo sapiens
gcaattccaaaagagcaatagagacagaatcagattgcagtgagtaggasacggagtggggtataaggaagaaaaggtattgggcataaaccagaatctcagccacaaaggaagattataaggaggaaagggaaagatcagtcagcatgcagagaaaaactgaaagcttttataataaaagacttaatcattactaaatttgttgaaaaggaagaacccaataaagagaatgaaaatgaagaataacagaaaagaccatataagaaagaaaatgagatgcaaagcccagcaggggagatctaccttggataggagtgttgaggagatgtacccaaattcctgtctcaggcttcacttgttgtgaacctcctgaaagacaaagaggaatacacgctaatgcaataaagggggaggatgaaatggaagaaagaatgcagagttttgagggttggtgtcattacagtgagggaatgttcctttagtttttgctgtgttctgaatgaagtggaatggggatgatcctctaagagtgctgaatgagatgatgagtatggagatctgagaagacttacaaggcatgaaatacacattgtggaggaacaaggaatagaaaacggcttactagggagacataggaggattggttggatggtgttctaaacatatacttccatgctcaccttttcccaaatccagttgtaactcctgc

SEQ ID NO: 720138 - DNA, 709 bp, Homo sapiens
gcaattccaaaagagcaatagagacagaatcagattgcagtgagtaggagasggagtggggtataaggaagaaaaggtattgggcataaaccagaatctcagccacaaaggaagattataaggaggaaagggaaagatcagtcagcatgcagagaaaaactgaaagcttttataataaaagacttaatcattactaaatttgttgaaaaggaagaacccaataaagagaatgaaaatgaagaataacagaaaagaccatataagaaagaaaatgagatgcaaagcccagcaggggagatctaccttggataggagtgttgaggagatgtacccaaattcctgtctcaggcttcacttgttgtgaacctcctgaaagacaaagaggaatacacgctaatgcaataaagggggaggatgaaatggaagaaagaatgcagagttttgagggttggtgtcattacagtgagggaatgttcctttagtttttgctgtgttctgaatgaagtggaatggggatgatcctctaagagtgctgaatgagatgatgagtatggagatctgagaagacttacaaggcatgaaatacacattgtggaggaacaaggaatagaaaacggcttactagggagacataggaggattggttggatggtgttctaaacatatacttccatgctcaccttttcccaaatccagttgtaactcctgc

SEQ ID NO: 720139 - DNA, 1642 bp, Homo sapiens
aacttaaggtctgagaagatgaaccgtgctctagagaaaataagagatccggccgggcgcagtggctcatacctgtaattccagcactttgggaggccaaggcaggtggatcacttgggctcaggagttcgagaccagcttggccaatacggtgaaaccccatctctactaaaaatacaaatattagctcagcatggtggcatgggcctctaatcccagctactcgggaggctgaggcaggagaattgcttgaacccgggaggcagaggttgcagtgagccgagatcgagccactgcactccagcctgggcgacagagtgagactttgtctgaaaaaaaaaatgagagagagaaaataagagatcctacagagaactctgaattactaaagccacttatcttagactggccctgtccaccccaggccagaggaaagggtctgtttggatgtttgaaatctaatacaaagtcagatagagaaagtctgtgtgaagagcagccttgcagaaacatacaagccatcaaatcacatttcctacagtttcaaggaaaacattcaccagagcttgtttcctcactctgtcttccacaaatccactggtgccaggaaaatgagagtggaatgggctgtccgttcctggcatcttcactcctgtaaactctgaaaaatcacccatcatattacttgaatcttatattttgaggcctcttgatcaaaatattgaagtcactctataaattaagcattctttctgcatgctgaaaaacaatgtctgtgttaattttttttaatcgatggaaaaaaagtgtttatttatgccaatgaaaaggtgcttccttgaattccttttgcatgtttttttgtttgtttgttttttgagatggagtctcactcactctgtcactcaggctggagtacagtggcacgatctcagctcactacaacctccacctcctggattcaagcgattctccttcctcagcctccagagtagcccctgggattataggcacccaccaccacgcccggcattcttttgcatgttcttcaaatatatttctaaacaattaaatatctattgcaaacacattttaaagtaatttacgatttaggatagtctagtgaatgatttcctatattgtagatttaacctaagtgagttctttaaaaagtcataattaggccggcacagtggctcatgtctataatcccaacatgttgggaggctgaggcaaggggattgcttcagcccaggagttcracaccagcctgggcaacataacaagactccatctctacaaaatataaaacaatttagccaggcgtggtggctcatacctgtaatcccagctccttgggaggctgaggcaggaggattgcttgaccacagaggtcaaggctgcagtgagcggtgattgtgccactgcactccaacctaggtgacagagccagaccctgtctcaaaaataaataaataaataaaataaaataaaataaataaggccaataaataaggccgggagcggtggctcatacctgtaatcccagcactttgggagacctgaggtcaggagtttgagaccagactggccaacatggtgaaactccatctctactaaaaatacaaaaattagcaaggcg

SEQ ID NO: 720140 - DNA, 1642 bp, Homo sapiens
aacttaaggtctgagaagatgaaccgtgctctagagaaaataagagatccggccgggcgcagtggctcatacctgtaattccagcactttgggaggccaaggcaggtggatcacttgggctcaggagttcgagaccagcttggccaatacggtgaaaccccatctctactaaaaatacaaatattagctcagcatggtggcatgggcctctaatcccagctactcgggaggctgaggcaggagaattgcttgaacccgggaggcagaggttgcagtgagccgagatcgagccactgcactccagcctgggcgacagagtgagactttgtctgaaaaaaaaaatgagagagagaaaataagagatcctacagagaactctgaattactaaagccacttatcttagactggccctgtccaccccaggccagaggaaagggtctgtttggatgtttgaaatctaatacaaagtcagatagagaaagtctgtgtgaagagcagccttgcagaaacatacaagccatcaaatcacatttcctacagtttcaaggaaaacattcaccagagcttgtttcctcactctgtcttccacaaatccactggtgccaggaaaatgagagtggaatgggctgtccgttcctggcatcttcactcctgtaaactctgaaaaatcacccatcatattacttgaatcttatattttgaggcctcttgatcaaaatattgaagtcactctataaattaagcattctttctgcatgctgaaaaacaatgtctgtgttaattttttttaatcgatggaaaaaaagtgtttatttatgccaatgaaaaggtgcttccttgaattccttttgcatgtttttttgtttgtttgttttttgagatggagtctcactcactctgtcactcaggctggagtacagtggcacgatctcagctcactacaacctccacctcctggattcaagcgattctccttcctcagcctccagagtagcccctgggattataggcacccaccaccacgcccggcattcttttgcatgttcttcaaatatatttctaaacaattaaatatctattgcaaacacattttaaagtaatttacgatttaggatagtctagtgaatgatttcctatattgtagatttaacctaagtgagttctttaaaaagtcataattaggccggcacagtggctcatgtctataatcccaacatgttgggaggctgaggcaaggggattgcttcagcccaggagttcaacaccagcctgggcaacataacaagactccatctctacaaaatataaaacaatttagccaggcgtggtggctcatacctgtaatcccagctccttgggaggctgaggcaggaggattgcttgaccacagaggtcaaggctgcagtgagcggtgattgtgccactgcactccaacctaggtgacagagccagaccctgtctcaaaaataaataaataartaaaataaaataaaataaataaggccaataaataaggccgggagcggtggctcatacctgtaatcccagcactttgggagacctgaggtcaggagtttgagaccagactggccaacatggtgaaactccatctctactaaaaatacaaaaattagcaaggcg

SEQ ID NO: 720141 - DNA, 605 bp, Homo sapiens
gagagatcagagacaaaactggaatgactgaggaaattcttttcattcggttttcaggaaaaataagttgatgatatgttagaacagaacaccagcactgctctattgagtctttaggaactctgagtggatggatgctctggtctgattctcttgctgattttattctacattggcataatctgtgttcttctcaacagtaagcagttcctttagttatattggttatctgtggctgtgtaaaaaaaatacctcaaaacctagtagggtactgttcgtgatactatgggcagacaacttgggcggggctcagctaagcagagttttggctggtctcagctrgggtcattcatgagctcactctaatctgatggattgcctgggatgattggtccaaaatggcctcaagtgcaggagttcaagaccagcatggaaactatagtgagacctcgtctctacaaaaaaaaaaaatttttgccgggagcagtggctcacacctgtagtcccagcactttgggaggccaaggtgctcagatcacctgaggtcagagttcaagaccagactgaccaatgtggtgaaaccttgtctctactaaaaatacaaa

SEQ ID NO: 720142 - DNA, 428 bp, Homo sapiens
tgggtagtttataaagaaaagaggtttaatggcctcatggttctgcaggctttacagaaagcatgatgccagcgtatgctcggcttctagggaggcctcaggaagcttagtcatagtggaaggtggagagggagcaggcacatcacatggagaaaagaggaacaagcaagagatctcagagtgagaggtcactcatcaccaaagggatggcccaagccattcttgagggatctgcctccatgatccgaacacctcccaccaggctccacctcyaatattgggaattacatttcaacatgagatctgggtggggacaaacatccgaactgtgttagcctctatccttagagacccccaggctttgagaagccccttgtttgggggacagataagatacacaaatacaaatatgcaaagatgtacaacag

SEQ ID NO: 720143 - DNA, 1236 bp, Homo sapiens
taagggccttaaaatcagatcagggctcatatcttagccctgtgtgtttcctcaccgtgtgacctcagacaggtgatttcaattatctaagtctcagtggtctctgctgtcaagtgggctaatgacactttcctcactaggttgctgggagtatttgatgagacaatgcacataaagcatccgctatggggccctatatacagtaggtgctcaatcaatggcacctgtcatggaagaggaccaccaaacgccagcccaagagttttgactccagccattcgccctaaacccaagtcctaggggccaagacaggtgtctggggcagaaggtggcccctcttctcatcttcccaggctgccccatgaagcactcactacattggatgtggcaaccggtgatgctggaattgcatcggtgccacttaggggagcgctggtgaggtgtcaagagggagtagcagcaatcatgcgggagacagcacctgtggggagatccaggctgggtccagggcacacagccctgcagctggtcccaaagtggcgcatgtcgacacttccagtccttgcctgggtggtgccctctgcctggaacgcctgtccccctaccccaccggcaaaatccctccctccccgtaggctgcctcgtgcacttcccctgtttccccagcagaggttctcctttctcttctggttcccacatcatcctgttgattcatccgctcaaacactcgcagttagtgcttcaacacacatttagtgtgccaggcctgggctaggcactaaggccaccacatctccaccaccacctgttagtctctcagggactgacatgcaagaagcaagaactccacactgtgatgagaacaggaggccagtgaaagcattttgagttgaaccaagaggttgtggtggctcacatctgtaattccagcactgtggtaggccaaagygtgaagattgcttgagcccaggagtttgagaccagcctgggcaacacagtgagattccgtctctacaaaatacttaaaaattagctgggtgtggtggtccacacctgtaatctcagctactcaggaagctgaggtgggaggattgcttgaacccaggaggttgaggctgcagtgagctgtaatcatgccactgcactccagcctgggtgacagagtgagaccctgtctcaaaaacaaaaacgaaagcagctatgtctaagcaggaaggtggcagtttgccatgagcc

SEQ ID NO: 720144 - DNA, 1221 bp, Homo sapiens
tgggcctgttaacacccagttcatgataggcaactcaggtctcatgataacttggtaacctgaggtcaagcattcagtgtctaccaagacctgctggcaagccagatactgtttctcaaaaggagagtagtcctctgcagttgatgacatggctttgctccaaaacccttaaggtctgccctatgctttacccacagatgcccctctgagcttccatgtagcatctctatgtgcatatacacgtcaagcaccattggatctgctgggtcatacacccaagtggcagagccacttgcatggcagcctggacctttttgttctgggccccactcaaaacaagcaactattcagttcgattggtaagtgggttgaagtggtacttcattggtatcactggtaaatggtacttcagtggtactttgacctgaaacatgagctactctctaaaatctgaagtgcccacaaggcactgtgcttccttctcaatagatgggagggccagatgctgtgacttgccctaccttttgaaagggatatctcaacatgccccagactaaagaacccctggaaaatgccactgcagtagcaggcccctgaattcttgtgggatttctcccccctaaggcaaatacatgtcatacatgtcatcaccaatgctgacgtcctgtgggatgcaaagataatcaaggtccctctggactagatgatggcatagagctggagagtcaatgtaatcctgcagttggaaagtgtaagtgtattgctgtccctgcaagctgagagcaaatgcttctgacagttttactaataggtataaggaaaaagtcattctgcagtggaataattaaaaaataggtgccaggggatgtgttgattggctccagcaacaaaactacagcagctgtgattggaggcattgcttgatcaaatttgcagtactccactgtctttctctaacaggcatctgtcttccatacaggcaggcaaagaagcattcatgtcctgtatgcagattttattttgtagaggcagggcctcattatgttgcccaggctagtctcaaactcmtgggctcaatgaatcctcccactacagcctcccaaagcacgaggattataaatgtaatccatcatgactggccctgtctgtggatcttgagtgagattttaaagacttgagaccatcactttctttttccaagttctccaacccataataata

SEQ ID NO: 720145 - DNA, 632 bp, Homo sapiens
ttcaaaccacagcaaggtctcttcaggaaaatgatcaaccttgtgttcagcttggccaagatggccccttgcttaagttcccagaactgcagaaagttagttcttagtactaactttcagtcccttatgtgacctttctgcaaagatccagtcatccagaggggtggcatcagattgtatcaggccgtccagccctatagaccccaaacttctgtatactcttcatcccctgggactattacattgcaggtctgacaacttttcctattccatctttgaaacataaaaagttctcattatttctcacttccaacaaatagggctacccaccgacttcttcatactggtcacccggatggtctctagggggctctattgccktcaggaggagggaactacttgcagtgctttaggacagtctgtattcccagactttctgacaccttttttagtagagaagagaagctggagggggagatggagaaggaagaatgaggagaacactataatagaagctaaatatcggcagatcattctactacacagctcttcacactgactgtataggcaaatttcctgtttatcctgagcagaaggcagccttccttctctaaattgtacctactcaaaaa

SEQ ID NO: 720146 - DNA, 1288 bp, Homo sapiens
tacctggaatagatgttcttcaggccgctccatacgccacagtgctataagtacacatgcacttaaatagcctttgccacacgtcagactctgcactgagctttttttatacagtagcttatttaatgcttacattatttcttcatgtgaactactattattatctcatcctatgaggaagaaactgaggcacaaagaaatcatagagcttgtgtgcagaggtgctggaggtgcgaacccggccatgggcctcctgggtctgtacttttcaacactgcctgagactgtgaataaaagacaatactgggcatatttcagccctttctcacacctaaacatatcctagcgatgtatttttgttgttgttcttattttttcttctcttaatcacacaggatttgctcacttggaaactggttaaaaacaacaggttttttttttttttttttttttttggcatcaactactaaaaaggcatcaaatggaaggaaatctattggttacaatatttcctctggggaactctaaagacttttggggtatactgtaatctcctacaatgaccttttctaaggctctgcaaaaaaattaataaagtggaggaaatggagaaggaacacttatcgtgtttgatttttcattgactttggtgttgcggagatgttaacggtgtcctgtcaggagactcagtggagcatcacagttgcagatttgacatgtgtttttattcattcctttggccctcccaacagaggcccctagagtctcagggctagaggaggggatgccttgtgccacttgtggattccataaagacggagttttgttttcctaaacgcatttaagatctttctctgtccactttactccatcctccctgaagaggtggaatgattcaccagagtgacaaattctggaaaattgtactggcttagctcagtccctcattttcacccagtcctcatcgcctttggtgagctggagaaaggagctaggagtggcatctttctggtccattctcacctggcaatgggccatgtgcagaagtctgctgtggcagaggtttctggtttctgcaccccatctttttggctcacagctgcaraaattcaagttcagactagtatggcagaatcctccctccaagacacattccaagtcttgccactttttgcctctgggacactctgaagctgaataagcctgtttggccaacaaacctgtgcagcagaaatgctgggcatagccaggcatggtggttcacacgtgtggtcctagatactcagga

SEQ ID NO: 720147 - DNA, 1442 bp, Homo sapiens
cttctcttttgggatttatataccatcaccactccttcttccctcatcatcaccaggaataattaagaaatctgtgatctttaaatgcagacggtattattatgttggcggaaatacatatatgtctacataaacttttctgtgtctgcgtgtagtcagtgactaaaggtgaattaaataaccgaaaaataaaactgatataattgtataaacaaaagctgtttaaggatgacatgcttttcaaccttaaatatccctttagcaaataaaacactgaaataaaaattttgaaatatagaatgtttttctatgattattatgaatatatgatgttggtgtgagacaataatgttgatttctctctttaattaagaataatcattttcctttttaatgatctcttttgatagcccatgtcagctactatacatgaggtctgattctttaaaacttattcaatttcaaaccacttctttcaataaattatttattaacacaccgtgttaggcaccaggaagaacaaagatatgaataaaacaaggtctctgcctttattttgaatgtagttttacttacctaaagcagatgcagatgggaggctgtggaagaacctctattcaaaggttatctgttttgttttaattaatgagtttgacaaattaccctagttagatgacaggtgccaaaaaagacaaaatacagcagctgtaagtgtactcacacatagacaaccacagacagagacacatgcagtttgctatcaatttacaaaggtaagttactgtctcacaattataaggcataaacatgcaaatacattcctgcttatttgatcaacattgattakttctttcaatggaaaatggaattatttattgtaaagcaaaacgtaatttttgaaaatttgcaaatatataaaatgtacaaaaggcaaaatcttactatttaccattttttggcatctctattaaaaaatatgggaatcacgccgggcatggtggctcacgcctgtaatcccaacactttggcaggccgaggtgggcggatcatctgaggtcaggagtttgagattagcctggccaacatggtgaaactccatctctactaaaaatacaaaaattaactgggcatggtggtgggcgcgtgtaatcccagctactcaggaggctgaggcaggaaaatggcttgaacccagaaggcagaggttctgctcactagcagagatcacgccactgcactccagcctgggcgacagagtgagactccgtctcaaaaacaaacaaacaaaaaacacatgggaatcaactgaaaatataatatgtaatatcctatgaattaagtgaattaaatttcattgttagaggtttccataaggcaataacatttactgcttttatttttttgagatactgttaatccataactgaacagcaaagaagaca

SEQ ID NO: 720148 - DNA, 1442 bp, Homo sapiens
cttctcttttgggatttatataccatcaccactccttcttccctcatcatcaccaggaataattaagaaatctgtgatctttaaatgcagacggtattattatgttggcggaaatacatatatgtctacataaacttttctgtgtctgcgtgtagtcagtgactaaaggtgaattaaataaccgaaaaataaaactgatataattgtataaacaaaagctgtttaaggatgacatgcttttcaaccttaaatatccctttagcaaataaaacactgaaataaaaattttgaaatatagaatgtttttctatgattattatgaatatatgatgttggtgtgagacaataatgttgatttctctctttaattaagaataatcattttcctttttaatgatctcttttgatagcccatgtcagctactatacatgaggtctgattctttaaaacttattcaatttcaaaccacttctttcaataaattatttattaacacaccgtgttaggcaccaggaagaacaaagatatgaataaaacaaggtctctgcctttattttgaatgtagttttacttacctaaagcagatgcagatgggaggctgtggaagaacctctattcaaaggttatctgttttgttttaattaatgagtttgacaaattaccctagttagatgacaggtgccaaaaaagacaaaatacagcagctgtaagtgtactcacacatagacaaccacagacagagacacatgcagtttgctatcaatttacaaaggtaagttactgtctcacaattataaggcataaacatgcaaatacattcctgcttatttgatcaacattgattatttctttcaatggaaaatggaattatttattgtaaagcaaaacgtaatttttgaaaatttgcaaatatataaaatgtacaaaaggcaaaatcttactatttaccattttttggcatctctattaaaaaatatgggaatcacgccgggcatggtggctcacgcctgtaatcccaacactttggcaggccgaggtgggcggatcatctgaggtcaggagtttgagattagcctggccaacatggtgaaactccatctctactaaaaatacaaaaattaactgggcatggtggtgggcgcgtgtaatcccagctactcaggaggctgaggcaggaaaatggcttgaacccagaaggcagaggttctgctcactagcagagatcacrccactgcactccagcctgggcgacagagtgagactccgtctcaaaaacaaacaaacaaaaaacacatgggaatcaactgaaaatataatatgtaatatcctatgaattaagtgaattaaatttcattgttagaggtttccataaggcaataacatttactgcttttatttttttgagatactgttaatccataactgaacagcaaagaagaca

SEQ ID NO: 720149 - DNA, 589 bp, Homo sapiens
cagatccatttggccccaggcttctgagaaaagggataattatatgactaacataaggaattgttaagcttaaaagattcctttttgttttaagttcccactttgggaagcacataactacttcagtgcactaactacatgcctcattactacttaagggtatattagattaatttttattttaacttgaaataattttattctcaaagcaggaaatatcttttaactygaaatgtgttgaagtaaatggtgaacgagtatcaaattcatcagaaaatatctacaataatatgaatacgaataacaaaggcagcagctaatattcattgagctcttatcatgtgctgtgtattgtttttatcctcacaaccaccctacaaggtagacagggacccttacatgcatttagagatacggaaactatgcctatggtcaagagctagtaaaagtcagagtggggtttcacacccagacagtctgattcctagtacctgctctatgattcaattatgcttttcatatgaaaacaggaaatctactttactaaatcaagaagtaccaaaggtaagcaattcaggaatgacttgaa

SEQ ID NO: 720150 - DNA, 946 bp, Homo sapiens
tgatatccctaagtatattcatgtcatatccattgcttagccctcccatcatagtgattctcttgtcttcatctccaccaccagcacttgaccccaaatttgtcacctggatttctgcagtcgactcctaaatgagagggcagtgtctactctggctttctttcagtctttttcctgttccaatccctgagctgcatggcttctactcaccctgcacacctcagctttttttttttttttttttttgagacagagtttcgctcttgttgcccaggctggrgtgcaataacgcgacctcagctcactgcaacctccacctcctggattcaagcgattctcctgcctcagcctcctgagtagctgggattacaggcatgcaccagcatgcctgactaattttttatttttgtagggatggaatttctccatattggtcaggctggtgttgaactcccaacctcaggcgatctgcccacctcagcatcccaaagtgctgggattacaggcatgagccactgcacccggcccacacctcagctttgctacttccctggggaagccttcccaggtcttcctacaagtccttaaagaatcgtgtatctctccttcacagaacttattaatttatatttctttaggtgattatttaatgaatgtctttgtgtcttcccaactgaagtataggctccaaaagaggaagtatttgtttttgctccccaggtgtcttgagtattcaaaattttattgaatgagtaattttcataaatattaatattcttaagaaaccatctaaaatccatctctgtggtaccctgaaacgattttagaaacactataacaataataaaaaaaaataggtacagagtacttactggcatatcaagtcaaaataaacaaaagggcaattggaaggagatgtaaaacttattttttcccaagtttgaaa

SEQ ID NO: 720151 - DNA, 926 bp, Homo sapiens
aggtgtctgatagacaatgctgagactttgaagatgtctaatacagaataaatattcaataaatgcttgaatttacaattaaaatgtataaataggaatcatattttgtcagtaatattatcagttcaaaatataactactgttaatggtactaaatagatccgtaagaaatagagctctagaagatattcatatacgattgactcttgaacaacacaggaattggggtgctaacccctcccattgaaaatctatatacaatttttgactcttcaaaaacgtaactactaatagcctactgttgatcagaagccttactgataacatagttcacacatattctgtatgttttatgtgttacatatgtattattacaataaagtaagcttgagaaaagaaattgttattaagaatatggtaagagccaggtgtgatggtctgcgcctgtaatcccagctacctgggaggctgaggcggaaggatggctgagcccaggagtttgaagctgcagtgagctatgatgatgctgctgcactccagcctgggcaatagagtgagaccctgtctctaaaaaaacagaagaatatcataaggattatatttactactcattaagtggaagtcggtcatcataaagttattsctcctcatcatcattacattgaatagattgaggaggaagaggaggggttggtcttgctgtctcagggatggcagaggcagaaaaaaatctgcgtataagtggaccctcccagttcaaacccatgttgttcaaaggtcagctgtattcaaaatctatttacagttctctttcacagaattggcaaggcgtattatttcttacagtaatgagcaagtcatgaaactaggctctgctgttttttccacttcaaggtttgtcaattaacagatgaacagatccatca

SEQ ID NO: 720152 - DNA, 1121 bp, Homo sapiens
attgtactttataagatacaatttcagtatcttaattgtattgggagaccatttcaagtaatgcaaaaatccaggactgattgtacaagataatagcactgtagatggaggaaaggtgttagatttttctctttgcatagctatgaggtgtgagaaaacaaaaagccaaaaataacgacacagtttttgccctgagtaattgagtgtttgaattgtcattatttaagatgtgatcagaaaaggtttaaggtgaaagatcataagctctgttttacacaattttcttttttttttagtttgagatgtctgtttttccatgttcaaacaagattctgaggaggcatttgaatatgggagcaaccgcttctttatactaatgaatgtttagttctaaaaactgcaggtggtggcaaactctgtgccaacacatattttggcagaaattgctataaatttgtatcttcaaaggtttttcatttaacacaacttggtagcttctatctgtctcacaaccattgaggacattgcctcatacaccaaaacagcccaaacaaatggtgttcctgcatatgtgtcttctcaatgaagctctcccgcctgtrcagtacaaatgcccagacagcactgcaggtgcttctcatccagtgcaaccactgagttgggccaatggaaataatatcatcatggatcttcccaaatgattcttatgtgtacttaggtttgggaatcactgttttagacttcatggttctcaaacttcagtatgcactggcaactctggtatgcgagaattaaacataacaaatgtgagaggactttacagagaaaaaaagagagaagactttacaagtgtcagatatgaattccagtgccaaaatgttttattattttttttccagcttggataggttggattgtgagtgagatttatgtaacaatccaccactgcaaacctgtaaattctatgttcccataaatgcatccggatctatacacatacacatgttataggaagtttcattctgaaattagacagcgataggttgataaatatctctagtctttgaagttttaagaaacacacacacacacacacacacacacacacacacacacacaca

SEQ ID NO: 720153 - DNA, 1299 bp, Homo sapiens
tgacataaaaagccgaagtccatctaattttaatgttaaaaccctgtcccaaagtgaacatgggatgtatgttagatatatgttaactcactgcacatgtgcttgactttttttaataaatattcacagacattcccaaacctgatgaatattcatggctatgcatggagacagaccactgaaggcttaaatgacaatgtattcttcctttctacaaagtatgtgttttcaatttcctcagaagcttcatttccccaatttacagattgtcactcagaaaataaagttttctcccttttccttactccacagatctcatgggcatttgttaacacctgattacatctgacagaaatgtgctaaaacggatcaatttgtatctatttgaaaaagttctcactaattaagattgttgtattttcatgaaatattagataaacactacaactcacactcttattctctctggtaataatatgatattttgaaaatataattaaatttagttatcttgaaaatgtattttttttttgtttttaaacgattggtaaaagagagtttatcaattttgttttcaacagaatgagtttcataggttcctacatttttttggtacttatttttaccctgttaggaaatgtcagtaaatgaataaaagctgtgtcctcttgataagagaaaaaaaatcgaattggtcccttctcaggattttcaatttattttgaaattgtctattagcattactacttacaagatttgtgtcagttgtaaytaagctatctcatcattattggaatggcacaggagattaacactgcatttgttttgaaggccactttctcgtacaagagatatatggatcgttttcttgtgcagcttcttatagcttcttctatgtagcttcagaaagaatgataccttaaatatttaccgtagagaggtgacagacagaggaaagatacaatccacaacagagaaatatattagtaaaagccattgtgctaactccttcagtgagcacctcctctgtgttgagacaactgtagtcactgggaatacagtggtaaccaagactgatactgtattggccactatcatacttcaaactatttggatatagaggagagaacattgaattccgaattcaaaacggagtgcaatcaaaagctcaaattagcaagcccccaagagaaatggcaaacaaaaggacttgacttcagtggaaaatatcatttagaggctgtgaagtaagattctggagtggtgaagaggaagggaaaaggagtggctaaaatactg

SEQ ID NO: 720154 - DNA, 614 bp, Homo sapiens
tgaatatccccttattttaccttttatcctagtagaacaaaagtacttttaaaataaatgtattgtttgtgaaactgcccaataataataatgaggatgataacaacttacctatcagaacctgcctgactttaattattttgctaaattctcgcaactgctgaatttgatgtcattggccttattttaaagatgaagaaattggtacttagagaccattaataacttgtaccaagcagtggatctaaactggaacccaggtctttctgattgcagattgcaagctctgaactgctaagctagacacttgtctttttaaagtaagaattcttccactgagggaggtcatagctacaggaaattcagcagcatcctctcttctgcagaagaattatgatttctgaattatgaaactcactgactagactcttaytggaaaaaaatcattagagatgacaaccctcctgtccaggaggcaagtaaatgtattgtttcaatagagaatatgttgcgtttgtgtctaagacagtgataattacgtcactccctaatgcatggaaaagaagcctttgctgtttctagtaagctgtttacagcaagaactttatagaata

SEQ ID NO: 720155 - DNA, 614 bp, Homo sapiens
tgaatatccccttattttaccttttatcctagtagaacaaaagtacttttaaaataaatgtattgtttgtgaaactgcccaataataataatgaggatgataacaacttacctatcagaacctgcctgactttaattattttgctaaattctcgcaactgctgaatttgatgtcattggccttattttaaagatgaagaaattggtacttagagaccattaataacttgtaccaagcagtggatctaaactggaacccaggtctttctgattgcagattgcaagctctgaactgctaagctagacacttgtctttttaaagtaagaattcttccactgagggaggtcatagctacaggaaattcagcagcatcctctcttctgcagaagaattatgatttctgaattatgaaactcactgactagactcttattggaaaaaaatcattagagatgacaaccctcctgtccaggaggcaagtaaatgtattgtttcaatagagaatatgttgcgtttgtgtctaagacagtgataattacgtcactccctaatgcatggaaaagaagcctttgctgtttctagtaagctgtttacagcaagaactttwtagaata

SEQ ID NO: 720156 - DNA, 2860 bp, Homo sapiens
ttctttttttagcggggagacagagccttgcttggtcataaaggcyggagtgcagtggtgcaaccttggctcactgcaacctctgcctcctgggttcaagcaattctcatgcttcagcctctggagtagctacaggcatacaccaccacacctggctgatttttgtattttagtagggatggggtttctccatgttggtctggctggtctcaaactccaggccttaagtgctctgcccgtctcagcctcacaaagtgctgggattacaggcatgaaccactgcgcccgacccttacctagtttttattcctaactttcagaggtcataactgataatggtgcaactgcacaactcagtcgctgggaacccatagttacagttaggaccagggcacaaaattcacttacatgtagaaattctcagcaccctgcttagacagttgcatgtatcttgcacatatatcagactgcttgattcacagcaggacacatcaattcattgtcacccagctgtttgctctgttcttaaatgttagatgctaaaatctggcttagttagtgaagaattaaataaatgaggtgagaagttatcttttctgtggtagttgatgtcgttaatgatataataaacagtaccagcacactcctgttctaaggatgaaccattcaaataaataaataataaaaggacaacgtaatagggacttactaggtctcaggcactttgctaagctcttatgcatgaactcatttcataataccttctgaagtaggtgctactattttcttcatttctagttaaagcaacagaagcatcagtaggttgactcaagttgacagctagaaaatgtcagactctagatcgaagtgtaggtctatcttacttcacaactggagcgctatttaacacaccttaggattgtagattgttttggtcagagatgatttcttatgttctagttgaggagtcggcaatattaggcaccaagtgaataaatgagtcatggaagaaaaaggggcactgttaagaaccttttgaagtctcctttatatgataatctttttagcactgttctagtgtggtagtttataacttatggggataacatgtattaaagaaattgttcatattattctggtgtgtttacaggtggttgctgtatatggaactttatctgatttgctttctgtggccagcagtaaactcggcataaaagccaccagtgtgtataatgggaaaggtggactgattgatgatattgctttgatcaggtaaccttcacctttttataagctgtcaacagtgtgcctcaacttcttggtgctatgctgtttcccttaagcagtaatttaatcactgttaagagtacaggattttggcaagtgtttacctagaatttgctctttggaatttaaatcatttgggcttaaggtgaattgatcagctagaaaacccttagtacatttcagtatactgatagtctttctgcatagttcatatatagctatgaggaatttcttctttgtggtactagagaaggatctagtaagacgtgcagtttttaacattaaaaatctaattcatctcttcacttttatatgcgcctgcttgttaatcatttcctaagaatgctttgcattttataatcattacaaaggccagattttgtaaaaactttataaatatgatagaattctaagtagtgatatcaccagtgatccaccataattataggcttatgtttgtaccttaaatatctcaggcagatttatctctttaaaacaagtgtgtagttcaccttacttcatcttcatgaggtcagagaattttggagcaggaagatgcttaacaaagaagatggtaaagggaacacaaattaagtattgactatgccacttatgttatcattgctttgcctgagttataccatttaattggcaaaacatgagttttttttatcagtgatgtgaagataatgatgctttaacctataatgatatacaaagtctctgtataaatctagatcaaaatgacctttcagtataatatactgctttgcagttaatcagttctagacccttcattttacagatgaggaaacgaattacctgtgaagctgaggactcactcaggtcatacagctagttgggttttgttaatgaaaacagatttttatactaatctgaaaaagtaaactggcatggtgaacaagtaggaaatactatacactacattttaaatccaaataaattaggataacttcttagtttttcaatatgtatctcccagcttctttcagtttctaaggaaaactgagtcacattgttggatgatgatcctcatcaacctaactttcttcttaacaaacacaaactctgcttcttagaaaaatttaacgtgtcctgtgatgtcctataggaaataaaaacgtctacaatggaaggttataattgaagccttctgagctataagatatctgtttattcatttttggttcacaatacagtatctggggtaatgggttgaggaagaggatgtgcactgattgtccagaactgtgggttatgtgcagccatttacatttgggtgtatggtggatgtgtagtgggtaaacactgacagtagagttacttccagctatatttttcctagatttaatatgacagtttatttcatctccaaagcacacaacagctgatgatttaggggtaaaaaatgtaaagaaaaaaagaatagttggctgtgactttaatctatcctttcagcataattattcattctcaattgataagaaagctgaactcaacatcgtttgtgtaaggagatttttttccccacatttcaaaagtactttcatgt

SEQ ID NO: 720157 - DNA, 2860 bp, Homo sapiens
ttctttttttagcggggagacagagccttgcttggtcataaaggccggagtgcagtggtgcaaccttggctcactgcaacctctgcctcctgggttcaagcaattctcatgcttcagcctctggagtagctacaggcatacaccaccacacctggctgatttttgtattttagtagrgatggggtttctccatgttggtctggctggtctcaaactccaggccttaagtgctctgcccgtctcagcctcacaaagtgctgggattacaggcatgaaccactgcgcccgacccttacctagtttttattcctaactttcagaggtcataactgataatggtgcaactgcacaactcagtcgctgggaacccatagttacagttaggaccagggcacaaaattcacttacatgtagaaattctcagcaccctgcttagacagttgcatgtatcttgcacatatatcagactgcttgattcacagcaggacacatcaattcattgtcacccagctgtttgctctgttcttaaatgttagatgctaaaatctggcttagttagtgaagaattaaataaatgaggtgagaagttatcttttctgtggtagttgatgtcgttaatgatataataaacagtaccagcacactcctgttctaaggatgaaccattcaaataaataaataataaaaggacaacgtaatagggacttactaggtctcaggcactttgctaagctcttatgcatgaactcatttcataataccttctgaagtaggtgctactattttcttcatttctagttaaagcaacagaagcatcagtaggttgactcaagttgacagctagaaaatgtcagactctagatcgaagtgtaggtctatcttacttcacaactggagcgctatttaacacaccttaggattgtagattgttttggtcagagatgatttcttatgttctagttgaggagtcggcaatattaggcaccaagtgaataaatgagtcatggaagaaaaaggggcactgttaagaaccttttgaagtctcctttatatgataatctttttagcactgttctagtgtggtagtttataacttatggggataacatgtattaaagaaattgttcatattattctggtgtgtttacaggtggttgctgtatatggaactttatctgatttgctttctgtggccagcagtaaactcggcataaaagccaccagtgtgtataatgggaaaggtggactgattgatgatattgctttgatcaggtaaccttcacctttttataagctgtcaacagtgtgcctcaacttcttggtgctatgctgtttcccttaagcagtaatttaatcactgttaagagtacaggattttggcaagtgtttacctagaatttgctctttggaatttaaatcatttgggcttaaggtgaattgatcagctagaaaacccttagtacatttcagtatactgatagtctttctgcatagttcatatatagctatgaggaatttcttctttgtggtactagagaaggatctagtaagacgtgcagtttttaacattaaaaatctaattcatctcttcacttttatatgcgcctgcttgttaatcatttcctaagaatgctttgcattttataatcattacaaaggccagattttgtaaaaactttataaatatgatagaattctaagtagtgatatcaccagtgatccaccataattataggcttatgtttgtaccttaaatatctcaggcagatttatctctttaaaacaagtgtgtagttcaccttacttcatcttcatgaggtcagagaattttggagcaggaagatgcttaacaaagaagatggtaaagggaacacaaattaagtattgactatgccacttatgttatcattgctttgcctgagttataccatttaattggcaaaacatgagttttttttatcagtgatgtgaagataatgatgctttaacctataatgatatacaaagtctctgtataaatctagatcaaaatgacctttcagtataatatactgctttgcagttaatcagttctagacccttcattttacagatgaggaaacgaattacctgtgaagctgaggactcactcaggtcatacagctagttgggttttgttaatgaaaacagatttttatactaatctgaaaaagtaaactggcatggtgaacaagtaggaaatactatacactacattttaaatccaaataaattaggataacttcttagtttttcaatatgtatctcccagcttctttcagtttctaaggaaaactgagtcacattgttggatgatgatcctcatcaacctaactttcttcttaacaaacacaaactctgcttcttagaaaaatttaacgtgtcctgtgatgtcctataggaaataaaaacgtctacaatggaaggttataattgaagccttctgagctataagatatctgtttattcatttttggttcacaatacagtatctggggtaatgggttgaggaagaggatgtgcactgattgtccagaactgtgggttatgtgcagccatttacatttgggtgtatggtggatgtgtagtgggtaaacactgacagtagagttacttccagctatatttttcctagatttaatatgacagtttatttcatctccaaagcacacaacagctgatgatttaggggtaaaaaatgtaaagaaaaaaagaatagttggctgtgactttaatctatcctttcagcataattattcattctcaattgataagaaagctgaactcaacatcgtttgtgtaaggagatttttttccccacatttcaaaagtactttcatgt

SEQ ID NO: 720158 - DNA, 2860 bp, Homo sapiens
ttctttttttagcggggagacagagccttgcttggtcataaaggccggagtgcagtggtgcaaccttggctcactgcaacctctgcctcctgggttcaagcaattctcatgcttcagcctctggagtagctacaggcatacaccaccacacctggctgatttttgtattttagtagggatggggtttctccatgttggtctggctggtctcaaactccagrccttaagtgctctgcccgtctcagcctcacaaagtgctgggattacaggcatgaaccactgcgcccgacccttacctagtttttattcctaactttcagaggtcataactgataatggtgcaactgcacaactcagtcgctgggaacccatagttacagttaggaccagggcacaaaattcacttacatgtagaaattctcagcaccctgcttagacagttgcatgtatcttgcacatatatcagactgcttgattcacagcaggacacatcaattcattgtcacccagctgtttgctctgttcttaaatgttagatgctaaaatctggcttagttagtgaagaattaaataaatgaggtgagaagttatcttttctgtggtagttgatgtcgttaatgatataataaacagtaccagcacactcctgttctaaggatgaaccattcaaataaataaataataaaaggacaacgtaatagggacttactaggtctcaggcactttgctaagctcttatgcatgaactcatttcataataccttctgaagtaggtgctactattttcttcatttctagttaaagcaacagaagcatcagtaggttgactcaagttgacagctagaaaatgtcagactctagatcgaagtgtaggtctatcttacttcacaactggagcgctatttaacacaccttaggattgtagattgttttggtcagagatgatttcttatgttctagttgaggagtcggcaatattaggcaccaagtgaataaatgagtcatggaagaaaaaggggcactgttaagaaccttttgaagtctcctttatatgataatctttttagcactgttctagtgtggtagtttataacttatggggataacatgtattaaagaaattgttcatattattctggtgtgtttacaggtggttgctgtatatggaactttatctgatttgctttctgtggccagcagtaaactcggcataaaagccaccagtgtgtataatgggaaaggtggactgattgatgatattgctttgatcaggtaaccttcacctttttataagctgtcaacagtgtgcctcaacttcttggtgctatgctgtttcccttaagcagtaatttaatcactgttaagagtacaggattttggcaagtgtttacctagaatttgctctttggaatttaaatcatttgggcttaaggtgaattgatcagctagaaaacccttagtacatttcagtatactgatagtctttctgcatagttcatatatagctatgaggaatttcttctttgtggtactagagaaggatctagtaagacgtgcagtttttaacattaaaaatctaattcatctcttcacttttatatgcgcctgcttgttaatcatttcctaagaatgctttgcattttataatcattacaaaggccagattttgtaaaaactttataaatatgatagaattctaagtagtgatatcaccagtgatccaccataattataggcttatgtttgtaccttaaatatctcaggcagatttatctctttaaaacaagtgtgtagttcaccttacttcatcttcatgaggtcagagaattttggagcaggaagatgcttaacaaagaagatggtaaagggaacacaaattaagtattgactatgccacttatgttatcattgctttgcctgagttataccatttaattggcaaaacatgagttttttttatcagtgatgtgaagataatgatgctttaacctataatgatatacaaagtctctgtataaatctagatcaaaatgacctttcagtataatatactgctttgcagttaatcagttctagacccttcattttacagatgaggaaacgaattacctgtgaagctgaggactcactcaggtcatacagctagttgggttttgttaatgaaaacagatttttatactaatctgaaaaagtaaactggcatggtgaacaagtaggaaatactatacactacattttaaatccaaataaattaggataacttcttagtttttcaatatgtatctcccagcttctttcagtttctaaggaaaactgagtcacattgttggatgatgatcctcatcaacctaactttcttcttaacaaacacaaactctgcttcttagaaaaatttaacgtgtcctgtgatgtcctataggaaataaaaacgtctacaatggaaggttataattgaagccttctgagctataagatatctgtttattcatttttggttcacaatacagtatctggggtaatgggttgaggaagaggatgtgcactgattgtccagaactgtgggttatgtgcagccatttacatttgggtgtatggtggatgtgtagtgggtaaacactgacagtagagttacttccagctatatttttcctagatttaatatgacagtttatttcatctccaaagcacacaacagctgatgatttaggggtaaaaaatgtaaagaaaaaaagaatagttggctgtgactttaatctatcctttcagcataattattcattctcaattgataagaaagctgaactcaacatcgtttgtgtaaggagatttttttccccacatttcaaaagtactttcatgt

SEQ ID NO: 720159 - DNA, 2860 bp, Homo sapiens
ttctttttttagcggggagacagagccttgcttggtcataaaggccggagtgcagtggtgcaaccttggctcactgcaacctctgcctcctgggttcaagcaattctcatgcttcagcctctggagtagctacaggcatacaccaccacacctggctgatttttgtattttagtagggatggggtttctccatgttggtctggctggtctcaaactccaggccttaagtgctctgcccgtctcagcctcacaaagtgctgggattacaggcatgaaccactgcgcccgacccttacctagtttttattcctaactttcagaggtcataactgataatggtgcaactgcacaactcagtcgctgggaacccatagttacagttaggaccagggcacaaaattcacttacatgtagaaattctcagcaccctgcttagacagttgcatgtatcttgcacatatatcagactgcttgattcacagcaggacasatcaattcattgtcacccagctgtttgctctgttcttaaatgttagatgctaaaatctggcttagttagtgaagaattaaataaatgaggtgagaagttatcttttctgtggtagttgatgtcgttaatgatataataaacagtaccagcacactcctgttctaaggatgaaccattcaaataaataaataataaaaggacaacgtaatagggacttactaggtctcaggcactttgctaagctcttatgcatgaactcatttcataataccttctgaagtaggtgctactattttcttcatttctagttaaagcaacagaagcatcagtaggttgactcaagttgacagctagaaaatgtcagactctagatcgaagtgtaggtctatcttacttcacaactggagcgctatttaacacaccttaggattgtagattgttttggtcagagatgatttcttatgttctagttgaggagtcggcaatattaggcaccaagtgaataaatgagtcatggaagaaaaaggggcactgttaagaaccttttgaagtctcctttatatgataatctttttagcactgttctagtgtggtagtttataacttatggggataacatgtattaaagaaattgttcatattattctggtgtgtttacaggtggttgctgtatatggaactttatctgatttgctttctgtggccagcagtaaactcggcataaaagccaccagtgtgtataatgggaaaggtggactgattgatgatattgctttgatcaggtaaccttcacctttttataagctgtcaacagtgtgcctcaacttcttggtgctatgctgtttcccttaagcagtaatttaatcactgttaagagtacaggattttggcaagtgtttacctagaatttgctctttggaatttaaatcatttgggcttaaggtgaattgatcagctagaaaacccttagtacatttcagtatactgatagtctttctgcatagttcatatatagctatgaggaatttcttctttgtggtactagagaaggatctagtaagacgtgcagtttttaacattaaaaatctaattcatctcttcacttttatatgcgcctgcttgttaatcatttcctaagaatgctttgcattttataatcattacaaaggccagattttgtaaaaactttataaatatgatagaattctaagtagtgatatcaccagtgatccaccataattataggcttatgtttgtaccttaaatatctcaggcagatttatctctttaaaacaagtgtgtagttcaccttacttcatcttcatgaggtcagagaattttggagcaggaagatgcttaacaaagaagatggtaaagggaacacaaattaagtattgactatgccacttatgttatcattgctttgcctgagttataccatttaattggcaaaacatgagttttttttatcagtgatgtgaagataatgatgctttaacctataatgatatacaaagtctctgtataaatctagatcaaaatgacctttcagtataatatactgctttgcagttaatcagttctagacccttcattttacagatgaggaaacgaattacctgtgaagctgaggactcactcaggtcatacagctagttgggttttgttaatgaaaacagatttttatactaatctgaaaaagtaaactggcatggtgaacaagtaggaaatactatacactacattttaaatccaaataaattaggataacttcttagtttttcaatatgtatctcccagcttctttcagtttctaaggaaaactgagtcacattgttggatgatgatcctcatcaacctaactttcttcttaacaaacacaaactctgcttcttagaaaaatttaacgtgtcctgtgatgtcctataggaaataaaaacgtctacaatggaaggttataattgaagccttctgagctataagatatctgtttattcatttttggttcacaatacagtatctggggtaatgggttgaggaagaggatgtgcactgattgtccagaactgtgggttatgtgcagccatttacatttgggtgtatggtggatgtgtagtgggtaaacactgacagtagagttacttccagctatatttttcctagatttaatatgacagtttatttcatctccaaagcacacaacagctgatgatttaggggtaaaaaatgtaaagaaaaaaagaatagttggctgtgactttaatctatcctttcagcataattattcattctcaattgataagaaagctgaactcaacatcgtttgtgtaaggagatttttttccccacatttcaaaagtactttcatgt

SEQ ID NO: 720160 - DNA, 2860 bp, Homo sapiens
ttctttttttagcggggagacagagccttgcttggtcataaaggccggagtgcagtggtgcaaccttggctcactgcaacctctgcctcctgggttcaagcaattctcatgcttcagcctctggagtagctacaggcatacaccaccacacctggctgatttttgtattttagtagggatggggtttctccatgttggtctggctggtctcaaactccaggccttaagtgctctgcccgtctcagcctcacaaagtgctgggattacaggcatgaaccactgcgcccgacccttacctagtttttattcctaactttcagaggtcataactgataatggtgcaactgcacaactcagtcgctgggaacccatagttacagttaggaccagggcacaaaattcacttacatgtagaaattctcagcaccctgcttagacagttgcatgtatcttgcacatatatcagactgcttgattcacagcaggacacatcaattcattgtcacccagctgtttgctctgttcttaaatgttagatgctaaaatctggcttagttagtgaagaattaaataaatgaggtgagaagttatcttttctgtggtagttgatgtcgttaatgatataataaacagtaccagcacactcctgttctaaggatgaaccattcaaataaataaataataaaaggacaacgtaatagggacttactaggtctcaggcactttgctaagctcttatgcatgaactcatttcataataccttctgaagtaggtgctactattttcttcatttctagttaaagcaacagaagcatcagtaggttgactcaagttgacagctagaaaatgtcagactctagatcgaagtgtaggtctatcttacttcacaactggagcgctatttaacacaccttaggattgtagattgttttggtcagagatgatttcttatgttctagttgaggagtcggcaatattaggcaccaagtgaataaatgagtcatggaagaaaaaggggcactgttaagaaccttttgaagtctcctttatatgataatctttttagcactgttctagtgtggtagtttataacttatggggataacatgtattaaagaaattgttcatattattctggtgtgtttacaggtggttgctgtatatggaactttatctgatttgctttctgtggccagcagtaaactcggcataaaagccaccagtgtgtataatgggaaaggtggactgattgatgatattgctttgatcaggtaaccttcacctttttataagctgtcaacagtgtgcctcaacttcttggtgctatgctgtttcccttaagcagtaatttaatcactgttaagagtacaggattttggcaagtgwttacctagaatttgctctttggaatttaaatcatttgggcttaaggtgaattgatcagctagaaaacccttagtacatttcagtatactgatagtctttctgcatagttcatatatagctatgaggaatttcttctttgtggtactagagaaggatctagtaagacgtgcagtttttaacattaaaaatctaattcatctcttcacttttatatgcgcctgcttgttaatcatttcctaagaatgctttgcattttataatcattacaaaggccagattttgtaaaaactttataaatatgatagaattctaagtagtgatatcaccagtgatccaccataattataggcttatgtttgtaccttaaatatctcaggcagatttatctctttaaaacaagtgtgtagttcaccttacttcatcttcatgaggtcagagaattttggagcaggaagatgcttaacaaagaagatggtaaagggaacacaaattaagtattgactatgccacttatgttatcattgctttgcctgagttataccatttaattggcaaaacatgagttttttttatcagtgatgtgaagataatgatgctttaacctataatgatatacaaagtctctgtataaatctagatcaaaatgacctttcagtataatatactgctttgcagttaatcagttctagacccttcattttacagatgaggaaacgaattacctgtgaagctgaggactcactcaggtcatacagctagttgggttttgttaatgaaaacagatttttatactaatctgaaaaagtaaactggcatggtgaacaagtaggaaatactatacactacattttaaatccaaataaattaggataacttcttagtttttcaatatgtatctcccagcttctttcagtttctaaggaaaactgagtcacattgttggatgatgatcctcatcaacctaactttcttcttaacaaacacaaactctgcttcttagaaaaatttaacgtgtcctgtgatgtcctataggaaataaaaacgtctacaatggaaggttataattgaagccttctgagctataagatatctgtttattcatttttggttcacaatacagtatctggggtaatgggttgaggaagaggatgtgcactgattgtccagaactgtgggttatgtgcagccatttacatttgggtgtatggtggatgtgtagtgggtaaacactgacagtagagttacttccagctatatttttcctagatttaatatgacagtttatttcatctccaaagcacacaacagctgatgatttaggggtaaaaaatgtaaagaaaaaaagaatagttggctgtgactttaatctatcctttcagcataattattcattctcaattgataagaaagctgaactcaacatcgtttgtgtaaggagatttttttccccacatttcaaaagtactttcatgt

SEQ ID NO: 720161 - DNA, 2860 bp, Homo sapiens
ttctttttttagcggggagacagagccttgcttggtcataaaggccggagtgcagtggtgcaaccttggctcactgcaacctctgcctcctgggttcaagcaattctcatgcttcagcctctggagtagctacaggcatacaccaccacacctggctgatttttgtattttagtagggatggggtttctccatgttggtctggctggtctcaaactccaggccttaagtgctctgcccgtctcagcctcacaaagtgctgggattacaggcatgaaccactgcgcccgacccttacctagtttttattcctaactttcagaggtcataactgataatggtgcaactgcacaactcagtcgctgggaacccatagttacagttaggaccagggcacaaaattcacttacatgtagaaattctcagcaccctgcttagacagttgcatgtatcttgcacatatatcagactgcttgattcacagcaggacacatcaattcattgtcacccagctgtttgctctgttcttaaatgttagatgctaaaatctggcttagttagtgaagaattaaataaatgaggtgagaagttatcttttctgtggtagttgatgtcgttaatgatataataaacagtaccagcacactcctgttctaaggatgaaccattcaaataaataaataataaaaggacaacgtaatagggacttactaggtctcaggcactttgctaagctcttatgcatgaactcatttcataataccttctgaagtaggtgctactattttcttcatttctagttaaagcaacagaagcatcagtaggttgactcaagttgacagctagaaaatgtcagactctagatcgaagtgtaggtctatcttacttcacaactggagcgctatttaacacaccttaggattgtagattgttttggtcagagatgatttcttatgttctagttgaggagtcggcaatattaggcaccaagtgaataaatgagtcatggaagaaaaaggggcactgttaagaaccttttgaagtctcctttatatgataatctttttagcactgttctagtgtggtagtttataacttatggggataacatgtattaaagaaattgttcatattattctggtgtgtttacaggtggttgctgtatatggaactttatctgatttgctttctgtggccagcagtaaactcggcataaaagccaccagtgtgtataatgggaaaggtggactgattgatgatattgctttgatcaggtaaccttcacctttttataagctgtcaacagtgtgcctcaacttcttggtgctatgctgtttcccttaagcagtaatttaatcactgttaagagtacaggattttggcaagtgtttacctagaatttgctctttggaatttaaatcatttgggcttaaggtgaattgatcagctagaaaacccttagtacatttcagtatactgatagtctttctgcatagttcatatatrgctatgaggaatttcttctttgtggtactagagaaggatctagtaagacgtgcagtttttaacattaaaaatctaattcatctcttcacttttatatgcgcctgcttgttaatcatttcctaagaatgctttgcattttataatcattacaaaggccagattttgtaaaaactttataaatatgatagaattctaagtagtgatatcaccagtgatccaccataattataggcttatgtttgtaccttaaatatctcaggcagatttatctctttaaaacaagtgtgtagttcaccttacttcatcttcatgaggtcagagaattttggagcaggaagatgcttaacaaagaagatggtaaagggaacacaaattaagtattgactatgccacttatgttatcattgctttgcctgagttataccatttaattggcaaaacatgagttttttttatcagtgatgtgaagataatgatgctttaacctataatgatatacaaagtctctgtataaatctagatcaaaatgacctttcagtataatatactgctttgcagttaatcagttctagacccttcattttacagatgaggaaacgaattacctgtgaagctgaggactcactcaggtcatacagctagttgggttttgttaatgaaaacagatttttatactaatctgaaaaagtaaactggcatggtgaacaagtaggaaatactatacactacattttaaatccaaataaattaggataacttcttagtttttcaatatgtatctcccagcttctttcagtttctaaggaaaactgagtcacattgttggatgatgatcctcatcaacctaactttcttcttaacaaacacaaactctgcttcttagaaaaatttaacgtgtcctgtgatgtcctataggaaataaaaacgtctacaatggaaggttataattgaagccttctgagctataagatatctgtttattcatttttggttcacaatacagtatctggggtaatgggttgaggaagaggatgtgcactgattgtccagaactgtgggttatgtgcagccatttacatttgggtgtatggtggatgtgtagtgggtaaacactgacagtagagttacttccagctatatttttcctagatttaatatgacagtttatttcatctccaaagcacacaacagctgatgatttaggggtaaaaaatgtaaagaaaaaaagaatagttggctgtgactttaatctatcctttcagcataattattcattctcaattgataagaaagctgaactcaacatcgtttgtgtaaggagatttttttccccacatttcaaaagtactttcatgt

SEQ ID NO: 720162 - DNA, 1789 bp, Homo sapiens
ttaatttaccattagaataatccttgaggagaggcattagtagagttggagttgcctggagagacaacctggagaatgttatacacaacctggcaaatattctacatattaccacaatctcctattttttctgtcctttcttttattatttaaaagtaagacataaacaaatcacagattgtcataactgcattgattgaaattgatacatggcaacattatgagattttatgcatttgtgctggcaaagtaacttaaaatcaatgatttggagagaaattattcaggaaatcttaatgacttattatggtaaaaacacttctaagagcggatccattaatggaggactattactggaaagttaaatttaatattcaggaaatcaattaactagtatttaattacttaaaattatgatccrttagtaaacattggtaaaatttgcttacaaatatcacttctgattatgagtcatcgggaaacaaaatgactaatattctaccatcgaaagcaatttgattcacttcacattccccctttctgtctttctgtgaatgactattgtgtaaagccagagaccattagagcagaaagatgcactgaggccatctgacccctcctcatttcacaaggccgactctcagtccagtatagtgccgtgggcctccaaaggttgcacagctcaacccgcactgccttgggactagaatcgaaagctctcagcttctagggcagccccctttctgaccatggctccttctgaaatgacccacaactccaagagggaaccatagggcacataccctcattctttttctctttttggagctagtaaaaatccatatctgctttagaaagtcatggggccaaagtcctttctctcagctccacaagagaaggtgggctacatagcactctcgacggactcctcccctctctgcctctgctgcagctcactaggcatcctttcgactcattttccggtgttttctgtgttgctattggcataacatcctatcagtgcagttaattacatccacttggagtgtgaaggacaacttgattgtctcaaaaagccagaggccatataatccatctcactgctctcacaaaacaagttcccaattgtctctgctgcgaggaggtaagagggacacccctggcaatgtgctgacacacattccctgccgcaaatggagaagtcacaaaagaagtgtctgttcctctccctctatgggcaaagagaactgccttgtggccctctgctccagatccacgactgagactcttcgatatctccacaatgcttagtgtcttcccagtacaagtcaatatcgcttgatccattctgaacttggtaacatttatatgcaactgagtttgcacatctaattacacgacctggtaatatggttcgtctcttgtgaccatacattttctgttccaatataatatttatggactcgtttagatttactacatgttacccaatgtcttgcttctgtatacggaaaaataaccagaaattaaaatttgttgtagttatggccatgatgtctttatccctttgtccttaatccttgaaatggaaagcagactaagaaaccagagtcccagcagagagtgaacggctgtgctggaaggcgggctctttacctgacctcagtcacactgcccctcaacagggcaccttgcaagaccaggatgtcgaactgcctgtggtttggctgattcctgtaccaacccatagcagccactgagtcatgaacaaagttgggagacgggatgg

SEQ ID NO: 720163 - DNA, 671 bp, Homo sapiens
cagtacatcatctttctgcaacataaaacttcctatcatgctgggaataaacaggtttgtagatggtgagtggttctagaaccaggaaggaagatagcaagcatccaggggaaggtcgtcattgttctccagtccrtcatttgtgtcccatcctctcttattgagatttataggtcattctggagtcactggaatcactcattgatatgttttgcatatcgtgatagggcctcacaaatcccccaacttcacccctttatctcacgggacgtatatttatgaagcactctctatgtgttagcaaggttgaaggtatcaagatgaacaagaactagaaacccagcttgctaggaagccacatggaaaactgactgagagagtgattacaatataacaagtaacataagagaggtgtgtgaaaaatgtgatgaatgcacagaaaaccaaatgcttacatctgcttgagaagcagtagaaatgtaagattgcataggccataagaggtttccaagaggagaaaatattttatcctgcttaaattggaagagtaaaaaactctgaagatcaagaggtggggaaaagactttctaggaagtgggaattatgtgtataaaagcacttgcattcatgaatttgaatgcccaatgaataagtccaaaaatatacaatgt

SEQ ID NO: 720164 - DNA, 671 bp, Homo sapiens
cagtacatcatctttctgcaacataaaacttcctatcatgctgggaataaacaggtttgtagatggtgagtggttctagaaccaggaaggaagatagcaagcatccaggggaaggtcgtcattgttctccagtccgtcatttgtgtcccatcctctcttattgagatttataggtcattctggagtcactggaatcactcattgatatgttttgcatatcgtgatagggcctcacaaatcccccaacttcacccctttatctcacgggacgtatatttatgaagcactctctatgtgttagcaaggttgaaggtatcaagatgaacaagaactagaaacccagcttgctaggaagccacatggaaaactgactgagagagtgattacaatataacaagtaacataagagaggtgtgtgaaaaatgtgatgaatgcacagaaaaccaaatgcttacrtctgcttgagaagcagtagaaatgtaagattgcataggccataagaggtttccaagaggagaaaatattttatcctgcttaaattggaagagtaaaaaactctgaagatcaagaggtggggaaaagactttctaggaagtgggaattatgtgtataaaagcacttgcattcatgaatttgaatgcccaatgaataagtccaaaaatatacaatgt

SEQ ID NO: 720165 - DNA, 1895 bp, Homo sapiens
caatatgcctcacatgttccagtgagaaacataatgtgtttggacttagacacggtgagtttgagatgatggtggaacattcaagaagaaatatctagtgagcagtcagacataataggatcatagatttatagagctggaaggcatcttaaaaatcatctaatcgtagagccaaaattctaaaatgagattatagctggggttatccatttgggaaaaattcacatattagaaaatgaatgaagtcaccatatgagagaaaatatgcagtagaaggttaacgattgtcctttgggtgtgcccacctttctggggtggggagaagaaaagagattactaataggacaggacaggggcttcctgaaaaggggaagagacagtgaggtgcctcccacatccagaaggcagattgaggagcaggtatcaaaaatgttaaatggctccaataagtcagagaaaatgaggcaactgtctgtggtggatagaagtgtgttggttgccgtagagagaacctgtcaaagaaatcaggaaaataatataaggagacaaataccaggggtcagaaagattgcttggggtttctttatttgactagatcttagaaaataaaacaggactcatgaggagacatataaagtgggaattctgtgaatatatagcttggttatagtctgctatagtttaaagacagaacatcacaagttacaaaatagcataggcttttggtttactgagatgaaaactgttgacagctattataattcagaacaatctttatagctttgtgcaagctttcattagtggctacaatcaagggtctctgataggtgccacacaaataataataacagtaagttaggaacattaccaaattggttttactaaaatatataggtggttatactcaaagaagctatttcacagaactgaaaagtgattgctcagatttgtgacacatcatttaaaaaactatggtttcccataggagaccgttgccaaaaataaaagccttagttacatagaggtgcacctgattgaatatcagtggaaggagaggaattagagccgagtccaagctgtgcagctctctggctgacattgatcatgtgcagtggacagcatctacctggaccacacgctgtgccttctcctccactccctcttccaccataacaattaacttaccaatgagccacgaatgcaccccaccaccaaatgccaggtatcttcatataagacatggcataagacctcttcttaaatggactgtgtcattctctgcagaacagaatggtggatgccacttgctagcaatgtctaaaatccggggaactgataagctctgcatctctatgggctgcaaaacacaatatgggtccttactagaaaggagctagcatgttcaagtgttcagtcatctaaaaccacatcttgccaatcaccattctctttgggtgactgagttaatttctgcccrtggttaaacatgctgtttatcctactttagctggaggtcaagagacacagaaagaaaacacgattcattccccaataatatcacctacttcacatgacatcaattaattccccaataatatcacctacttcacatgacatcatagtttatattattaatattttgtgaatgacaccttggactgagctatgcagaaaatgaagttggtatttggggtaaaagggctttctcaaatattaaaaaaataatttttactgtctttgtgctacagttgaaaatatacaacttcagctgtcacctgcaataaagaatttttttctctttggaggtagcatataaaatattcatcatcttggaagcattaatttcaaaatagagcaaactcgtggtagaaaatcaaacagtagggaaaacagta

SEQ ID NO: 720166 - DNA, 1895 bp, Homo sapiens
caatatgcctcacatgttccagtgagaaacataatgtgtttggacttagacacggtgagtttgagatgatggtggaacattcaagaagaaatatctagtgagcagtcagacataataggatcatagatttatagagctggaaggcatcttaaaaatcatctaatcgtagagccaaaattctaaaatgagattatagctggggttatccatttgggaaaaattcacatattagaaaatgaatgaagtcaccatatgagagaaaatatgcagtagaaggttaacgattgtcctttgggtgtgcccacctttctggggtggggagaagaaaagagattactaataggacaggacaggggcttcctgaaaaggggaagagacagtgaggtgcctcccacatccagaaggcagattgaggagcaggtatcaaaaatgttaaatggctccaataagtcagagaaaatgaggcaactgtctgtggtggatagaagtgtgttggttgccgtagagagaacctgtcaaagaaatcaggaaaataatataaggagacaaataccaggggtcagaaagattgcttggggtttctttatttgactagatcttagaaaataaaacaggactcatgaggagacatataaagtgggaattctgtgaatatatagcttggttatagtctgctatagtttaaagacagaacatcacaagttacaaaatagcataggcttttggtttactgagatgaaaactgttgacagctattataattcagaacaatctttatagctttgtgcaagctttcattagtggctacaatcaagggtctctgataggtgccacacaaataataataacagtaagttaggaacattaccaaattggttttactaaaatatataggtggttatactcaaagaagctatttcacagaactgaaaagtgattgctcagatttgtgacacatcatttaaaaaactatggtttcccataggagaccgttgccaaaaataaaagccttagttacatagaggtgcacctgattgaatatcagtggaaggagaggaattagagccgagtccaagctgtgcagctctctggctgacattgatcatgtgcagtggacagcatctacctggaccacacgctgtgccttctcctccactccctcttccaccataacaattaacttaccaatgagccacgaatgcaccccaccaccaaatgccaggtatcttcatataagacatggcataagacctcttcttaaatggactgtgtcattctctgcagaacagaatggtggatgccacttgctagcaatgtctaaaatccggggaactgataagctctgcatctctatgggctgcaaaacacaatatgggtccttactagaaaggagctagcatgttcaagtgttcagtcatctaaaaccacatcttgccaatcaccattctctttgggtgactgagttaatttctgcccgtggttaaacatgctgtttatcctactttagctggaggtcaagagacacagaaagaaaacacgattcattccccaataatatcacctacttcacatgacatcaattaattcyccaataatatcacctacttcacatgacatcatagtttatattattaatattttgtgaatgacaccttggactgagctatgcagaaaatgaagttggtatttggggtaaaagggctttctcaaatattaaaaaaataatttttactgtctttgtgctacagttgaaaatatacaacttcagctgtcacctgcaataaagaatttttttctctttggaggtagcatataaaatattcatcatcttggaagcattaatttcaaaatagagcaaactcgtggtagaaaatcaaacagtagggaaaacagta

SEQ ID NO: 720167 - DNA, 850 bp, Homo sapiens
cagaaatattgagctaggaaatgctgttacagaaggaaatagacacaggccctcttccttaggactccagataccttatttcaggggagccagctgtgcaacaaaatgggatacttggtttatttctttgcaagagcaagacttattatatattgttaagaaaatttacacctcgcttctgcccatctctgctgctcttctttacttgcctcagccattcttttcctatcgggaacctcatgctgtcctagcctttctctttttccttaataactcttcctgtctcaagcaatcttttatgagttgatttagcaactgctccatttttgtctcttgagaagcaatagaaccagcaggtccaggagagaggaagggatctgaatgccctacaaccaagtggcagagctgcgagccttgaggggcagcctgacccaactccacrgctgccacccacctgtgttcaagctccaaactctgcaactgaagaaaatcataagcccggcctcaggttctcagctttacacaaattaaagtatgaaaaagagcctttcccgtctggtgatactagactagaactcagagttgagaggttgaagtacaatgtcaatcaggaaacccgggttcactcaagtcttgagaaaagacatgtgtcatgaaagctagtaggaaatcccaaaataggttgtggggctgctccctgagcccccagcctctcctctctgcatcacaactccccaaagccttgtacctcgggagcttatggatgagacctggaccccactgctgcctttgtcatacctgctttctggaaaggacctaacccagtggatcactgtgtaacaatgctctg

SEQ ID NO: 720168 - DNA, 1728 bp, Homo sapiens
tgaccagcctaggaaacatggcaaaaccctgtctctaataaaaatacaaaaattagccagaggttgtggctactcaagaggctgaagtgggagagggccaactgagcccaggaggtcaaggctgcagtgagccatgatcataccactgggcaacagagcgagactctgtctcaaaagaaaattaataataacaaataactaaatacttgacacctcatcctaattgatttttctgaattttttaaagagttatggcgggagggggagggatgaggggccaggccctgcagcctcatcagactcagtccactcctggaggaaaaaaaaaaaaagtaaaaaatataaaaacattaaaaaaaataaagttactaaacaaatgcttattgaacaaagaataacaatataccattgattttacattagatatgtaaaaaattaacatagaaatgttatagccataagaaattaacakagtcaaaagttctttgggatctgtaacagctaaagaaactaaacacctttctaatctagtattctgcattctatatggcaattaagcaaccacagaatgacagtttaaatgcacaaagaacagtttctaatccttcacaatttcttgcctacagaattcccgacagccagatgtgcttttaaaagataaaaagggaactgtataaagttgaagttaaatgctccagtgtctatcaaagtttacagtaaaaactgatcgttctattcatgacaacaacttcatggcaataataaatccatgcctggagatactaatggtctttctttccttttccttaaaataattaaaactccatttaccacacaactagttattaaaatctaatttcctatgactcattttagttaaacgtggtccatatcagttgttttatttttaaaaacagtacatatactttgtaaaattgctgtgaagggaatatcccacagttcaaagaaacacattttcagttttcaaacattaaagaactttattattatttctactgttttcttatcccagaaattcaaaagacatttataactggcatttaacaaaataacatacccttgtatctttaaggttaatccttcttttgaagaaaagtaatcaggtaaatacatattaagtaatttttttcttttcttttttttttttttttttgagacggagtttcattcttatcacctagggtggattgcaatggcatgatcttggctaactgcaacctctgcttctggggtttaagggattctcctgcctcagcctcccgaacagctgggattacaggtgcccaccaccatgcctggctaatttttgtatttttagtagagacgggttttcaccgtgttggccaggctggtctcgaactcccaacctcaggtgatctgcccaccatagcctcctaaagtgctaggattacaggcatgagccaccacgtctggcttttattaaataatattttaacaaggtatctgatttaacatttaatgagcaaattcacattaaatattaacaacaaggaatcctaactttcataaatgttattaatcagcaagcagataccatgatgggtagaaaaagacataaaatttttaataaccagaatacaactgagtaccacatgtataaatgctttttaagaaaaatacttcaaaatagaagggtaaataaaatcttaataagatacctctccatttaatacaccgtaaagtcga

SEQ ID NO: 720169 - DNA, 2016 bp, Homo sapiens
ttgaagaaattcaatataagtattaaagaaaggtttttgtttaactgaatctactgatgactttaagccacaactggagttaaagatgtttaaaaagcattgatttctgttataaacaagtgactagagagtccccagttgcccatgttgccccaacaagtttacaatggctctgctactagtagtgctgaaagagataacaaccagtaactctggggctcaacttcttttgttttgcattcccaatctcttaatgtaggaaacacagtttaaatgatgaatctgcctctttcttccaggctccccagtgttattatttgaaatgaagggacaccaagctttaggccaagatacgaattatctcatttatattgtcagatgtgtgtcatgttcccccaggggaactatccaaaagtaatgtcatgagccacttgcagtttcatatgmaacatctccacatggacatcctctgcaatttctagtgagtttgtagttccattggaggcacattttttagaaatgttcattatttttagatattaaagcaaatctcataaggaggattaaagattaggtgttatcaatgtaaagagaaaataatcattctttatcactactgcattgtgtgaaaaaatgacttcctttcattgagttttggtttaaaccactatagtgaaattggcttctaaaaaattgtctcaggtaacttatttatagtcataatatggaaaaatacaatttgccatcagtagcctatcatttctacacttctcagttatttgtgacctgaataaataaggcctatggcttaataggataagaatgctgctaagatatgtagaagcaaagataaacccccttctctgtcctccccaagaatatgagatggaggtgcaagtcacgatcctttcaaaaaagcaaggctgcacacccagagcctttctaagcaacgccctacttcgaagggacacatacagtgaagtgctggggctgacttaaataaggtgatacagggaggaaaatctttttttgttataagtatctgaatacctcaagaaaaaaatattacaagattgtgttattggtttattgttcatcatcttcacatttccccttgcatatccaaacacagctgaatatttcatttccaactcccctgttaatgttacaactacaaattaatttcatttccttgttggtaatatgttacattgcttgataaggttttaaaagattattagaaaaaggtgccagaacagtgcaaaatatcatcacatccctaaagaagaaaggctagagatctctggcatagtagtaacttgccagccttcaaaattactgaaaaacaactgaaatttttagtctatgaacttcaaatcctttgaccaatcccttgatatagatatccacaaccttcatttgcttttgtttatctaacaaatgatataaagatgtgatgtgctgatgagatgaaatggaatgtgtgtgtgcatttgaatgtgtgtgaaaaggaagacacctgttttcctaggatgtgtcaaagatgtacgattcttaatgacttctatctgggatttacttgtattcaaatgtttaagtttttcatccttccaaatatctaagccatactaaattaatggaagaaagtggtaattgtttactaggggaacaaaacagaatgtcacattaagaaatcattggaaaccctgttatccatgaccaccatcctacgctaaaaattaaagaaagaagagcactggagttaaagttacattcccactcaaaccaaagacatttttgcctcttcatataaactgtaaactcctctctctctctaacagggtttgtgtcatatctctggattctatcccaatgccctacaaattgaaggtaccaaatacctattttcttttttttattattatactttaagttctgggatatatgtgcagactgtgcaggcttgctacatgggtatacatgtgccatggtggtttgctgcacccatcaacccat

SEQ ID NO: 720170 - DNA, 599 bp, Homo sapiens
cctcagcctcccaaagtgctggtactrcaggtgtaagccaccacacccaaccttgatcccattttatatagaaccttcttcatctacttttatggcccactacctcctgtaaaccagaggcaaactgcgaaatgcattaactcagagaagaacaaagttaattggagctggctgagctaatatcctatctatgggagtgccatagggaatgttgtacgatactcattttagttatatgtgtagtcagaattccttgggccttagactcaaggtaaagggatgcactttgtgaagattaagtgagagaatgtgtatgaaaaccacaaagctataaagttctatggacatccaagtgaccatgcttcgtttaagtaaaattcagtgcaaatagtgcaagcaaatgttttccagtgtgctatgtcacttttcaaagctgtaactactggaaatgctacatctcttgcacttacctgggttatccacaaagacggctaaaataactgtaagtcaatatgtatcaggtaaacacattggactacgcccaggcagctttcaaatagatgacacaagactagggatgtgtccagacatgttctgaa

SEQ ID NO: 720171 - DNA, 599 bp, Homo sapiens
cctcagcctcccaaagtgctggtactgcaggtgtaagccaccacacccaaccttgatcccattttatatagaaccttcttcatctacttttatggcccactacctcctgtaaaccagaggcaaactgcgaaatgmattaactcagagaagaacaaagttaattggagctggctgagctaatatcctatctatgggagtgccatagggaatgttgtacgatactcattttagttatatgtgtagtcagaattccttgggccttagactcaaggtaaagggatgcactttgtgaagattaagtgagagaatgtgtatgaaaaccacaaagctataaagttctatggacatccaagtgaccatgcttcgtttaagtaaaattcagtgcaaatagtgcaagcaaatgttttccagtgtgctatgtcacttttcaaagctgtaactactggaaatgctacatctcttgcacttacctgggttatccacaaagacggctaaaataactgtaagtcaatatgtatcaggtaaacacattggactacgcccaggcagctttcaaatagatgacacaagactagggatgtgtccagacatgttctgaa

SEQ ID NO: 720172 - DNA, 599 bp, Homo sapiens
cctcagcctcccaaagtgctggtactgcaggtgtaagccaccacacccaaccttgatcccattttatatagaaccttcttcatctacttttatggcccactacctcctgtaaaccagaggcaaactgcgaaatgcattaactcagagaagaacaaagttaattggagctggctgagctaatatcctatctatgggagtgccatagggaatgttgtacgatactcattttagttatatgtgtagtcagaattccttgggccttagactcaaggtaaagggatgcactttgtgaagattaagtgagagaatgtgtatgaaaaccacaaagctataaagttctatggacatccaagtgaccatgcttcgtttaagtaaaattcagtgcaaatagtgcaagcaaatgttttccagtgygctatgtcacttttcaaagctgtaactactggaaatgctacatctcttgcacttacctgggttatccacaaagacggctaaaataactgtaagtcaatatgtatcaggtaaacacattggactacgcccaggcagctttcaaatagatgacacaagactagggatgtgtccagacatgttctgaa

SEQ ID NO: 720173 - DNA, 599 bp, Homo sapiens
cctcagcctcccaaagtgctggtactgcaggtgtaagccaccacacccaaccttgatcccattttatatagaaccttcttcatctacttttatggcccactacctcctgtaaaccagaggcaaactgcgaaatgcattaactcagagaagaacaaagttaattggagctggctgagctaatatcctatctatgggagtgccatagggaatgttgtacgatactcattttagttatatgtgtagtcagaattccttgggccttagactcaaggtaaagggatgcactttgtgaagattaagtgagagaatgtgtatgaaaaccacaaagctataaagttctatggacatccaagtgaccatgcttcgtttaagtaaaattcagtgcaaatagtgcaagcaaatgttttccagtgtgctatgtcacttttcaaagctgtaactactggaaatgctacatctcttgcacttacctgggttatccacaaagacggctaaaataactgtaagtcaatatgyatcaggtaaacacattggactacgcccaggcagctttcaaatagatgacacaagactagggatgtgtccagacatgttctgaa

SEQ ID NO: 720174 - DNA, 1806 bp, Homo sapiens
ttttataggttgtttaaagcacagagtagagctggatctacttgccttgcaatagaaacaaatttgttttctagtttcctggcctgtagtggatttagaaaaggatgttagaggtaggcataggaataatagtgagaggagataggccagaacagaggaaaccgaaaaactactaaaaataaaaaagagctcagagagcagagtactagtgggagagrtgcaaatataaaattttattaaatataagggcaaatagtctgaaagacctaagggtaccagcaagcaatacttgggtaccagcagcaagattagagtgattacttatattatcagattaaattatgttatgtgtatgatgtttaaagaaacagaaacacagtgaatatgaaatgctcattagaaaagtttttatccaaaatgttgtttttaaattgttactttaaaggtcaagcaaaatttgttttttaacgagaatttctgtgggacatgttaaaagaacccgcatgcttcctccctcccttcctccctcccttccttctctcctcacccttctcacaattagagctatacagctaccggtgcgactctttgaccttgggcaggtaggaagcacggtgttaagtctgaatgtcaaacataccagctttgtaggaggcctttatgggatggacttttgggttgcttttctaatctcaacctcatccttccttgaccttgacttttatttatatattttcctagtcttgattgtttattaccgtctacctttcaccattgtttttatttattatttgtgctattgttataggatattggaaatgctttatggggaagattgagtctatgttaacaaagtctcctgagacttctctgagatatctctgacctgagataaatggtttaatattttcattgatactgcatcatacaatcagtgagaactcaatgaagagcagccaagctccttgcagataaaatgagattttccaatgatataacattgtaagtgcttgaataattccctggagctttttacctcataatctgctggacctggttattgaaaggttaatgcaaaatcacacatcctgaaaatttaaagttaaattctaaaaagttaaaatggactaaatataatcacaggaaatatgcacaacatgaagggcagccaaaaaacagtcatggctgctgatgactttagaaggaaggaaggtggacgtccttaaaaaaaaaatgcagccctgccattatctgacaacgtcaactccatgtagccatcattctgtcatttgcccacctttttcgtttgcctagaaacacttgcagagagttgtcagctaagagtgtaaaccgattgctttgtataaatgttttatcagagctctctcaaactttagggaagctaatatacattttatagcttttgggagatttttaaaaacaacatccttgaactttgtaatatattaggatcaaatcattgcgtgatgtgatttataaatagatttgcttatttatgcttatttaatagacatgctaagtcataaggtacagttcaaggttcagtataacccaattcagggcatgtggctaatctccacctttttggtgttctgacttctggaatactgggtcaggagtcccagagaactaatgtaaagttgaagagaccacatgcggaatccatgatagtcatttgattaccatacaacctgctttcactaagtctttgtaagtctcattgtatcctatagtctctataaatctacaaggaaaaaaaaatttgttctttttgagacacagtct

SEQ ID NO: 720175 - DNA, 1806 bp, Homo sapiens
ttttataggttgtttaaagcacagagtagagctggatctacttgccttgcaatagaaacaaatttgttttctagtttcctggcctgtagtggatttagaaaaggatgttagaggtaggcataggaataatagtgagaggagataggccagaacagaggaaaccgaaaaactactaaaaataaaaaagagctcagagagcagagtactagtgggagaggtgcaaatataaaattttattaaatataagggcaaatagtctgaaagacctaagggtaccagcaagcaatacttgggtaccagcagcaagattagagtgattacttatattatcagattaaattatgttatgtgtatgatgtttaaagaaacagaaacacagtgaatatgaaatgctcattagaaaagtttttatccaaaatgttgtttttaaattgttactttaaaggtcaagcaaaatttgttttttaamgagaatttctgtgggacatgttaaaagaacccgcatgcttcctccctcccttcctccctcccttccttctctcctcacccttctcacaattagagctatacagctaccggtgcgactctttgaccttgggcaggtaggaagcacggtgttaagtctgaatgtcaaacataccagctttgtaggaggcctttatgggatggacttttgggttgcttttctaatctcaacctcatccttccttgaccttgacttttatttatatattttcctagtcttgattgtttattaccgtctacctttcaccattgtttttatttattatttgtgctattgttataggatattggaaatgctttatggggaagattgagtctatgttaacaaagtctcctgagacttctctgagatatctctgacctgagataaatggtttaatattttcattgatactgcatcatacaatcagtgagaactcaatgaagagcagccaagctccttgcagataaaatgagattttccaatgatataacattgtaagtgcttgaataattccctggagctttttacctcataatctgctggacctggttattgaaaggttaatgcaaaatcacacatcctgaaaatttaaagttaaattctaaaaagttaaaatggactaaatataatcacaggaaatatgcacaacatgaagggcagccaaaaaacagtcatggctgctgatgactttagaaggaaggaaggtggacgtccttaaaaaaaaaatgcagccctgccattatctgacaacgtcaactccatgtagccatcattctgtcatttgcccacctttttcgtttgcctagaaacacttgcagagagttgtcagctaagagtgtaaaccgattgctttgtataaatgttttatcagagctctctcaaactttagggaagctaatatacattttatagcttttgggagatttttaaaaacaacatccttgaactttgtaatatattaggatcaaatcattgcgtgatgtgatttataaatagatttgcttatttatgcttatttaatagacatgctaagtcataaggtacagttcaaggttcagtataacccaattcagggcatgtggctaatctccacctttttggtgttctgacttctggaatactgggtcaggagtcccagagaactaatgtaaagttgaagagaccacatgcggaatccatgatagtcatttgattaccatacaacctgctttcactaagtctttgtaagtctcattgtatcctatagtctctataaatctacaaggaaaaaaaaatttgttctttttgagacacagtct

SEQ ID NO: 720176 - DNA, 1806 bp, Homo sapiens
ttttataggttgtttaaagcacagagtagagctggatctacttgccttgcaatagaaacaaatttgttttctagtttcctggcctgtagtggatttagaaaaggatgttagaggtaggcataggaataatagtgagaggagataggccagaacagaggaaaccgaaaaactactaaaaataaaaaagagctcagagagcagagtactagtgggagaggtgcaaatataaaattttattaaatataagggcaaatagtctgaaagacctaagggtaccagcaagcaatacttgggtaccagcagcaagattagagtgattacttatattatcagattaaattatgttatgtgtatgatgtttaaagaaacagaaacacagtgaatatgaaatgctcattagaaaagtttttatccaaaatgttgtttttaaattgttactttaaaggtcaagcaaaatttgttttttaacgagaatttctgtgggacatgttaaaagaacccgcatgcttcctccctcccttcctccctcccttccttctctcctcacccttctcacaattagagctatacagctacyggtgcgactctttgaccttgggcaggtaggaagcacggtgttaagtctgaatgtcaaacataccagctttgtaggaggcctttatgggatggacttttgggttgcttttctaatctcaacctcatccttccttgaccttgacttttatttatatattttcctagtcttgattgtttattaccgtctacctttcaccattgtttttatttattatttgtgctattgttataggatattggaaatgctttatggggaagattgagtctatgttaacaaagtctcctgagacttctctgagatatctctgacctgagataaatggtttaatattttcattgatactgcatcatacaatcagtgagaactcaatgaagagcagccaagctccttgcagataaaatgagattttccaatgatataacattgtaagtgcttgaataattccctggagctttttacctcataatctgctggacctggttattgaaaggttaatgcaaaatcacacatcctgaaaatttaaagttaaattctaaaaagttaaaatggactaaatataatcacaggaaatatgcacaacatgaagggcagccaaaaaacagtcatggctgctgatgactttagaaggaaggaaggtggacgtccttaaaaaaaaaatgcagccctgccattatctgacaacgtcaactccatgtagccatcattctgtcatttgcccacctttttcgtttgcctagaaacacttgcagagagttgtcagctaagagtgtaaaccgattgctttgtataaatgttttatcagagctctctcaaactttagggaagctaatatacattttatagcttttgggagatttttaaaaacaacatccttgaactttgtaatatattaggatcaaatcattgcgtgatgtgatttataaatagatttgcttatttatgcttatttaatagacatgctaagtcataaggtacagttcaaggttcagtataacccaattcagggcatgtggctaatctccacctttttggtgttctgacttctggaatactgggtcaggagtcccagagaactaatgtaaagttgaagagaccacatgcggaatccatgatagtcatttgattaccatacaacctgctttcactaagtctttgtaagtctcattgtatcctatagtctctataaatctacaaggaaaaaaaaatttgttctttttgagacacagtct

SEQ ID NO: 720177 - DNA, 2272 bp, Homo sapiens
ttttttttttttttttgagacagggtctcattctgttgcccaggttagagtgtgctggttctggcatgatcatacagctcaccacagccttgagttcctgtgctgaagcaatactcctgcctcagcctcccatgtagctggtaccacaggtgtgtaccaccacactcggttacttttttaaatttttttttaaagtcagggtctcacatttgttgcccagactggtcttgaactctgggctcaagcaatcctcctgtcttggctttccacagtgctgggattacaggcatgagccaccaaaacccgcctgtctttgctcttggaattgacttttttcatggcactgcctctgtgctgcttctgctgcactaagatgctgggtctggggctgctgaaagctatggccttgcatgcttttgtccccagatcttgacttctgtgttcagtttgtcagcatgaaggaattaaattagccctgactgtgactgtacctccataaaaagcaaaagcaatcccactttctctgtttgcatagcagctatagtcctgaacaagtcaccgaacaatgagtcagcccagctgtggcctggccaacagcctttggggcaacttctgcttcacttcgatggacccctttgcaccccagctggagccaaggttgccaaagcctttcagattagagtaaaagctcaggtgctccttctctgggtcacatcaccatgatatttgttctgtgttgtgttacgaaattatttaactcttcacatttagtctcagataatccaattagaaaagggttggcaggcaccgtgcacactatactgcatggactttaaatcaattgtctctcttggagttgtttcagaggtaccccaaaaactctattatttccagttaacgttccatgaccatacctgcacattctcagtcctccctctatatgaaatgacctaattgaaaatgctaaacccatgaattcccaagcatgaatgtgcctttgtaaacctaaaatctctggagatccctttgttttcaatatgcgagagggctttggtgtgcaaagcctgctttcagtttcaggcagtctttcaattagcaaatgtaagcatgtagggagctattaaaggtcaaatgttcttaacttcattattaaaactgactcaaagcacacagaaattaggagccgtttatggaattctcagagctgccgggcctgccatggacagacttacaaatattagtttcaccactcttgaaactctgtgcagttgggcggactccatgattgatgacaacacttactatcttaggtaggtttctggaacaggtcctgagacctgttttttaatagtgttctgaggaaccacatctgcaaaggggtgcaggttccaggcctgggcacagaaggaagatgagctgcgatgtacttgttcagaggcctcagtcaaccccacggggagagtgcagctggaaaggcccttccggttatccttaatcaggcaagagggctgaatctttgtacctagcgtgagccaatcattgaatgtgggctggccctgtggtaggggttgactttgggctaggcagcagctaggcagttcctggggagaaactcaactgggagctgccastaacacttctggcagctgggggagtgggtaccttggtccacccagggacacatggactgcacgtcactctccaccacacaccacctgtgcctcatgctgtaggctgcagtgccatcaatgatgtggaggacacccaccgcagcatgtctatttcccaagcctcttcattccctcctccatcatctgccatctttttgtttttctttttttatattgttcatagcaaggtaggaattttccctgaacaaaagtaatgggttttgacctgttatatttaagccatgcgtggtggtacatacttgtagccccagctactcgggaggctgcagtgggaggatcacttgagctcaggaggtcaaggctgcagtgagctatgataacatcactgcactccagtttgagcaaaagagcaagaccctgtctccaaaaaaatttttttaaatttaaaaataaattaattttagcctaaagctgcctccatatatattttaagttcaggctaaaagtttttccacatatagtacatagtgaactgtagcctaactgaatgtgtgaacaggctgtaacctactcttgtgccagtcacagagtttcagccaatcaaaggtggataactgttcaaatcgtgttcaaataagtca

SEQ ID NO: 720178 - DNA, 2272 bp, Homo sapiens
ttttttttttttttttgagacagggtctcattctgttgcccaggttagagtgtgctggttctggcatgatcatacagctcaccacagccttgagttcctgtgctgaagcaatactcctgcctcagcctcccatgtagctggtaccacaggtgtgtaccaccacactcggttacttttttaaatttttttttaaagtcagggtctcacatttgttgcccagactggtcttgaactctgggctcaagcaatcctcctgtcttggctttccacagtgctgggattacaggcatgagccaccaaaacccgcctgtctttgctcttggaattgacttttttcatggcactgcctctgtgctgcttctgctgcactaagatgctgggtctggggctgctgaaagctatggccttgcatgcttttgtccccagatcttgacttctgtgttcagtttgtcagcatgaaggaattaaattagccctgactgtgactgtacctccataaaaagcaaaagcaatcccactttctctgtttgcatagcagctatagtcctgaacaagtcaccgaacaatgagtcagcccagctgtggcctggccaacagcctttggggcaacttctgcttcacttcgatggacccctttgcaccccagctggagccaaggttgccaaagcctttcagattagagtaaaagctcaggtgctccttctctgggtcacatcaccatgatatttgttctgtgttgtgttacgaaattatttaactcttcacatttagtctcagataatccaattagaaaagggttggcaggcaccgtgcacactatactgcatggactttaaatcaattgtctctcttggagttgtttcagaggtaccccaaaaactctattatttccagttaacgttccatgaccatacctgcacattctcagtcctccctctatatgaaatgacctaattgaaaatgctaaacccatgaattcccaagcatgaatgtgcctttgtaaacctaaaatctctggagatccctttgttttcaatatgcgagagggctttggtgtgcaaagcctgctttcagtttcaggcagtctttcaattagcaaatgtaagcatgtagggagctattaaaggtcaaatgttcttaacttcattattaaaactgactcaaagcacacagaaattaggagccgtttatggaattctcagagctgccgggcctgccatggacagacttacaaatattagtttcaccactcttgaaactctgtgcagttgggcggactccatgattgatgacaacacttactatcttaggtaggtttctggaacaggtcctgagacctgttttttaatagtgttctgaggaaccacatctgcaaaggggtgcaggttccaggcctgggcacagaaggaagatgagctgcgatgtacttgttcagaggcctcagtcaaccccacggggagagtgcagctggaaaggcccttccggttatccttaatcaggcaagagggctgaatctttgtacctagcgtgagccaatcattgaatgtgggctggccctgtggtaggggttgactttgggctaggcagcagctaggcagttcctggggagaaactcaactgggagctgccactaacacttctggcagctgggggagtgggtaccttggtccrcccagggacacatggactgcacgtcactctccaccacacaccacctgtgcctcatgctgtaggctgcagtgccatcaatgatgtggaggacacccaccgcagcatgtctatttcccaagcctcttcattccctcctccatcatctgccatctttttgtttttctttttttatattgttcatagcaaggtaggaattttccctgaacaaaagtaatgggttttgacctgttatatttaagccatgcgtggtggtacatacttgtagccccagctactcgggaggctgcagtgggaggatcacttgagctcaggaggtcaaggctgcagtgagctatgataacatcactgcactccagtttgagcaaaagagcaagaccctgtctccaaaaaaatttttttaaatttaaaaataaattaattttagcctaaagctgcctccatatatattttaagttcaggctaaaagtttttccacatatagtacatagtgaactgtagcctaactgaatgtgtgaacaggctgtaacctactcttgtgccagtcacagagtttcagccaatcaaaggtggataactgttcaaatcgtgttcaaataagtca

SEQ ID NO: 720179 - DNA, 540 bp, Homo sapiens
cttgtccacagttttcttattgatttgttgaagtttttttacaggttaggaacacggagactttgttatatttgtggtaataacttcttttcaatttgttatttggyttctaatatctgcatggcagagatttttagaaagagaaatatttaaaatatttgtatagtgaaggatatcttttatttttttttccagtgatttttactgttaggatataattttctattctcattgacgtctttgctgtgcatcatacagttcaatttaggtaacaatttatatattttatgtgttttgtcactctatatgtttaactttaacaataaatgtcaaacttatctttacatgtgaaaatggtgatatttcaacttttgtcaaaggtaccatttttctagcaatattttaaagtaatcctttcattttctattattttactaccttcatcagacatgttctagtaagctatattttggctaactcttcagttctagcttctttctcctctttactcttttggaagacatttgattctatcattca

SEQ ID NO: 720180 - DNA, 1600 bp, Homo sapiens
cacctctctcctccagattctcttcctttttcaggcctcccttgccctgtgaggactctgtcccctcaacttccctgtaatttcttattctctccatctttctctcctccctgaatctcaggcaacatagactacatagtcctgcgaccaaattaaggctgtgttaactcaggaaaattgtttcactctgagtctcaatttccttgtttgaaaatggaagccgggattccttcctcacagggttgttatggtgattaaatgagatactgtctgtgagctgcttggcacagggcccagcgcaccataaaagctcagaaaatagacttttcctctgcctcttttgctcacatctgtcctcagcttctccctggagtgcttcctgggaaccagtcctcaggagggacagagccaggcccgggcactgctctggccactgtcctatggggctgtcccagggatatccagggaagctagtttgttagctgtctcctcctccctcctgagccccctcctccttcttccagctctggcccagcacgcaccggtggggctgtggctgttcctgcctcaactcacctcccctttctgaattagctctgctccctctttcctctgccatacacagtcactctccctcagtcttgttccctgtcatccccctaccagaacctcttctcacttcctctttcttttatgcctggccctgtatcctcacccctttgctcactgaggctaccctcttcttcctccacttctagcccatctacctttygtggcgcccctcctcacccctgttgtctttctgcccctcgctggccctgggacaggaagttgagggaggaggcctgggtggtgccagctcccccagcctgtttccccttcagcgcctcgggccactcctctacttcctcctggagcacccccttcccttgtagtccccctgctcctcccccccagcccacctctctttcctctcccatgttccccctgcttccaggtcctgtagacacacaggctgggggtgtgagggaagctctgttggtgagggagggggaattgacatcacgtttcaggccccaatgaacagtcttgcccctccccctcctaatgagaaccagctgtggttccagaggcccagatgtggggatggaggaggagagcaggatggagtcagaggaccaagtagcaggaccggggacagagtgagggcacgtagcaaggcagaatcaggtgggagaagagccatgacagatttggaagaaggaagaagacagatctaggcaggaggcagcatatgctggggaaagagacaagatggaggggcaggccagatctggggaagggatgggacagacctggatggggaaagatacaagagcagggaggaggagccaatctcagggaagaggagtgagaaacactggacggacttggggagatggtgcaggggagagctggagcgagcatgagacggtctcgggagagagtctggagttcgagtttggaactggaaggcttgcagcaggaagtgatgaggcacagtccagacagaggccccagggacctggaggtcacagctgcagccgcagagctgaccacg

SEQ ID NO: 720181 - DNA, 1426 bp, Homo sapiens
ttttgtattttaaactattattctagatattgcttttttattttaaaatatttaagtatcagagaaagtcattttaacagagaaaaatcaaaatcatttcaggctgcaacaaatttctatagaataactgtatcagtatttcaaccaatatacatgtcttgactgaaagctataaactggctcactgcaacgtccacctcccgggttcaagtgattctcctgcctcagcctcctgagtagctggaaytacaggcacacaccatcactcctatttttttttgtattcttagtagagacagggtttcactgtgttggccaggctggtcctgacctcaagtgatccacccatctcggcctcccaaagtgctgggattacaggcatgagccactgagcccagccagacttttcaatgtttaagtggatttttttcaccctctaaagttttaaggaaaagttattaatctttaaatgtaaaaacattcatgagtcccaagcatagcaatatttaggcatattctgttctaggaaagaataaagcagagacttgaccaagatagggatgtcatcaattcaggaaacattatcaagcaaatatggaaagtagaaatcaaataactgtttttctcattaactttcaccctgttcttccctggtatgttggcaattccctgcgcatgctaagaaaaaaaaaaaaacagtcacaaagctttgttattcaaagcttggtgttatgtacaagtctgagaattggcttttggaaaaaaatttatgatgaccaaataaaatgtaccattttaatgaagtctgtggacaaggttcaattagattggttattttaaaatgattcattgattattttaaactgattacttaaagaaaaatatcaaaaagtatacagttttaaggccgggcatggtggctcatgcctgtaatcccagccccctgggagacagggcaggcagatcacctgatgtcaggagtttgggaccagcctggccaacatgatgaaactccatctctactaaaaatacaaaacttagccaagcatggtggcaggcacctgtaatcccagctacttgggagcctgaagcaggagaatggcttgaacctgggaggcagagtttgcagtgagctgagaacaagccactgcactccagcctgggtgacagagcgagactccgtgttgaaaaaaaaaaaaaaaaaaaagtatacagtttttacaaatctcctaatacacttaactgggttctaatatttcaataaggaatttatttttatacataaaagtgtaatgaatgctttcctccaaatcgggcatatatgtgactgttcacaccatttgagccataaattcataattagaataaaaatgaagaacactctgaatccaaccagggcctgagaagggaaggaaatcacccttct

SEQ ID NO: 720182 - DNA, 1902 bp, Homo sapiens
gagccaaaggatacaaaatcaactggacatagtaatgaattatatatagggggttataaaagaaaaaaatgggttagaaatatcagtggcattattctgtttttgtttgtctcccctactggaactgactttttaaaaaatagtagttctgtcaaattggttttggtattcctggtgcctcatactgggccttgaacatagaagatacttggtgaaagtttgcggaaagaatgcacaaatcattgcacagcaagcagaggacaaaaggagcaatattcagaagtcaacactagcaagggagaggccaacaggtctgtaactacttggctgcaatttataggaagaaccagcagattcaagacaatactagatagactattaaggaaaagctatgacacagagaaacagacagacataaggcataatgtgatatctctgtcttagtaagagaacagatgtagtagttatgaattatgataaagccaatgaagcagttatgaattcaggctttcagccacactgcatgggttctaactctagctctgcctcctcctgctgtatgaccttctttggacagttacttaacatctttattttttttattttttttttattttttgagacggagtttcgctcttgttgcccaggctggagtgcaatggcgcgatctcggctcactgcaacctctgcctcccgggttcaagcaattctcctgcctcagcctcccgagtagctggggtcacaggcatgcaccaccatgcccggctaattttgtatttttagtagagacgaggtttctccatgttgaggctggtctcgaactcctgacctcaggtgatccgcccgcctcagcctcccaaagtgctgggattacaggcgtgagccactgcgcccagctacttaacatctttaaatctcagcttctttatctgtaaataaggacaataatagtaccaatctcatatgatggtaatgaagattaaatgatataacacatataaagtacttatcaacgactagcacaatttcttaatactaaataaatattaggtatcaaccaatatatgaggtcaaaacaagaagaaaaataataatagcaataactgtcatttatctggcccctgctaaataatagtctctttccaacaaccattttacagatgggaagagtgaggctcagaaaggttaaatcatcttctgatagtaagtggaaaatttgacaccaggtctgtctgaacttcaaggcccatgctatactgctaactttactgaattattgaattgggtctccatttagtccctgatcaaccatggccttggtatatctagtacagaagatactgatccagaagatgggaatcaaattgcccaagtaaaagcataggagcttgagaagggggtggcaacaaggagccagacagaatctggtaccctgcacagatgcaccatacatccatatactccatgaaccaagagcattgtgagccacatacatgggacatgcaccctgtaattcattctggaaaatggataattataggaggttgtcagattcaataggcaaatgctggggaaatcaaaacaacaaattatgtgagagctgatatttgttcaggcagacatctgtcttctgttagagaatttagggatgtttttcaacacaatgttttaaatatggcttggaaaaacctctcctcwgcatggtctgcatgatagagccaaattcctgtttccagtgggtcttttcacactcacagagggctggttcccacagtcatggtggaggcagggagggacaaggacatatttaggctgagatccctctacccagacaaaccaagctgtcctcctcctcaaaatgcactttctgctcctgtaaggccacgatccacaccacctcca

SEQ ID NO: 720183 - DNA, 645 bp, Homo sapiens
tttatgtgagagaggggtctcactccatcacccaggctggagtgctatggcaccatcttagttcactgcagcctgaaactcctggggctccagtgatcctcctgcctcaatagcagggtactgagctcagtagctcagtactgcctcctgagtagctgggactacaggtgttttccagtgaacttagaaataggcattaatctattttgtgggcagtatttgggtcatgcattagtcaacagtcattttatgcccttaattcatggtcatatagtctttaggtgcatagtaagttcctatgaattccatgcaatttttgaattcaaggctggaaaaagaagttggctattctctgttgacagaagtttcaggaatggctcagccagaaccttgcaatgctagagctgggagagccaaagagttcatctackctatcttctcgttgcacatatttaaaaagatcacataagttatgggttggaaacggaaggccaggcacagtggctcacatctgtaatcccagcactttgggaggccaaagcagatggatcacttgaggccagtgattcaagaccagcctggtcaacatggtgaaaccctgtctcgacacaaaaagtacaaaaattagccaggcgtggtggcggg

SEQ ID NO: 720184 - DNA, 645 bp, Homo sapiens
tttatgtgagagaggggtctcactccatcacccaggctggagtgctatggcaccatcttagttcactgcagcctgaaactcctggggctccagtgatcctcctgcctcaatagcagggtactgagctcagtagctcagtactgcctcctgagtagctgggactacaggtgttttccagtgaacttagaaataggcattaatctattttgtgggcagtatttgggtcatgcattagtcaacagtcattttatgcccttaattcatggtcatatagtctttaggtgcatagtaagttcctatgaattccatgcaatttttgaattcaaggctggaaaaagaagttggctattctctgttgacagaagtttcaggaatggctcagccagaaccttgcaatgctagagctgggagagccaaagagttcatctacgctatcttctcrttgcacatatttaaaaagatcacataagttatgggttggaaacggaaggccaggcacagtggctcacatctgtaatcccagcactttgggaggccaaagcagatggatcacttgaggccagtgattcaagaccagcctggtcaacatggtgaaaccctgtctcgacacaaaaagtacaaaaattagccaggcgtggtggcggg

SEQ ID NO: 720185 - DNA, 1151 bp, Homo sapiens
cactgataggagattgctcctttctgctatgacatcttctgcgtcaaaggatctcattagtgtttgtttttatcaggtttttttttttcccgacttttatctcactcagagtgaattcagtgttcactgtcatttacaggataggaaatatatgtccgtttgcattgaaaatcctgcttattccatctagactgtcccagataccactgtattcatgtaggtttggtgttttgtctttcatctatttctgaaatcaaaattttgttaaaaatgtttcgggaaagctcaaaagaattggcccattggaatggagtgaatgcaggctttctccatgcaagcagccatgctttcctagtcattaaccacctgggccttgggcctgtcatgttttttgagtctctgtttcttcctctggcaaatgattttgatgggtgtcatgaggatgaagtgggatgatgtgaaggacttggggtgcttaagaaatctcccaggccattcacaagccacatgcctgcaaagaagtcttgggtgagcagatgccaagtttcccagcaaagagatttctaaggtgcagtgcttcagcttgacattagagagatggtcttggccggcagctgaggttttccttctcttttgacctgagctgggaagaagtgtgggtactggcagctttcgtgggggtacctctaaaatagagcagcagttccctgttaggaatggcagatgagattgtgatgaatgcaacaagggctggagcayagaacattctgaacggactattactccctcaaccctatgggctacctgggccagagagatatacacagagaagactggtcaaaggggaaagaaaataattccttttaaatatctaggcaagcagccaacctcctctgatacagggacctgtgacaaagacagacttggagcatgtaacttgtgtttgaaagcatacgccagacccgtaacttcctcttgactttccaccccacctcttctggattacccgggtctgcaggtgaaattccagttgatttacccaaacgggtgcaagtgcagaggaaggagaacatggggaaagaggcaaaataaattttaaaaacagagagatagaaagaaagagaagacatgaagggcgaaggaaggggaaa

SEQ ID NO: 720186 - DNA, 481 bp, Homo sapiens
atcagatggggcccacccagattgagggtgggttggccagtccactgacttgaatgtttatctcctttggcagcacactaacagacacacccaggaccaatactttgcatccttcaatccaatcaagttgacactcagtgttaaccgtcacaactcctattgacagatgacagcctgrcaggaacattcattcctccttctcctagacctgctttgaggccactcatcttgagaacttcgtgctgcctgaagtggtggaggacgcattgcctcctggataacagctgcttgtttgtactgcatacacctttgctttatatgtttggtggagagatgtagtagagggaatggtgacctccaaaaaatatgtccttgtcttccataaatgtgatcttatttggggggggctgtgggggaggaggtctttgcagatgtaactaaggatcaacacaaaatcctcctggatttaggatgggctcaa

SEQ ID NO: 720187 - DNA, 402 bp, Homo sapiens
tatcatcattaacgtgattaatctacctgggttctggatcttagggtggcaggaacatggtcttgtgcctttttgacaacctctaattttgcctaggatactaaaagactttgtcagaatgtctcaaaaatattttatggtgaattgttccaccataactctcacaaatatcacctcttatctcagcccacaaaaaaaggtcaattatagataaaggaaaggacctcattgttgccgaaagacttagatatgaggtctggatttgcacttattcacttcaagactttatgtttccttatctgtgaagtgggtgtgctgaaaatgagtttattactctagctcctgtggagatgaagtgagattatatatatatatatatwtatatatatatatatatatata

SEQ ID NO: 720188 - DNA, 402 bp, Homo sapiens
tatcatcattaacgtgattaatctacctgggttctggatcttagggtggcaggaacatggtcttgtgcctttttgacaacctctaattttgcctaggatactaaaagactttgtcagaatgtctcaaaaatattttatggtgaattgttccaccataactctcacaaatatcacctcttatctcagcccacaaaaaaaggtcaattatagataaaggaaaggacctcattgttgccgaaagacttagatatgaggtctggatttgcacttattcacttcaagactttatgtttccttatctgtgaagtgggtgtgctgaaaatgagtttattactctagctcctgtggagatgaagtgagattatatatatatatatatatwtatatatatatatatatata

SEQ ID NO: 720189 - DNA, 402 bp, Homo sapiens
tatcatcattaacgtgattaatctacctgggttctggatcttagggtggcaggaacatggtcttgtgcctttttgacaacctctaattttgcctaggatactaaaagactttgtcagaatgtctcaaaaatattttatggtgaattgttccaccataactctcacaaatatcacctcttatctcagcccacaaaaaaaggtcaattatagataaaggaaaggacctcattgttgccgaaagacttagatatgaggtctggatttgcacttattcacttcaagactttatgtttccttatctgtgaagtgggtgtgctgaaaatgagtttattactctagctcctgtggagatgaagtgagattatatatatatatatatatatwtatatatatatatatata

SEQ ID NO: 720190 - DNA, 669 bp, Homo sapiens
ttcacaaatatttwttaagcttctattagggccaggattcatactagctgccatggttgaacaaaacaaaatgatctttacctcttgtaacttagtatgagaggcagaaactgagcatgtggcaaatagcatgtgtgatagatgtcttaaggaaaatatgggtaccgtaggaaaattaaaaaagaacagaggtgctacctgcaaacgtgtagtctgagagcatttcttcaaggagatgatgcttaaggtggtaagacaaagcagcccaggcagagggaataccacagtcagaggtcttaaagttggaaagatctgggctcactcaaagtcctaagaagaggccagtatgttttgggcatgatgaaggggatttggaggtgatgtggcaaaagatgaaccgggaggaattagcagggatttgacatcctacagacctggtgggtccaataaggagttgaaattccacgttataagcaatgggaaaccattaaaaagagtttaagccagaagagttatgaaatgagacataaaaagaaagggttagtgatgcctagcttaaaggaaatttaatctagttggggagctgagatgctccacatctttgccctgcaaaaagaacactttagagatcaacacaattgaatttaaatagcgtgttgggtgtccaca

SEQ ID NO: 720191 - DNA, 669 bp, Homo sapiens
ttcacaaatatttattaagcttctattagggccaggattcatactagctgccatggttgaacaaaacaaaatgatctttacctcttgtaacttagtatgagaggcagaaactgagcatgtggcaaatagcatgtgtgatagatgtcttaaggaaaatatgggtaccgtaggaaaattaaaaaagaacagaggtgctacctgcaaacgtgtagtctgagagcatttcttcaaggagatgatgcttaaggtggtaagacaaagcagcccaggcagagggaataccacagtcaraggtcttaaagttggaaagatctgggctcactcaaagtcctaagaagaggccagtatgttttgggcatgatgaaggggatttggaggtgatgtggcaaaagatgaaccgggaggaattagcagggatttgacatcctacagacctggtgggtccaataaggagttgaaattccacgttataagcaatgggaaaccattaaaaagagtttaagccagaagagttatgaaatgagacataaaaagaaagggttagtgatgcctagcttaaaggaaatttaatctagttggggagctgagatgctccacatctttgccctgcaaaaagaacactttagagatcaacacaattgaatttaaatagcgtgttgggtgtccaca

SEQ ID NO: 720192 - DNA, 669 bp, Homo sapiens
ttcacaaatatttattaagcttctattagggccaggattcatactagctgccatggttgaacaaaacaaaatgatctttacctcttgtaacttagtatgagaggcagaaactgagcatgtggcaaatagcatgtgtgatagatgtcttaaggaaaatatgggtaccgtaggaaaattaaaaaagaacagaggtgctacctgcaaacgtgtagtctgagagcatttcttcaaggagatgatgcttaaggtggtaagacaaagcagcccaggcagagggaataccacagtcagaggtcytaaagttggaaagatctgggctcactcaaagtcctaagaagaggccagtatgttttgggcatgatgaaggggatttggaggtgatgtggcaaaagatgaaccgggaggaattagcagggatttgacatcctacagacctggtgggtccaataaggagttgaaattccacgttataagcaatgggaaaccattaaaaagagtttaagccagaagagttatgaaatgagacataaaaagaaagggttagtgatgcctagcttaaaggaaatttaatctagttggggagctgagatgctccacatctttgccctgcaaaaagaacactttagagatcaacacaattgaatttaaatagcgtgttgggtgtccaca

SEQ ID NO: 720193 - DNA, 669 bp, Homo sapiens
ttcacaaatatttattaagcttctattagggccaggattcatactagctgccatggttgaacaaaacaaaatgatctttacctcttgtaacttagtatgagaggcagaaactgagcatgtggcaaatagcatgtgtgatagatgtcttaaggaaaatatgggtaccgtaggaaaattaaaaaagaacagaggtgctacctgcaaacgtgtagtctgagagcatttcttcaaggagatgatgcttaaggtggtaagacaaagcagcccaggcagagggaataccacagtcagaggtcttaaagttggaaagatctgggctcactcaaagtcctaagaagaggccagtatgttttgggcatgatgaaggggatttggaggtgatgtggcaaaagatgaaccgggaggaattagcagggatttgacatcctacagacctggtgggtccaataaggagttgaaatwccacgttataagcaatgggaaaccattaaaaagagtttaagccagaagagttatgaaatgagacataaaaagaaagggttagtgatgcctagcttaaaggaaatttaatctagttggggagctgagatgctccacatctttgccctgcaaaaagaacactttagagatcaacacaattgaatttaaatagcgtgttgggtgtccaca

SEQ ID NO: 720194 - DNA, 619 bp, Homo sapiens
tgtattatgttagatactgttcctgacaaggtattttactcttgacatattatcattagagatttgcaagtggtgaattctccatgtatctccaacagcaacttaacttctatttttaacgcttctgcagtctgttgaaayggctcccaccactttcccactagctctaggccctgattggagaaggaatgtgggtgccccagctaggttcctgagctggaggctctactgacagggaaaagaactatttagagagccaggttcttctttggcctcagccgcttcccactgaagtgttaactgcgcctccaaatttccttaatacttttaggaagataaggtattggttggtgatggtgtcctgttcttaaccctttccatgccagttctgattttgaagctgatggaatcactaaggtataggaaaaacttgttcagggcattccttttgactaactagctattattattatcatcatcaaagcaattcaggcttggggtttaaaaagccagacattggaaaaggatataaaatgaaaactaacatgtcctaatacccacaacccaaattcttagtctctgtgccagaaatgagttactaataccttatatttccttc

SEQ ID NO: 720195 - DNA, 1730 bp, Homo sapiens
caacatataagcaaagattcggaaattaacctggaaagtgaaattatgatgggaaaaaaacaaaaagaacatttactgtactaaaaactcaatggactgagcaaaaatacaataaatcttgattaggttcagtctaattttaccttcctttacgtgtctcacaaatgttagccgaacagcagattgcttaaaataacattctgcttttaaacttttgggcttatggaaatctttgcttgtggttgttgttattaagaaatagtgattttcctttactcttagttatgaagttgttctagattagaatgccaaagtgtgggactgtctaagcttagaattccctccaccatcctttcagtctctctccctctctctcttccccccaccttctccctttctctctctcttgtatctctctctctttctctcctttcctgtgtctccccacttcccaggcagattgcttctgttctgtcaaatgttcattcacctttgctaatgagtagctaatgggttttggcatcgtgggacacacagggattgagagggctgtttgatcacgggatggcctggtgtgctgtgattgtgcatatgggatcctcaaaaccagccccagagccgtttcctagtttccccaatagtttcctggaacatagggtgtttagaaataaagctctattttaaaacctccgattcaccactttatctggctaacatccttccctcttggaattgataacatgttgactgtgagtcataatggtaacttcctcatgaacatctgatgttgtgaaattaacaaagtcgagaactccccaacagttaagccaagaaatsaattataaaaatgtacttcagtcacaataccagagagaatccggttatgaattagtaacagatgggaaaatactattcactttcaattttacataaatgtctataatgcttgttctgatcataagtttttatttcttccagagcttcattatggttctagcaagattcaccattaaaaaatataataaaaagcttgggttgggcagatgctatttttctttcttccctctctgcttgttaagcaaaaaaataaaaaaataagtaaataattcaggtgaacaatatatatatacatatcatttcattgcttactttttgctttacaaaacaaattattatgcatttcctcaaaccagttagtcagggtatttatttttctttttttagattagcacctgtgccagaaaggaaactgtcagttaatgaagtctctaactccctttttactccatattactacagctctcacacaacctttaaaagtaaaaaatattgagtatttacagcaaattcttgacataaaaactgtctctgtgaattcaccaacagttgaagccaagtggttagatcacagacaaagaaagaagataaatgctctttggtgttcagtttggtagacccctggtatatttcccagccttgatactagtatcaggcacaaaacatgagccttcttggatttctctctacagcctccttccctggaaaattaccacccacattctggaccacttggctgccatctttgctggtgcccttgctagtttccctgagttggctggggtcaaggttgaagccctgggcctggatgatcctcacttccagtacgctgaaccatgttgagtcagccctccacttctgatcttgaatggactacaacactgtgaggtatg

SEQ ID NO: 720196 - DNA, 759 bp, Homo sapiens
ttttgtgttgagaggcgaagctcttaggaatataattatcttctttaatatcagaaccttagtttactggaaggagtgataaacagtgaaactctgtgattgcttctgggatacgtggaagaagcttaagggaggcaaagttaggaataatatcagaatgatgctcaaataatcagaagctgagacycccaaatctcaggcatttcggtcccagcttcactgtctgtgcagaaaacctgtgctgtgttttcgtccatctttcttctcaattgactttctcattaaatacaaataaatgtattataaaaggatatcttacatcattaccgcaaatggaaagtaagtatcatccttcatagataagagggaaaataaaataaataagatgaaaagaaaacaatgctatgcgttccagctgtatactatcatgtgcctaaggcttcgggtctgaaggctactacctctttgttaaaaaagaatattagaaagcattagggccaggcgcggtggctcatgcctgtaatccctgcactttggaaggccgaggcagatagatcacttctggttaggagttcaagaccatcctggccaacatggtgaaaccccgtctctactaaaaacacaaaaaattagctgggcatggtggcaggtgcctgcaatcccatctacttgggaggctgagtcatgagaatcgcttgaacctgggaggcagaggttgcagtgagccgagatcgtgccactgcactccagcctgggtga

SEQ ID NO: 720197 - DNA, 759 bp, Homo sapiens
ttttgtgttgagaggcgaagctcttaggaatataattatcttctttaatatcagaaccttagtttactggaaggagtgataaacagtgaaactctgtgattgcttctgggatacgtggaagaagcttaagggaggcaaagttaggaataatatcagaatgatgctcaaataatcagaagctgagactcccaaatctcaggcatttcggtcccagcttcactgtctgtgcagaaaacctgtgctgtgttttcgtccatctttcttctcaattgactttctcattaaatacaaataaatgtattataaaaggatatcttacatcattaccgcaaatggaaartaagtatcatccttcatagataagagggaaaataaaataaataagatgaaaagaaaacaatgctatgcgttccagctgtatactatcatgtgcctaaggcttcgggtctgaaggctactacctctttgttaaaaaagaatattagaaagcattagggccaggcgcggtggctcatgcctgtaatccctgcactttggaaggccgaggcagatagatcacttctggttaggagttcaagaccatcctggccaacatggtgaaaccccgtctctactaaaaacacaaaaaattagctgggcatggtggcaggtgcctgcaatcccatctacttgggaggctgagtcatgagaatcgcttgaacctgggaggcagaggttgcagtgagccgagatcgtgccactgcactccagcctgggtga

SEQ ID NO: 720198 - DNA, 759 bp, Homo sapiens
ttttgtgttgagaggcgaagctcttaggaatataattatcttctttaatatcagaaccttagtttactggaaggagtgataaacagtgaaactctgtgattgcttctgggatacgtggaagaagcttaagggaggcaaagttaggaataatatcagaatgatgctcaaataatcagaagctgagactcccaaatctcaggcatttcggtcccagcttcactgtctgtgcagaaaacctgtgctgtgttttcgtccatctttcttctcaattgactttctcattaaatacaaataaatgtattataaaaggatatcttacatcattaccgcaaatggaaagtaagtatcatccttcatagataagagggaaaataaaataaataagatgaaaagaaaacaatgctatgcgttccagctgtatactatcatgtgcctaaggyttcgggtctgaaggctactacctctttgttaaaaaagaatattagaaagcattagggccaggcgcggtggctcatgcctgtaatccctgcactttggaaggccgaggcagatagatcacttctggttaggagttcaagaccatcctggccaacatggtgaaaccccgtctctactaaaaacacaaaaaattagctgggcatggtggcaggtgcctgcaatcccatctacttgggaggctgagtcatgagaatcgcttgaacctgggaggcagaggttgcagtgagccgagatcgtgccactgcactccagcctgggtga

SEQ ID NO: 720199 - DNA, 759 bp, Homo sapiens
ttttgtgttgagaggcgaagctcttaggaatataattatcttctttaatatcagaaccttagtttactggaaggagtgataaacagtgaaactctgtgattgcttctgggatacgtggaagaagcttaagggaggcaaagttaggaataatatcagaatgatgctcaaataatcagaagctgagactcccaaatctcaggcatttcggtcccagcttcactgtctgtgcagaaaacctgtgctgtgttttcgtccatctttcttctcaattgactttctcattaaatacaaataaatgtattataaaaggatatcttacatcattaccgcaaatggaaagtaagtatcatccttcatagataagagggaaaataaaataaataagatgaaaagaaaacaatgctatgcgttccagctgtatactatcatgtgcctaaggcttcgggtctgaaggctactacctctttgttaaaaaagawtattagaaagcattagggccaggcgcggtggctcatgcctgtaatccctgcactttggaaggccgaggcagatagatcacttctggttaggagttcaagaccatcctggccaacatggtgaaaccccgtctctactaaaaacacaaaaaattagctgggcatggtggcaggtgcctgcaatcccatctacttgggaggctgagtcatgagaatcgcttgaacctgggaggcagaggttgcagtgagccgagatcgtgccactgcactccagcctgggtga

SEQ ID NO: 720200 - DNA, 759 bp, Homo sapiens
ttttgtgttgagaggcgaagctcttaggaatataattatcttctttaatatcagaaccttagtttactggaaggagtgataaacagtgaaactctgtgattgcttctgggatacgtggaagaagcttaagggaggcaaagttaggaataatatcagaatgatgctcaaataatcagaagctgagactcccaaatctcaggcatttcggtcccagcttcactgtctgtgcagaaaacctgtgctgtgttttcgtccatctttcttctcaattgactttctcattaaatacaaataaatgtattataaaaggatatcttacatcattaccgcaaatggaaagtaagtatcatccttcatagataagagggaaaataaaataaataagatgaaaagaaaacaatgctatgcgttccagctgtatactatcatgtgcctaaggcttcgggtctgaaggctactacctctttgttaaaaaagaatattagaaagcattagggccaggcgcggtggctcatgcctgtaatccctgcactttggaaggccgaggcagrtagatcacttctggttaggagttcaagaccatcctggccaacatggtgaaaccccgtctctactaaaaacacaaaaaattagctgggcatggtggcaggtgcctgcaatcccatctacttgggaggctgagtcatgagaatcgcttgaacctgggaggcagaggttgcagtgagccgagatcgtgccactgcactccagcctgggtga

SEQ ID NO: 720201 - DNA, 759 bp, Homo sapiens
ttttgtgttgagaggcgaagctcttaggaatataattatcttctttaatatcagaaccttagtttactggaaggagtgataaacagtgaaactctgtgattgcttctgggatacgtggaagaagcttaagggaggcaaagttaggaataatatcagaatgatgctcaaataatcagaagctgagactcccaaatctcaggcatttcggtcccagcttcactgtctgtgcagaaaacctgtgctgtgttttcgtccatctttcttctcaattgactttctcattaaatacaaataaatgtattataaaaggatatcttacatcattaccgcaaatggaaagtaagtatcatccttcatagataagagggaaaataaaataaataagatgaaaagaaaacaatgctatgcgttccagctgtatactatcatgtgcctaaggcttcgggtctgaaggctactacctctttgttaaaaaagaatattagaaagcattagggccaggcgcggtggctcatgcctgtaatccctgcactttggaaggccgaggcagatagatcacttctggttaggagttcaagaccatcctggccaacatggtgaaaccccgtctctactaaaaacacaaaaaattagctgggcatggtggcaggtgcctgcaatcccatctacttgggaggctgagtcatgagaatcgcttgaacctgggaggcagaggttrcagtgagccgagatcgtgccactgcactccagcctgggtga

SEQ ID NO: 720202 - DNA, 656 bp, Homo sapiens
aatggaattttgcaggataaataggactcatcaatagagtgaagaaagggaaatgttaaacatgtttcttgtagagcaaatttaaatgaaaaaaatctgagaatggyatatgatttggtgcaattgtagtacagaatgggaaccagggagcttccaccaaaaagaagaagttggagaagtaaacctggccagattaatcgaagtcacgttgtgagcatgtgtgcaataatgtagtgaaaaatcactgactttttagcatctgtttctcccctatcttagcaactgctccttgattcactttcagagactttcctttccagcattcccattgatttgtgagctgcagaactgcacacagaaggctggggcagggtggaagagcagggagtccccagaggcacagtcacctgctaattctttgcacctgaacctccgtgagtacatggtgcagctcactgaaggcaagggggcataaggactaagagacatcttcaaaaaatgtgaaaatggctgggctcggtagctcacacctgtaatcccagcactttgggaggatgaggcaggtggatcacctgaggtcaagagttcaagaccagcctggccaacatggtgaaacccccacgtctactacaaatgcaaaaattattcaggcgtgg

SEQ ID NO: 720203 - DNA, 263 bp, Homo sapiens
ctccaaggccctgtttgagtgaccaacttcacggtcatcctaaatgaggcagtttatgtgtcttatgctctaactaggaaaccttaaacaatcagtagctttgtcaaaggtaaactctctaccccatgaaaraaattctaatatcagaactggattcaggttcagcctcttgtgcccctgcacaagaaattgggagctccagctgttcttctccggaaggtactcctatcaactccaaatagtgggggaccaagaaggaaatc

SEQ ID NO: 720204 - DNA, 2921 bp, Homo sapiens
ctgtggatttgaaaacttttgaattaaaaagtattttttaaaaagaaaagttcacaaaaaaataaaaaaggaaattattcttatgcaaaactacatggttttctttagtccaggtttttggtgcaattatttccccttctttacaatgtggctcatgcaggtattttatatccttttcaagaaataatgaaggccctggacgcagtggctcatgcccgtaatgtcagcactttgggaggctgaggctggtgtatcacctgaggtcaggagttcgagaccagcctggccaatatgatgaaaccccatctctactaaaaatacaaaaattagccaggcatggtggtgcacccctgtaatcccagctactcgggaggctgaggcaggagaattgttgaacctgggaggcagaggctgcagtgagccaagatcacaccactgtactccagcctgggtggtagagtgagactctgtcagaaagaaagaaagaaggaaagaaaaaagagaaagaaagaaagaaagaaagaaagaaagaaagaaagaaagaaagaaagaaagaaagaaaggaaggaaggaaggaaggaaggaaagaaggaaaggaaggaaggaaggaaggagagggagggagggaaagaaagaaggaaggaaggaaggaaaggaagaaaagaaagaaagaaagaaagaaagaaagaaagaaagaaagagaaagaaagaaagaaaaagaaagaaagaaagaaagaaaaaagaaagcaagcaagcaggcaatcaagcagcaggcaggctgggcacagaggctcatgcctgtaatcccaacactttgagacacctaggtgggaaaatcacttgagcccaagagatagagaccagcctgggcaacatggcaaaatcctgtctctacaaaaaatacaataattagctgggcatggtggcgcatgcctgtagtcccagctactcagaaggctgaggtgggaggatcaactgagcctagggaggttgaggctgcagtgagtcaagattgagcctcttcagccttggagactctgtcaagaaagaaagaaagaaaagaaacaaagaaaaaatgggaaaaagaaaagaaagaaagaaagagaaaggaaggatggaaggaaggaaaagaaaggcaggcagacaaataaagaaagagagagagggaggaaggaaggaaaagaaagacagacagacagataataatatgatgacacaaagaaagaaaaaaagaaagagagaaagaaagaaagagccctccacaactatgattctctccgctctccctttaacaaatgtttctgttctctcaagttgctcagccaatcaggagactctccctcacccttctggaagaagagcactaccaccgtcacacaaagagttttcctggaaccaggagctgaccttgcacatcacaaaatgctaagagacactcctgagcacagtccagatatggatttcagattcagcatttcaacaccagattcagttagcccagctgacctctggatgcctcaaagaattcaggttgacagggttcatccctgagtctcatggcaaaacctcatcctcatttgcactgttaaaatgttcccagaatatcctctcacatgcccatatcagaaggtatgacctttgtgccacagttgagaaggtcttgggtggattttccagaagagttagacctcatgaggttagactcaaggtaacagaaagaaagcttgaaggaaacagacactggcctacagcagacaagatttgtggaacatgtgagcaaagtttccaagtccctacatattaaactgtagaayaggagtgagatgaattatccatgcccctaattacatgttagagacaggtcaattttgactcaagaacaaggaagagtgttttaaaggggagtggccaaagatagaataatgtgatgcctccatcggtagtaagctctccatcaaaggaagtatgaaaacaaaggctgtatgacgattgggtgaggaaccaccttagagataattcaagcatcaggtgaaagagtgacttgaagaatctccaagatcccttactacacactcacatttctctcttctttattctccctatgacagagaagtctctttgaaataggaccaatggcatcaacactgatccctaaagacccagccctctgcatgggctgtgtccttagctatttacaatagcatagagtagacgtgaggaaatctgtcgccaatcacagcagggtgaaaacagggggccaaggtgcttctaggggagccttctaaaccttcgtgttggtctttgtccatcactcccctgatcaccaggtagcttagacagcctgctgaaaagaattcagagcctctcaagctctcagcgggaaaaccttggagccctgttgttggaaatagctcccaacctgcatcttaggcaggtatttttaggttctgtcttgaagacacggaaactttcatacatttcagcttctttgtctggagtcactgcaaccccagacatgtcattgaaagggggtataattgtggtctcctccacccaccaatctgagcaagtctgaaagagtttcctgctgtgcagcagggaggctggagagccttttctggcaagggaaagtcaaaatggattttttaaaataataatatgttgatcaagaagagaaaaaaaaatctactgaggagagggggctctgctttcgggctgatacagagaggaagtttacctattattttgaaacctcgtcttaattctcctttgcaagtatagaattcaagcttggaggagctaaagtcctacttgaggataggaaataaagatgtttggaatgatcttacttagatcagtggctgttgttaatatgaggctctctgaggaataattataattgtcaatcactgggcatagcc

SEQ ID NO: 720205 - DNA, 614 bp, Homo sapiens
gtagttaaatgcctgaagtttgaaaaacactgttatatacatgattagatttggggagaaatctcaggtgtgtattccaaagaactgaggaatgcaatgtcattctttaattctctgttagcattgtcccatactttgaatttttatgtgagacttgggattaggctttgttatgtgactgaattgtatccccacaaccaccaccaaaattcattgtgttgaagccctaatccccaatataactgcatttggagaaagggcctttaaggagataattaaggtcaaatgaggtcatcagggtagygctctgatccagtaggactgccgtccttataagaaaaaggagaaaaataccaggaatatgagcacacagggactaggctattctaggcagccatctgcaacccaagaagagaggcttcaggagaaatcaaccctgcagacagcttgatcttggacttccagcccacagaactatgggaaaataaatttctgtggtttaattcacccagaatgtggtattttgttatggcagacctagcagaataatacaggcttatatgggccaaaggaagagattttgtccgagagttctttctctctataattaggag

SEQ ID NO: 720206 - DNA, 1421 bp, Homo sapiens
gcccttctgcatctcagtcttctcctctttgaagccaagatagtaataattgccacactggattattgagagaataagtaagataacacatggagcatgtttagaacagtgtctaatgcacaatcagctctcaatacacattggatagtgattactgtcaccactccctcagccatggctcttttgtgctgaagttgctcagcagaggtcayctgccttgctttttcatttggtaagcataacagtctccctgtgagacctcttcttgggatctcgcttctctttttgtaaaaccctctttgcactctgcagggtgctgtgtttataagtcctctgtatatattctttacctaatcattcccattgtcaagaatctttcaatggcaagtatcgtaatacatgattcgaatttgcttgatcaataaaaacattttctggctttgtaacaaacagtccatatttgagactcatgcatatgagacttgatttgccagctcaatctcagcttcaagaacttagtttctgttttttctattctactttcttgggtgtcagtttaatcctaaggatggtgggaaagaaaaaaaattattgcaaaactagttaaaggagtaaagaagactttattcatgagtattgcagtagtggggagagatcaggctcaaatttgagtacaacaaggacaagtggggatttatagccaaggaacaggatgagggtgtcagtggattggaaattactaagaggagagacatcaggggtaggggattcttgctaaactggcctaacaagattcttgctaattgcaggaaagtgagggttgagaaacttgatatcaagtgtgatgccatatcaagggtgggaagtaatttagcaggattcttaccaaaactcggctgggcaggccaaagacaagccaggggtcaaggtcaaggcctaggtgaaaagagagctcagaggagcttgactaaagttgggtcacagggagtctttgtaagtggctcctcttgtggtttaaaacggctgctggcacctccttagtccatgcgttctttaatcaaagccagcagcaaaaccaggaataactttgtccttaattcccaggaaaaagtccaaagaatcacttatatcagatcagcttattcacgtgtgatcctctggaccaggaggttggctgtgctggtttgtttagcattgtcacttgatccactcctacagccaggaaaggaagtgatagcctctaagttgtgaagctcccaaacaaaacttgggcccaggctcatccctaaatatgtggggatcccaggaaagaatataaatagaagcccaccctccatatgtatgaagatttttaagttatcaatcaagctaacaaacagtttaataaaatatgttctacctgccctgggttgccagattaa

SEQ ID NO: 720207 - DNA, 630 bp, Homo sapiens
tgagctatgaatcctcccacctcagcctcctgagcagccaggactagaggcatgcacaaccatgcccagctaattttatttatttatttatttttggtagaaatagggtcttgctgtgttgccctgtcttcaagacctgccttggtgttacctgaagcagcttgaacttctgtatgtttgtaaaaggagcccaaaagcactcacctgacacagaaccctaggccccatcagaggcctggaggcagggyggccttccctgggcagaaacagattaggccttaaaaacagacctggaattactacaccagcaaccttctcatcttaggatatatttccacaggattaatagctgggtgtgaggacatttactgtctaattagcacaggagtttctagtagtgagagaatcagtcaattgaccaatcaatctggtattcattgggcacattctgtgtactgctttctcacagggcttccttcctatagagatctaggattcttcggcatcttgcttcttttaaaccttgctgtggttcagttccttgttctcatccctggctgtacattagaatcacctgaggagttttgaacagcatgtcagagccctttccaagaccagttaagtcaaaat

SEQ ID NO: 720208 - DNA, 630 bp, Homo sapiens
tgagctatgaatcctcccacctcagcctcctgagcagccaggactagaggcatgcacaaccatgcccagctaattttatttatttatttatttttggtagaaatagggtcttgctgtgttgccctgtcttcaagacctgccttggtgttacctgaagcagcttgaacttctgtatgtttgtaaaaggagcccaaaagcactcacctgacacagaaccctaggccccatcagaggcctggaggcagggcggccttccctgggcagaaacagattaggccttaaaaacagacctggaattactacaccagcaaccttctcatcttaggatatatttccrcaggattaatagctgggtgtgaggacatttactgtctaattagcacaggagtttctagtagtgagagaatcagtcaattgaccaatcaatctggtattcattgggcacattctgtgtactgctttctcacagggcttccttcctatagagatctaggattcttcggcatcttgcttcttttaaaccttgctgtggttcagttccttgttctcatccctggctgtacattagaatcacctgaggagttttgaacagcatgtcagagccctttccaagaccagttaagtcaaaat

SEQ ID NO: 720209 - DNA, 612 bp, Homo sapiens
ttagccgaacatgggggtgggtgcctgtaatcccagctactcaggaggctgaggcaggagaatcacttgaacccgggaggtggaggttgcagtgagctgagatcacgccattgcactccagcctgggcaacagaacaagactccgtctcaaaaactaaactaaaataaaaaaataaaaaataataagataaaatttgattggaagtttaagctgtagatgggtctgaaagtgtggcatgtgaaatacatgttaattagtttgaattaatgtaagggtgcttctcgatcttaaaactagcagtgtaagcttaagcaaaaaaagttcagttttattttttcccagactaatataattctagtaccttccaagtgctaaggtagaattctgaatgtttccaagagtgtaagaaattggcacatggctgggtgaaaagtcatgccctttttttccattattcgtctgtggatttcacccctctgggctttcacctagccaagggatctgtagaagcttgagttttgcgcattttcttcygacttagttttggttgtttggtgttaagcttttcttcctgtggcgtgccgttttacagtagtatcttcatttgttga

SEQ ID NO: 720210 - DNA, 437 bp, Homo sapiens
atatatatatatatatatatatatrtatatgtatatgtatatatatatatatctttcaactacttgccctgagtacttgagtacttctaaatagccacagctctgctggaaaaaatacttgtaattcttttttgctttttagggtccctctttggatgtgactatgaatttaattttacataaatcttagagaacgtggggttccttcagtaaaatataggtaagagtagcttcagcaaatctgcttatttttatttctgccacctttccatttagaattctcagtgccgttctttagactgttagacttgcttgcctgaagtgtttgcttgaagccatccattatttcttaaagcaacacggtctgtggcttcagctacacaattctgacaaccgtacaacttggttggttcaggcttttaaaaaatcagtcaaag

SEQ ID NO: 720211 - DNA, 1115 bp, Homo sapiens
ttcccacactccttctcatggacatcttcattctttgactacaccaaactcacgcctacttctgtgctcacactgactgtttattatttctgaaatcctctttgccagattctctcatatctgacactttcttatcgtttagctttcagctgaaatgttaaytccagtaggaatcttccctaaccttcatatctgcacaccattttgtattgcattgttcatagcatttatctctaaaaagattatattactcattgattcactcaattattgtttctctctcccaacagaatttaagcttcagtggagcagcgatcttatccacctcatccattactctattgccaatgcccagaacagtgcccagaacacataccatgaatcagggcatgaaaagctgcattaaatacagaataactgtgtatactccacagggctcaaattgcttctcctccacgagagacacaccagtctgtgactggctgtcaacccaaaatgtgatacttaattggaactcacattggccactgctgctgacagttcagcagccaggtgaccacagtaagtcctcaattaatggtggctggtaattgcaatttcatagggcaagcttctaccttacacttcttttatccaaatgttcttcacttcttgagcatgtattattttaggtgaactttagaattcttttccattttccaaaaatctctgaaaaggttatccagaattcctttacatttataaatcagtttggaatttaataagggcagtagaggaaaagatctgtatttggacatgcaaaagggataaaggtaatcttggaacaatttcccactggcttacttaatactcgacatacttaaatacctcctaataggtccccttgtaagcattttaaaattcgcaattttcaaatatttagtggggaaaaaaaacaagtcttcccaaatggcttgtgagattttctcataggaagaattccaagaagaatatgtaataatagtctacatttccataaaaagtatgagatattttgatgtgttggttacatctaagcctggaaactataatcagaaatctggtctttggagctttgtgtgaaaaacaaatcagtt

SEQ ID NO: 720212 - DNA, 556 bp, Homo sapiens
aattttttctctgatgtcattcagtgaaaaagatcagttttctgtgaaattcattagtgaagcctcttaagtatcagcctatattcatcttcacatgtgactttcaatgtgcatatttattatgttttcctgttttttgtttagttaaagcagtccttaagaaaagggagtatggmtcaaagtacactcagaataatttcatcactggagtcagagcgataaatgagttctgcctcaaatccaggtaatttttttaaaaaatgtagccgtgtgtcatatctaaataatctaaataactattcctttcttagagtgtgttacctgctaccatccatatatggaaaatttgctactggctccttaaaatgaagagatatttttattcagtcaaaaatgttaaaaattgttagcaaactaaactgaatcctgccccagcattagcaattctagtctttcttagtttcttaaacccacaatggtaaattcttcaaaagctttccatcacacaagaatcttaggagttaaattgttaagtcattggtatgtgacagaattc

SEQ ID NO: 720213 - DNA, 556 bp, Homo sapiens
aattttttctctgatgtcattcagtgaaaaagatcagttttctgtgaaattcattagtgaagcctcttaagtatcagcctatattcatcttcacatgtgactttcaatgtgcatatttattatgttttcctgttttttgtttagttaaagcagtccttaagaaaagggagtatggctcaaagtacactcagaataatttcatcactggagtcagagcgataaatgagttctgcctcaaatccaggtaatttttttaaaaaatgtagccgtgtgtcatatctaaataatctaaataactattcctttcttagagtgtgttacctgctaccatccatatatggaaaatttgctactggctccttaaaatgaagagatatttttattcagtcaaaaatgttaaaaattgttagcaaactaaactgaatcctgccccagcattagcaattctagtctttcttagtttcttaaacccacaatggtaaattcttcaaaasctttccatcacacaagaatcttaggagttaaattgttaagtcattggtatgtgacagaattc

SEQ ID NO: 720214 - DNA, 798 bp, Homo sapiens
aggtacatayggctagtagctaagatactggacggtacaaatattgagggtatgaaggggattgttggagattctctggtaaccatggtgtcatttcacagtgctcccccagagtctaggacaaacaccctgtgtctgtgaatggaacttagggataagttgaagagatcaaaagagtgattctaggctcattggcttgtggatttgtggaccttgtgtagtttggattatatggcctgagaatgaaattgtgaatgaacattcttggaattttgtgtgtatatgtaattggccaacatcaagaccaccttttccttctgtaatgtggtgtattggtcatcatgggctgccataacaaaatgccacagactggatggtttaacaaccaaaatgtattttcccagagttctggaacctaggaagtctaagttcaaggtgccagcaagataggtttcattctgaggcctcttcccttggtttgttgggagttaccatctcaccgtgcactcacatggcctttcctcagtgtgtgtgtatgcagagataaatagatatctctctgtcttcctcttaaaaggccactagtcctattggattagggtgcctaatatgggtgtgcgtccccacccaaatctcatcttgtatctcccataattcccacgtgttatgggaggaacatggtgggagtcatttgaatcataggggtggctctttcctgtgctggtcttatgatagtgaataagtctcactagatctgatggttttaaagaatgagtttccctgcacaagctctctctt

SEQ ID NO: 720215 - DNA, 601 bp, Homo sapiens
gttccatggttctctggatttcagggtcaagttcagatcctttcctcagtacacccctgcctgcctctctagcgcaaatctttcacaatcccctgactggtaccatcattctggtcacactcaactagtcctctcgctgtcctgttacttcttgcactttctgttactctgtatggagttcccttcccgttttaaggcagaagaatatggtatggcggtagggaacctaatgccctttctcgctgacttcctagaactaaattgaaggaaaatccttactgtccacgcttaagtgaataaagggccagatactactccctttgcaagccccaacctgttctgcgcagatttgggaaattgaaagtacctctgattggttgctttttgtaaccaatcagacgtttgcatagaagtgtaactttgtaacttcttcagcctctgattggttgctttgcgcaaccattcagactgattgcgggccaccacttcatttacatgaagtgaactccaagtggccaatgggaaacctctagggggtatttggaccckagaagactctgtatccagggcccttgagctgctgtctcactctcccacactc

SEQ ID NO: 720216 - DNA, 2883 bp, Homo sapiens
tctctttaggactctgtgcctgcctctgtccccctccccgcagcgacctccctctatccccttccctagccttcgccccggagccgcaggacgtgcctgcagcctcctgtcgcgcggccagggccagcrgggcgcggggagcccagctactgtcaaaacagagtccttcagccttaagcactcacaaggggtccggccctaggaaatgtggggagggggtgtgattgaagagagagaaacgggagggggacagctttcctttgtcttctctcgagttacatcattttctaattaggcataaaattgtcttcatacactggtattgcggccttcataaacatcgccattatggtttataaggacgccattgtggtgaggctgtcccaaaatagaaagagctggggagggagaggcctggagtccgggaggccccgctttgtcctcccctgggagaagatggatggccagtgtcacgcagatgatgacttgggactattaaattgtcagaggggggcagaatctttaccagcccccagcgctggtggaaaattctagaggcaggagccgggggttcttggatgggaggggaaggccgggcagctggattcgctgggcaggtggaaaaagaggtaagttagtcgctggcagaggcagagcggagggcagtgggggccgaggctttgatctcctcccggggcaccctgacttcgctgctctctgagctcagggccactggatctggagctgacctcccacccgatccccatcgccaaggttgggaaacaagcagggctagagaaatgagaggggcagcgaacccggaggagcggcggagggctatgccaggcggggagacaattgttctcattattcggagctgaggcccaagcccggccacccgcccggtcggggggcgcgtcgctaactggatggagatggatggaggcgccctgagcccccggcgtcgtgtcagacccggggcaattactgtcccgccaggatggacacactgccctgccatcctgaccccggcgcccaggcccactggcccactggctgcctaagccgcctgggcgattctctctctcgcctttacaataacccaacttgacataaataactcccctgagcttgtctacatctgcttgacctcctgaacccgcggaaaatcttttgttgcatttagctaacttacatttttctatagaaaaaaaacttttaaaactgcatattctagcctcggcttattcacctctagttcggtctctggtatatgttggaattcacattgcccttccaaatcatggaggacagttccctcctgcgaagacaggtttctccctgattatgctgcgggcacaagtgtgctgttccgggtgtcctgagttttgcaaggtggcctacagacacttggtgctccaggaagtggtcaggtctccaaaatcctctcccctggtagctggggtgggagtgggggccaaaagggtgaagaggacagcagttctcaggagtgctgatgccctgcttggtcctggctgtctaagggtgcagctaggcgacaaggccagttggcagaagcagccaggtgccccacgtgtgctctctcgctgacctgatctggcagggttaggaaggggccagccctggaagtgccaagctggcgccatgcactgcggtcaccaggtgccaagacaggagggagctgatggtggaaagaggatgggaatgattcagagaattctgtggaaattgcctggtctggtcactccagctggcatgggcctggggatgccagagccagctttgctctccaaggcgtcctctaggtggggggtgggtagcattgcctgcagcagccttcctacctgccatttcctgcctacttagtcccaggtggctacaagtcagaagatcaggacagtatctcagaatttagagatggaagggctcttagaggtcagatggccagagtgactcccaagtgtgatggtacagagtcttatctacccctgataggtttaggaccctaactgtccctgatgtctccatccgcagaggaatatgggaggagctgaggctgggcctggccagagtaagctctgttgaacacaggccctgtggcctgggctttccttgttcatgggtgagggaagcagcagttgcaggaacaagaccttgacttagcagctgtatcaaatcaaatcaaaacaaacagtaatttcaggattccaaaactctggggccagtttttcttataacacatttttttccttttttttttttttttgaacgcggtggctcatgcctgtaattccagcactttgggaggccgaggcaggtggatcacctcaggtcaggagttcgagaccagcgtgaccaacatggtgaaacccgtctctactaaaaatacaaaaaattagatgggtatggtggcgcgtgcctgtctgctactcgggaggctgaggcaggagaaccttggaggcaaaggttgcagtgagctgagatcaagccaccgcactccagcctgggcgacagcgcaaaactttgtctcaaaaaaaaaaaaaaaaaaaagtccgcagtatggttttcacattatcactctcaatgccattggaggtaggtccaagctggtgtctctttgattagtctccctaaacccatctattcatttactagccattagttattctttaattgagtccaaaaatgtttgtgaggagatagtcccatatgagattaaaagaaagaaagaaaacaaaacaacaaacaaacaaacaaaacagaaaatcaggtgtagtggacactgaagagtttctgctgtaacttgtttgtggtactacgggattttggttcagcctagatttaccagctcctgacttgggg

SEQ ID NO: 720217 - DNA, 1699 bp, Homo sapiens
  misc_feature 646, 647, 648, 649, 650, 651, 652, 653, 654, 655, 656, 657,658, 659, 660, 661, 662, 663, 664, 665, 666, 667, 668, 669,670, 671, 672, 673, 674, 675, 676, 677, 678, 679, 680, 681,682, 683, 684, 685, 686, 687, 688, 689, 690, 691, 692: n = A,T,C or G
  misc_feature 693, 694, 695, 696, 697, 698, 699, 700, 701, 702, 703, 704,705, 706, 707, 708, 709, 710, 711, 712, 713, 714, 715, 716,717, 718, 719, 720, 721, 722, 723, 724, 725, 726, 727, 728,729, 730, 731, 732, 733, 734, 735, 736, 737, 738, 739: n = A,T,C or G
  misc_feature 740, 741, 742, 743, 744, 745: n = A,T,C or G
aaaaaaaaaaaaaacctcatttccagaaaatttttctcatatttaatatctttattatgattacaacataatacatttgtgcttatattctctaaacccaaataaccatatatacttaaattgaatctgggatatttcctctatcttctccctattttaaaatcattcactttccagtgtttacggtacaaaagtgtagattcacccatctacaaaaacctatcttataattttttttaaaattcagataaccataaacttgaaactattaaaaagcagagcttgttctatatcacagctaattcaagtctgccttgtaagtgcatctatttccacatgtattagaaaataattgatgcaaaaaaatgttaaccatatttttgtcttgagtaatttctgtaagtgtattgcccacagggttctcattacagctgtggaagttccttttacatcaaagctcctgggaccctcaatcagaaatttaggccaactttggggaaagtcaatttgctctctccttagagtaacaaaattagatacttgaacttgatatcaaggattcagagacacacagcaggctttttataccaaaatcttgcatttatattttgttcatagacaacaagaaggggagagctaagcagtnnnnnnnnnnnnnnnnnnnnnnnnnnnnnnnnnnnnnnnnnnnnnnnnnnnnnnnnnnnnnnnnnnnnnnnnnnnnnnnnnnnnnnnnnnnnnnnnnnnnctttatggtgggaggtagattcaaattttttaaatttaatgtgttttttggtaggtgtagggttgtacagttgtcccagtcccacttaataatcattctttattgattgaatggtatctctggtacagttttaaatagaagaactgtgcattcttttgttccttaatttaaaaatgcatttaaacattcaccattaaagacaatgtttgttgtaggtttgttttaccctttaaagaaattcctatttgtcctaattttctaaaagggtttgagatttgcatggatgttgaattgtattaaatgctttttctttagcttctgaaatgattgtatagtttctcttctttaatctgttaatgagataaatagcttttgtaatgtttaactactcttacattcttaagatgaatccaacatggtctgatacattgtcgtttttatgcattgctatattacattggctaatattaattaagtttatagatttatgaaagcagttgtttaatgtaaacttcttttaataaactttacagcagaaggtataggcrcagaactcaaagctccacttaagcaagaacctctccaagtaagaggtaaatatattttatcctatttttgtattataaagatgttttgaattaaatatataacattggtttatgtagagctctttatagttatattattctaagagtatagtttattttttacttttatttaaatagattgaccataaggatttattctcttacatataaactaattttctattaaatttattttgcatttttgtcacaaattttttcaaaagcccaagaaaggaataatggcaaataagaatcatcaattgcattatcatttttagaagagtaaggcaattaaagaacaagaggcccacacttttcagctactgcttattcaaatccaggtagagtttggccgttattgtctgac

SEQ ID NO: 720218 - DNA, 1699 bp, Homo sapiens
  misc_feature 646, 647, 648, 649, 650, 651, 652, 653, 654, 655, 656, 657,658, 659, 660, 661, 662, 663, 664, 665, 666, 667, 668, 669,670, 671, 672, 673, 674, 675, 676, 677, 678, 679, 680, 681,682, 683, 684, 685, 686, 687, 688, 689, 690, 691, 692: n = A,T,C or G
  misc_feature 693, 694, 695, 696, 697, 698, 699, 700, 701, 702, 703, 704,705, 706, 707, 708, 709, 710, 711, 712, 713, 714, 715, 716,717, 718, 719, 720, 721, 722, 723, 724, 725, 726, 727, 728,729, 730, 731, 732, 733, 734, 735, 736, 737, 738, 739: n = A,T,C or G
  misc_feature 740, 741, 742, 743, 744, 745: n = A,T,C or G
aaaaaaaaaaaaaacctcatttccagaaaatttttctcatatttaatatctttattatgattacaacataatacatttgtgcttatattctctaaacccaaataaccatatatacttaaattgaatctgggatatttcctctatcttctccctattttaaaatcattcactttccagtgtttacggtacaaaagtgtagattcacccatctacaaaaacctatcttataattttttttaaaattcagataaccataaacttgaaactattaaaaagcagagcttgttctatatcacagctaattcaagtctgccttgtaagtgcatctatttccacatgtattagaaaataattgatgcaaaaaaatgttaaccatatttttgtcttgagtaatttctgtaagtgtattgcccacagggttctcattacagctgtggaagttccttttacatcaaagctcctgggaccctcaatcagaaatttaggccaactttggggaaagtcaatttgctctctccttagagtaacaaaattagatacttgaacttgatatcaaggattcagagacacacagcaggctttttataccaaaatcttgcatttatattttgttcatagacaacaagaaggggagagctaagcagtnnnnnnnnnnnnnnnnnnnnnnnnnnnnnnnnnnnnnnnnnnnnnnnnnnnnnnnnnnnnnnnnnnnnnnnnnnnnnnnnnnnnnnnnnnnnnnnnnnnnctttatggtgggaggtagattcaaattttttaaatttaatgtgttttttggtaggtgtagggttgtacagttgtcccagtcccacttaataatcattctttattgattgaatggtatctctggtacagttttaaatagaagaactgtgcattcttttgttccttaatttaaaaatgcatttaaacattcaccattaaagacaatgtttgttgtaggtttgttttaccctttaaagaaattcctatttgtcctaattttctaaaagggtttgagatttgcatggatgttgaattgtattaaatgctttttctttagcttctgaaatgattgtatagtttctcttctttaatctgttaatgagataaatagcttttgtaatgtttaactactcttacattcttaagatgaatccaacatggtctgatacattgtcgtttttatgcattgctatattacattggctaatattaattaagtttatagatttatgaaagcagttgtttaatgtaaacttcttttaataaactttacagcagaaggtataggcacagaactcaaagctccacttaagcaagaacctctccaagtaagaggtaaatatattttatcctatttttgtattataaagatgttttgaattaaatatataacattggtttatgtagagctctttatagttatattattctaagagtatagtttattttttacttttatttaaatagattgaccataaggatttattctcttacrtataaactaattttctattaaatttattttgcatttttgtcacaaattttttcaaaagcccaagaaaggaataatggcaaataagaatcatcaattgcattatcatttttagaagagtaaggcaattaaagaacaagaggcccacacttttcagctactgcttattcaaatccaggtagagtttggccgttattgtctgac

SEQ ID NO: 720219 - DNA, 837 bp, Homo sapiens
tggagagataggggaacttcagagaatggctttatcctgggctttgacagccaggaagggcrcggaaggtagagagagctcgaggctgcttcttcagttcagcatgtggagttgctatatttattattattattattattattattattattattattattattattttattttttgagacagggtttcactctgttgcttgtgctggagtgcagtggcacaattttggctagcggcaatctcgacctcttgggctcaggtgatcctcccacctcagcctcccaagtagctgggactacaggtgcacaccaccatgcctggctcatttttgtatcttttgtagagatggggttttgccatgttgcccaggctggtctcaaactcctaagctcaagcaatcttcccacctcagcctcccaaagtgctgggattacaggcatgagccactgtgcccggcctccttgctcctcttttatagaactgtcttggctttccttggccatttattctcctatatgaactttattttattttattttattttttgagatagagtctcactgtgtcacccaggctggaggacagtggcatgagctcagctcattgcaggcttgggttcaagttattctcgcctcggcctcccaagtagctgtaattacaggtgtttgccaccacggccagataatttttgtatttttagtagagacggggtttcaccatgttggctaggctggtcttgaactcttggctttaagtgatctgtcctcctcagactcccaaagtgctggtattacaggtgtgagccaccacacctggcctcctatatgaactttaaaa

SEQ ID NO: 720220 - DNA, 837 bp, Homo sapiens
tggagagataggggaacttcagagaatggctttatcctgggctttgacagccaggaagggcgsggaaggtagagagagctcgaggctgcttcttcagttcagcatgtggagttgctatatttattattattattattattattattattattattattattattattttattttttgagacagggtttcactctgttgcttgtgctggagtgcagtggcacaattttggctagcggcaatctcgacctcttgggctcaggtgatcctcccacctcagcctcccaagtagctgggactacaggtgcacaccaccatgcctggctcatttttgtatcttttgtagagatggggttttgccatgttgcccaggctggtctcaaactcctaagctcaagcaatcttcccacctcagcctcccaaagtgctgggattacaggcatgagccactgtgcccggcctccttgctcctcttttatagaactgtcttggctttccttggccatttattctcctatatgaactttattttattttattttattttttgagatagagtctcactgtgtcacccaggctggaggacagtggcatgagctcagctcattgcaggcttgggttcaagttattctcgcctcggcctcccaagtagctgtaattacaggtgtttgccaccacggccagataatttttgtatttttagtagagacggggtttcaccatgttggctaggctggtcttgaactcttggctttaagtgatctgtcctcctcagactcccaaagtgctggtattacaggtgtgagccaccacacctggcctcctatatgaactttaaaa

SEQ ID NO: 720221 - DNA, 837 bp, Homo sapiens
tggagagataggggaacttcagagaatggctttatcctgggctttgacagccaggaagggcgcggaaggtagagagagctcgaggctgcttcttcagttcagcatgtggagttgctatatttattattattattattattattattattattattattattattattttattttttgagacagggtttcactctgttgcttgtgctggagtgcagtggcacaattttggctagcggcaatctcgacctcttgggctcaggtgatcctcccacctcagcctcccaagtagctgggactacaggtgcacaccaccatgcctggctcatttttgtatcttttgtagagatggggttttgccatgttgcccaggctggtctcaaactcctaagctcaagcaatcytcccacctcagcctcccaaagtgctgggattacaggcatgagccactgtgcccggcctccttgctcctcttttatagaactgtcttggctttccttggccatttattctcctatatgaactttattttattttattttattttttgagatagagtctcactgtgtcacccaggctggaggacagtggcatgagctcagctcattgcaggcttgggttcaagttattctcgcctcggcctcccaagtagctgtaattacaggtgtttgccaccacggccagataatttttgtatttttagtagagacggggtttcaccatgttggctaggctggtcttgaactcttggctttaagtgatctgtcctcctcagactcccaaagtgctggtattacaggtgtgagccaccacacctggcctcctatatgaactttaaaa

SEQ ID NO: 720222 - DNA, 837 bp, Homo sapiens
tggagagataggggaacttcagagaatggctttatcctgggctttgacagccaggaagggcgcggaaggtagagagagctcgaggctgcttcttcagttcagcatgtggagttgctatatttattattattattattattattattattattattattattattattttattttttgagacagggtttcactctgttgcttgtgctggagtgcagtggcacaattttggctagcggcaatctcgacctcttgggctcaggtgatcctcccacctcagcctcccaagtagctgggactacaggtgcacaccaccatgcctggctcatttttgtatcttttgtagagatggggttttgccatgttgcccaggctggtctcaaactcctaagctcaagcaatcttcccacctcagcctcccaaagtgctgggattacaggcatgagccactgtgcccggcctccttgctcctcttttatagaactgtcttggctttccttggccatttattctcctatatgaactttattttattttattttattttttgagatagagtctcactgtgtcacccaggctggaggacagtggcaygagctcagctcattgcaggcttgggttcaagttattctcgcctcggcctcccaagtagctgtaattacaggtgtttgccaccacggccagataatttttgtatttttagtagagacggggtttcaccatgttggctaggctggtcttgaactcttggctttaagtgatctgtcctcctcagactcccaaagtgctggtattacaggtgtgagccaccacacctggcctcctatatgaactttaaaa

SEQ ID NO: 720223 - DNA, 837 bp, Homo sapiens
tggagagataggggaacttcagagaatggctttatcctgggctttgacagccaggaagggcgcggaaggtagagagagctcgaggctgcttcttcagttcagcatgtggagttgctatatttattattattattattattattattattattattattattattattttattttttgagacagggtttcactctgttgcttgtgctggagtgcagtggcacaattttggctagcggcaatctcgacctcttgggctcaggtgatcctcccacctcagcctcccaagtagctgggactacaggtgcacaccaccatgcctggctcatttttgtatcttttgtagagatggggttttgccatgttgcccaggctggtctcaaactcctaagctcaagcaatcttcccacctcagcctcccaaagtgctgggattacaggcatgagccactgtgcccggcctccttgctcctcttttatagaactgtcttggctttccttggccatttattctcctatatgaactttattttattttattttattttttgagatagagtctcactgtgtcacccaggctggaggacagtggcatgagctcagctcattgcaggcttgggttcaagttattctygcctcggcctcccaagtagctgtaattacaggtgtttgccaccacggccagataatttttgtatttttagtagagacggggtttcaccatgttggctaggctggtcttgaactcttggctttaagtgatctgtcctcctcagactcccaaagtgctggtattacaggtgtgagccaccacacctggcctcctatatgaactttaaaa

SEQ ID NO: 720224 - DNA, 837 bp, Homo sapiens
tggagagataggggaacttcagagaatggctttatcctgggctttgacagccaggaagggcgcggaaggtagagagagctcgaggctgcttcttcagttcagcatgtggagttgctatatttattattattattattattattattattattattattattattattttattttttgagacagggtttcactctgttgcttgtgctggagtgcagtggcacaattttggctagcggcaatctcgacctcttgggctcaggtgatcctcccacctcagcctcccaagtagctgggactacaggtgcacaccaccatgcctggctcatttttgtatcttttgtagagatggggttttgccatgttgcccaggctggtctcaaactcctaagctcaagcaatcttcccacctcagcctcccaaagtgctgggattacaggcatgagccactgtgcccggcctccttgctcctcttttatagaactgtcttggctttccttggccatttattctcctatatgaactttattttattttattttattttttgagatagagtctcactgtgtcacccaggctggaggacagtggcatgagctcagctcattgcaggcttgggttcaagttattctcgcctcggcctcccaagtagctgtaattacaggtgtttgccaccacggccagataatttttgtatttttagtagagacggggtttcaccatgttggctaggctggtcttgaactcttggctttaagtgatctgtcctcctcagmctcccaaagtgctggtattacaggtgtgagccaccacacctggcctcctatatgaactttaaaa

SEQ ID NO: 720225 - DNA, 649 bp, Homo sapiens
aaggagagaaaagggcagaaggcaaagtgcctcctctcccggctcctgccaataacctggcatcttcttttcagcctccatggagctgaatgagagttctcgctggacagaagaagaaatggaaacagccaagaaaggtgaggggtgtgtggcggctttaagccttgttggtttgcatccagggcgcctgaagctcacgtgctggggagggtgttgacacatttggccttgagccaggggctgtggtgaggcctctggtgaggttctggttctgggctgttctcaggtttgtcaccctggagcctcagttttaccttccagaaaatgggtctgtgcagctgcgctgtcaggcttgtctttgtgacttgagggcgcagctcagagagacacagcttgtgctgtgcatgtagtcagcgagtggcttctgggtgacctctgtggccagcacctctgggccttggggacagagcagtggcagcacacctgggtatctcgggacagtcagagcttgccggcggccatctcggtagagtcctggggtcagggagacctgcagggygttcatccagcccttagagccccaaaggtcctatcctgggctcaagtgtgctggggctttggaaacctgtctcaggtttgagcaccccaa

SEQ ID NO: 720226 - DNA, 1061 bp, Homo sapiens
  misc_feature 553, 554, 555, 556, 557, 558, 559, 560, 561, 562, 563, 564,565, 566, 567, 568, 569, 570, 571, 572, 573, 574, 575, 576,577, 578, 579, 580, 581, 582, 583, 584, 585, 586, 587, 588,589, 590, 591, 592, 593, 594, 595, 596, 597, 598, 599: n = A,T,C or G
  misc_feature 600, 601, 602, 603, 604, 605, 606, 607, 608, 609, 610, 611,612, 613, 614, 615, 616, 617, 618, 619, 620, 621, 622, 623,624, 625, 626, 627, 628, 629, 630, 631, 632, 633, 634, 635,636, 637, 638, 639, 640, 641, 642, 643, 644, 645, 646: n = A,T,C or G
  misc_feature 647, 648, 649, 650, 651, 652: n = A,T,C or G
ccccacctcccggaacctggcccctgagatcggccgtgagcggcttttgagcctggaggctgggttgaggccygagcatcctctcttgggctccgagccccatcaccaccaccctgaggtgaatcacggactgtggggcggtgcggggaacagctcaagcgctggcacagtggtttatagtccatgattcattgatggaagggccgcgttatcctagtgaattgcaaaaccagagcccaggaatgctggggcctgactgcagaccgttggggagcgaggatgtgaggctggctaggccaggtggcagggcccggcccctggtagccaatatggccttcccgcagcgatgggggttcatgtggccaagggggcctctctttctgcatacatgggacactgagacgggaacagcccgtcctgggctccagtcatccggcctgggtccaagaaggaagcccagggaggccgaggctccgcccccgactgctgccgtccactctccactgttccccatctctgtccctttgggtctgatactgcccaagcccctggnnnnnnnnnnnnnnnnnnnnnnnnnnnnnnnnnnnnnnnnnnnnnnnnnnnnnnnnnnnnnnnnnnnnnnnnnnnnnnnnnnnnnnnnnnnnnnnnnnnnagtggtgtagctggcactggggtacaaccagaattcagagcaggggtcaataaactgtggcccatgggccagatctagcccgggccctctgtttgtacaattcatgaactaaaaaaatgattttacatttttaaagggttgtttaaaaaaaaaataaaaatgataacgatacatgccagagattacttgtggtcgaaaatgcctaaaacgtttatgatttggccacgtacaggaaaagcgtgtggggccctggtttagagtggagggagggtgcgccccctcagtagggagacctctgaccacatctggggccctttctccatccaggtctccagagccaaacaagacgtcggtcttgggtggtggtgaggacggtattgaacctgtgtccccaccggagggcatgacg

SEQ ID NO: 720227 - DNA, 421 bp, Homo sapiens
catcccagctgggtgtgtggtggctcactcctataatcccaacaatttgggaggtcaaggtgggcagattgcttgaggccgggagatcgagaccagcttggacaacatggagaaaccgtgtctctacaacaaatataaaagttagctgggcctggtggtacacgcctgcagtcccagctacagcagaggctgagactgaagaatgacttgagcccaggaggcagaggctgcaataagctatgatcatgcccctgcactccagcctgggtgacagagcgagaccttgtctttaaaaaagagagagagakaaaaaaaagtaaaaacaaataaacaaaaatccccaacacatttcattaggacctcttgatacttccgtagttaattggttaattatacaaacattttaatgcaataggccctg

SEQ ID NO: 720228 - DNA, 399 bp, Homo sapiens
tgaacttgtcacatggcttttgtacatattgtctacaaatgtatatttgtacatatgcacacatatactgtccatatgtataaaatgttaaatacatagttccacctcctctcattcctctctgtgagtgccgtggactgcagttgcttctaatttgctatcttggcctctcctcaactaaaatattttttaacttccaatgrgtttatcaagacataaccccattgtaagacaagaatatctgtactgtactcaagaatttactgtttatatcttccttatgttcatacaaaaagatataaaacccaaaactgattactgatttttagcacatgatccataatgctatcttataaaaaggagtaaaaatgtaattaatttgaactaaatttgttcaat

SEQ ID NO: 720229 - DNA, 399 bp, Homo sapiens
tgaacttgtcacatggcttttgtacatattgtctacaaatgtatatttgtacatatgcacacatatactgtccatatgtataaaatgttaaatacatagttccacctcctctcattcctctctgtgagtgccgtggactgcagttgcttctaatttgctatcttggcctctcctcaactaaaatattttttaacttccaatgggtttatcaagacataaccccattgtaagacaagaatatctgtactgtactcargaatttactgtttatatcttccttatgttcatacaaaaagatataaaacccaaaactgattactgatttttagcacatgatccataatgctatcttataaaaaggagtaaaaatgtaattaatttgaactaaatttgttcaat

SEQ ID NO: 720230 - DNA, 2050 bp, Homo sapiens
aaaaaaaaaaaggaatggtatatttttatggatgaggtacaatgctcaggatcctgtgagatgctgtccacatcatacaagggtggaaaaataactccatttatggtagcacatgactcagcatatgaagtttactgagttaggcaaggttttatagtaatggctgacagtattggttattttctccattcacataataagtggagatgctgccttcccatcccacaaagatctgacttccacctaagaagaactaaagatctctggaggccaagagcggtgactcatgcctgtaatcccagcacttttgaaggccgaggtaagtggatcacctgcggtcaggagtttgagaccagcctggccaacagggcaaaaccccgtctctactaaaaatacaaaaattagccaggtatggtggctcacacatgtagtcccaagtatttgggaggctgaggcaggagaatcgcttgaaccccagaggcagaggttgcagtgagctgagatctcgccattgcattccagcctgggtgacagagagaaactccatctcaaataaataaataaagtaataaatatctctggagcaccaacatgtggaaaatgtccaaatgcaaaaagtataaacttatttcactctttcattgaggtttgctttgacccaactatgtttacttgttttaaatatcaataactaagcaatctgtaaattgcattttaagatacactcctatttctattcatctgatgtgtaaaatgatgctatttgtgactaaatgataaaccctgaaacgtaattttaaaattaaattaatattaaggggatgttagtgttatggtcactgcagaatcaccttggaaaggagattctgcaaatgaaattctcagatgaatgatttgaactagaaactctataaaaatgccactctttcttgcaattctaaactaaatgacttttccagaagattggtcagwacccatgatgaaaagagaaagctaggaaatatttaagtaaagaggaaattttctgtatttcaaaatatatggaggctgtaatgtcagtaaaggaaaataaccatgaaaatttgattctgggtagcacaactgtgaagaattttattggaattttccgaggtcctggagttaaaggattttttcatttactatatgaagactgtgtaatcatatagattacaagtatgaatcttgcagatatggacataggcaagagatatcagaactttagcatctggtagaaagccttcaaagaagaccaaggcaggaggagttgtggctcttatactgctgaatgaatttgggaaaataagaaaacctttttgcactccatttcttctatccaccataagaatgtaatgaagtcatccccaggaatggtaatgtgcagtataattcattatcaacattattaaatcatagctttacctgaattcaataaatttcaaagacgattataaagctttctcggtgaatatgaccagccacgaggtgagaaaagacatttgggtgtgtttctcaaatgttcataacaacattttctctatagtagccaatttcatttatggggtggtgtagcaaggacctctcaaccaaagattgcctcatcaaaacttgagatactttacaatagccaacactctcagaatgagacccattatttgtggagaacagatgcccttcatcactctagcaactgggttaatatcatcagctccaactctttccagccaatgtaaatccatcatcaagctttggcgaccagaaaagaaacaagcagaaaaaccatttgccaggatgatttaaggcctggcatttagaagttcctcattcaattgctctcttgatgtggctcttggcccttcctcttcttgaagaaagccctcatatattcactcacaaatggcctacatgtggggatgcacaaaaacaaagcagagagatgttcttttcaagactggaattgcttaagggtgatgaaccattgcttaaggaacatccagcatggtccttaaaaggatgacactgagcaggcaaa

SEQ ID NO: 720231 - DNA, 2050 bp, Homo sapiens
aaaaaaaaaaaggaatggtatatttttatggatgaggtacaatgctcaggatcctgtgagatgctgtccacatcatacaagggtggaaaaataactccatttatggtagcacatgactcagcatatgaagtttactgagttaggcaaggttttatagtaatggctgacagtattggttattttctccattcacataataagtggagatgctgccttcccatcccacaaagatctgacttccacctaagaagaactaaagatctctggaggccaagagcggtgactcatgcctgtaatcccagcacttttgaaggccgaggtaagtggatcacctgcggtcaggagtttgagaccagcctggccaacagggcaaaaccccgtctctactaaaaatacaaaaattagccaggtatggtggctcacacatgtagtcccaagtatttgggaggctgaggcaggagaatcgcttgaaccccagaggcagaggttgcagtgagctgagatctcgccattgcattccagcctgggtgacagagagaaactccatctcaaataaataaataaagtaataaatatctctggagcaccaacatgtggaaaatgtccaaatgcaaaaagtataaacttatttcactctttcattgaggtttgctttgacccaactatgtttacttgttttaaatatcaataactaagcaatctgtaaattgcattttaagatacactcctatttctattcatctgatgtgtaaaatgatgctatttgtgactaaatgataaaccctgaaacgtaattttaaaattaaattaatattaaggggatgttagtgttatggtcactgcagaatcaccttggaaaggagattctgcaaatgaaattctcagatgaatgatttgaactagaaactctataaaaatgccactctttcttgcaattctaaactaaatgacttttccagaagattggtcagaacccatgatgaaaagagaaagctaggaaatatttaagtaaagaggaaattttctgtattwcaaaatatatggaggctgtaatgtcagtaaaggaaaataaccatgaaaatttgattctgggtagcacaactgtgaagaattttattggaattttccgaggtcctggagttaaaggattttttcatttactatatgaagactgtgtaatcatatagattacaagtatgaatcttgcagatatggacataggcaagagatatcagaactttagcatctggtagaaagccttcaaagaagaccaaggcaggaggagttgtggctcttatactgctgaatgaatttgggaaaataagaaaacctttttgcactccatttcttctatccaccataagaatgtaatgaagtcatccccaggaatggtaatgtgcagtataattcattatcaacattattaaatcatagctttacctgaattcaataaatttcaaagacgattataaagctttctcggtgaatatgaccagccacgaggtgagaaaagacatttgggtgtgtttctcaaatgttcataacaacattttctctatagtagccaatttcatttatggggtggtgtagcaaggacctctcaaccaaagattgcctcatcaaaacttgagatactttacaatagccaacactctcagaatgagacccattatttgtggagaacagatgcccttcatcactctagcaactgggttaatatcatcagctccaactctttccagccaatgtaaatccatcatcaagctttggcgaccagaaaagaaacaagcagaaaaaccatttgccaggatgatttaaggcctggcatttagaagttcctcattcaattgctctcttgatgtggctcttggcccttcctcttcttgaagaaagccctcatatattcactcacaaatggcctacatgtggggatgcacaaaaacaaagcagagagatgttcttttcaagactggaattgcttaagggtgatgaaccattgcttaaggaacatccagcatggtccttaaaaggatgacactgagcaggcaaa

SEQ ID NO: 720232 - DNA, 464 bp, Homo sapiens
aacctccatctcccaggttcaagcaattctcctgcctcagcctctcaagtagctgggactacaggtacgtgccaccacgcccggctaattttttttctttatatttttagtagagtcagggtttcaccgtgttagccaggattgactgatttttaaaaattaattaccaagaaatagcttgcaatttggtgttaaattttaaaaatacccaaaccaaagggaaggaaatctagctagagagacagacagacacacacacacacagacacacatccaaatacacagaagcttaatttttaaaaagtaacattttgaaaaaaaatagatcagatatgttgtcaaatttttgcttaaggccaycagcaaaagtgaaaaatatctagtggattaaacaaccacaaaaattagctcatgataaacactagtatgttaaaatatttattttaattatattttatttatga

SEQ ID NO: 720233 - DNA, 589 bp, Homo sapiens
tttgagattacactggagccatcccctgagggcaaaaatctgtcaaaaccgtctccttctccatcccctcctaccccggctcctgaaatcttctttctttcatgaagccttcctggactgaacatgccacagagatcatactccctggccttgacgcagtttgagcatgaaactcataagaggttggccccactgtttggctcatacatttttttctcctactcccaacaatagagtgaaccctgttgcttaaatcctgtttatttctatcttagtttaaatcttcaatctcaaagtcatatgctttaggttgcaaaagatcatgcctacagcattctgtttaagcagagccttagtcacatcaacacaaagatgggaacaataaacactgagaatcccaaaaaagaggaggaagggaacagggcaagagttgaaaaactacctatggcctatgttcactccttggggatgggaacattagaagcacaaacctcagcatcacacaatataccaatgtarcaagccagcacccacacccccgaatctaaagttcttaaaataggccgggtacagtggctcacacctgtaa

SEQ ID NO: 720234 - DNA, 2043 bp, Homo sapiens
  misc_feature 455, 456, 457, 458, 459, 460, 461, 462, 463, 464, 465, 466,467, 468, 469, 470, 471, 472, 473, 474, 475, 476, 477, 478,479, 480, 481, 482, 483, 484, 485, 486, 487, 488, 489, 490,491, 492, 493, 494, 495, 496, 497, 498, 499, 500, 501: n = A,T,C or G
  misc_feature 502, 503, 504, 505, 506, 507, 508, 509, 510, 511, 512, 513,514, 515, 516, 517, 518, 519, 520, 521, 522, 523, 524, 525,526, 527, 528, 529, 530, 531, 532, 533, 534, 535, 536, 537,538, 539, 540, 541, 542, 543, 544, 545, 546, 547, 548: n = A,T,C or G
  misc_feature 549, 550, 551, 552, 553, 554: n = A,T,C or G
gcactccagccaggaaaacagaaagagaccctggctcaaaaaaaaaaaaaaattatgattaaagacagatgttctgcattgtataaggtgaggttatcttatgtctctctytgctactccagcttattctgtagtatctgtattttgttttgcatattgaccttgtgttaagggttctttagaagaaaaggtttaggctgcgtgtggtgtctcatgtctacaaccgctaaggtgggaggattgcttgaggccaggagtttgagaccagcttggggaacatagtgagactccacctctacaaaaaaaatttttttaattagctgggcatggtggtgcatgcctgtagcccttcctacttggaaggctgaggtaggaggatcgcttgaacccaggagtttgaggctgcagtgagctatgataatgccagtgcactccagcctgggcaacgtagcaannnnnnnnnnnnnnnnnnnnnnnnnnnnnnnnnnnnnnnnnnnnnnnnnnnnnnnnnnnnnnnnnnnnnnnnnnnnnnnnnnnnnnnnnnnnnnnnnnnntccaggcttgatgacagaacaagatccagtctctaagaaaaaaattaaaatctctgtgaacttgaactgaaaatatataacacgagaagttttttttctttttattttctttttttttttttttttttttagaaacaaagtcttgctctgtcacccgggctggagtgcagtggcacgatcttggctcactgcagcctctacctcccaagttcaagcagttctcctgcctcaacgtactgagtagctgggattacaggcacacgccaccatacctggctaattgtttttactttttagtaaaaacagggtttcaccatgttggccaggcttgtctccaactcctgaccttaggtgatccacccacctcagcctcccaaagtgctgggattacaggcatgagccaccatgcccagcaatgtgagagtacacttatcttgctttgcccaaagatgtgtcagcaacataaccttcagactaaaaccaaaaatttcaatttagagtatttatcccaggacctaaaagacactaaggcctaccacacacatcaatcattttaaacaattttataggaggactatgtgaatttatgttattgagcctcttgtggcttggtaccaggagtctccttttgtaagaaatcaaataaatgaccctgaccttcttcaagaattgaaaagtggttcagagaagtactttgttttatccgggtagcaggttaagtatcaaagtatcatcccttagagaaactgatttaacacattaaattatgaagcaatctagagtgtccccagggctgctgcttattattgacaacataagtaggtggtctagaagtaaatgaatatatgggaagagcacagcagctacacgtttcccaactccatgggggcatcattcacataaaagacatgtgagcagtgacctctagaattgtacattaccctcagtccctgagggtttgagattttttgagactgtatactcttcagcctgtcacactcataaactgcctccttgttcatggatggaaaaggttgtcccttaaacactgtgatttgaggaagaaagaaggatccatcttcttgataatccccctccccacaagttaaaaggctgaaacttcacctcaaatttgttccctcagactgtagtttttctaacttcaagtatctttttatgacttttattgtttacacttaaatattatccacttattgtagaatagtgctgcaatgaacatacatgtgcatgttctttatcacagaacagtttatattcctttgggtatgtacccagtaatgaattgctgagtcaaataattgttctgtttttaactctttgaggaattgctgcactgctttccacctggttgaattaatttgcaatctcaccaacaatgtatcagcattccctttctcttcaacctagccagcatctgttatttttttgactttttactaatagccagtcttaactggtgtaagatggt

SEQ ID NO: 720235 - DNA, 898 bp, Homo sapiens
tccttggcctcccagactcaagcaaccttcccacctcagcctctcaagtagcggggactacaggcaggcgctaccacacccagctaatttttataatttttgtagagacgggtcttagcatgttgctgagactggtctcaaactcctgggcttaaatgacctgcccgtcttgacctcccaaagtgctgggattataggcattagccaccacacctggcctgcagcttttcaacagtccctcagyatgcgactatattttttgaagtgtaacaacttgactttgcaccatcaagtttaaattatgatcaaatacgtctgaccatgaagaaggtgtcctataaggtaggattactgcctttacaaatttttatttcttcctttccaatagttatgccttttatttccttttcttgccttattgcattggctagaatttccagtactacattgaatagcagtggtgagagtgaacatttttcagtcattcctaattcttagggggaaagcactcagtctgtcaccagtaaacatgatattagctgtagatgtactttttatagatgtactttatcaagttgtggaagttttcctttgttcccggttttcttaggggttttataatgaattaatgtctcacttcttcagattctgcatttgtctatttgccatctattcacaggccaatgatgatctggtacctggggggccttacagacctgggaaaagattgccccttcctgggcagtcttagtgaggggttccactgagaacatgtctttcatatacataccaatgaatcccaagtataaagccacaatcagctccttttctcactctcacacactaagccagtatttccctgttttaaatcatctcagagctgggaccagacaactag

SEQ ID NO: 720236 - DNA, 819 bp, Homo sapiens
ttgcctgcttctagaccctatttcttgcctcagttttgttaaatcctagatatcagaaaatgattatgtgtagtgcaagaaagtcctcttggtggtctgtacactggccttttataataagacccaaccttagagttgcatttggagtattataatccatatgtagaagtcactcatcaatccagtcaactaatttggcagtgtggtggggggagggaagttacttaatctgtctgtgttttactttgtctaatataatatgggaataatagtatctgactcataaacatgtttagactaaatgagctactccatgtaaagaatgcagaacagtgcctaacacctagtgtttaaytcgttgtgttagtcattattgttactatcaatgagtttggcacttgaacatacgtagtttgccaagacagctaatatagaaaaatctacatctaggtgaacaaagagctagaaaagaaacagagtggttagagacaagcccaggcagatctccagacatcagagcactctaaaacaatacaaaaaaaaaatagccggacatggtggcacacacctgtagtcccagctgcttgggaggctgaggcgggagaattgcttgaacccaggaagtggaggttgcagtgagacaggaatgtgccattgcactccagcctggtcaatagagtgagactccacctaaaaaaaaaattagaagttccagtgtcttcagatgagaagaaaccagtgcaagaattctggcactgtgaaaaatctgaatgtagtgataccaccaaaggatcacaccagctctccagcaatggttcc

SEQ ID NO: 720237 - DNA, 981 bp, Homo sapiens
ggcctctcagtcctatttattccctacctatgaccacagatttgttaagatttgacttgttgcctaacatcttcttccctgagaatcaaattctcttccagtagatgcctcattctctcatgcaattaagcctcaggggaccaccctgtcaatttcccagacactatcatacctgtcagtattccaaggctgtacttggctggggcttaacctgaaaactccactagagatataaaagaatgactggaataaataaagaacaataccgtattcctgagtgagaaactacatgtaattacaagatcaatttttttctaaattaaataatagccttagccaatctgtcaagcttcaccaacttgggaggcacaaaataaagtcacagaacttttaatatttagattaatatgactttgatctctattctgttcatcatgaaaattcatggttgagatgaaacatttattactacatgtgctttgtttatcttcccaagaaagatatggcctatsgttataattaagccacaataatggaggggaaatgttctctttatttataaatttcttataagctttggttcttaagcttgtttatgattacatagagaaaaatcatatcatactattataattatccactgtgacattaccagccactatagagctctgtcattatcaataaagctaaagtatttaattgaattatttcattaagctgctgcatttagtttacatacatggttattgaacaaacacacttaatattttttaaatagatgacctttcttggaagagttccctgaagtttatttaacttctttccttcttgtttgatgtgatactttctagttgttcaggccaaagatagccatcaacaaatgaagattaaaaagccagctttcttagtaagaaagtgagtggatgatgttctgttcctggaaaggaccttcaacaatcatcctattcaaaagtcaaagaa

SEQ ID NO: 720238 - DNA, 619 bp, Homo sapiens
gtttttcaacaccaaaaaagttatttagcaacttgctcctctgctatagatgataaaaggtaatgtgcagaaggcctgaagttggagtggcctcatagacaactattcttactcagtagttactgctagaaacaagggctacatttctcatttgtttagatctcgtgtcagctgtcacttcctctgacagastttctctcacctcatctaagggagtgcctcctcttcacttgctgtaccccaaacacatactggtgccatagtgggagaaagcttggactctggagccagatggccaggattccaatcttgactctactactaattatctaagtgactatgggcctggctcttcatttgtaaaataataagttccagtgatacttaagaatagtgcctggtaccagcaagagcaatgtcagtgatggctgtgattattatcaccattgttattattatccctagaaattattaacccttttttctctctgtgagtatttccagttatttgttgatgtagttactagctgacccctcaccctccatttccccattagaattcaaactcccaagggccggttccgcagggtctttgcacagcgcctgtagtacgctttca

SEQ ID NO: 720239 - DNA, 1362 bp, Homo sapiens
cacactctcgggactgttgtggggtggggggaggggggagggatagcatcgggagatatacctaatgctagatgacgagttagtgggtgcagtgcaccagcatggcacatgtatacatatgtaactaacctgcacaatgtgcacatgtaccctaaaacttaaagtataataaaaaataaaaaaaatttaaaaaaaaataagaattttagatgggtctataatatttatagtcatggtaacaataacattatgctttgggttttttaaactatgcattaaattacttatgcctaaaatggtttttggcctgtttctttgttttgttttggatgagtcttacatttctttctatttttgctatctatacagcagtggcggaataaaaatcatattcaccaacttggagttatrtaagacagagttttgactctagtccaaacctacgtgattttggttaagttactaaaccttcctgtacttgattttcctcatcaattaattggaacaagtaatatacaccacataaagtcactgggtaaattgaataaaaatgtataaaatctacaagaatgagctcacctttagaatgtgttaactaagatttaattccttatcttccctatttattctaccagtacatgtttattgaatttctgctttgagtttggcattgcggaaaaagatgagggtacagtgatcaatgacataaacacaaaccacgtgtaatagagttctctatctagaagcaggggttgggggtgaggggcaacataaatactccatgtaagtgtataacacaaatgagtaaaggtctgtggagggaagctcattttgaatctagcccagagacatgagggaagaagtgacacttgggctgagtttgaaggctgagtaaaagtaactaggcaagcgggggaggttgtgtagaatgactattccagactaaggcatggtcctattgaaagactttgaagactaggttagcctgggccattcaaagaactgaaagaaggttggtatggctagagaacaaggagtgagatgaagctggaaaaattggtaaggcacagggcaattttagtctgtcctttttagtccatattgaggatttgactttctatattccaatgattacagccactgtaggattgtaagcaaaagataaaatggtcagatttgttttccaagtaacaattatggaacatatggtgtgaaggattaataggaaggaaacaagagtaaacacaatatcagtcaaaagatcatggcagtggttcagcacagagatggtaacttagaccagggaaaacataatagatatggagatttaggtggaaaaacagcaaataaatcatggttacc

SEQ ID NO: 720240 - DNA, 1089 bp, Homo sapiens
catcctgtaaaacatagactgtaaaaatggtataatattttaccttatatttttaatataatttgatatttaatatcaactattccttgaatttaagcatatttttaatcatagaccaacagagatatatctaccatcctttcttgctactaatgtttttgctagggatgttcagaaaaagccacaataaaaatcaaatttgtaagaagaatcatggaaaccccatatagtcaacattgcagagtggagatagaaagtaatttttttwaaaatttatacaatgttactaaaataaatgtggattttggaaagcaatagtcaagcagttctacagtatgatccaatttcaacaaaaccaaggaaattataagacagtgttggcataccattgtgctgagatactgttccacatggaattattcaatatgaacctacaggaaaatttaattttgatcttcctcacttttctggggggcatcagatgcccaaccactaattttatttgattttttttcttaaggaataaaagatcttccaatgttctaaaactagatttggtgatggttatgtaactgtaaatatagtagagttcattgtattgcacttttaaaagaggtgcattttataataaagttgtatctcagaagaattgggttcaggaggcactctctactgggcagtaggggtaagttgggatatttctttggaagctgcactctgtggcatcaggaaatatctgtgattctgtgaagtgaataattccagagcagcagttaaagacaacatggggttcaacttggccagcaatgaacaaatgattttgcctcacttttcgtcactgttttccccttaaaaagagggacaagaataaacatattaactgttaaaaaaaacttccatataaaactgtttttgccaagcctattcctaaacaaacaacaacaaaaacctatagcacattagaaaatctggtaaatacataaaactcattcagtgaaattaatgaaatgccaaatgtactttacctggttccaaaagaaagcaaacgaaacaaaattcacttgggggaaagaaaacaaaatcatagaa

SEQ ID NO: 720241 - DNA, 1089 bp, Homo sapiens
catcctgtaaaacatagactgtaaaaatggtataatattttaccttatatttttaatataatttgatatttaatatcaactattccttgaatttaagcatatttttaatcatagaccaacagagatatatctaccatcctttcttgctactaatgtttttgctagggatgttcagaaaaagccacaataaaaatcaaatttgtaagaagaatcatggaaaccccatatagtcaacattgcagagtggagatagaaagtaatttttttawaaatttatacaatgttactaaaataaatgtggattttggaaagcaatagtcaagcagttctacagtatgatccaatttcaacaaaaccaaggaaattataagacagtgttggcataccattgtgctgagatactgttccacatggaattattcaatatgaacctacaggaaaatttaattttgatcttcctcacttttctggggggcatcagatgcccaaccactaattttatttgattttttttcttaaggaataaaagatcttccaatgttctaaaactagatttggtgatggttatgtaactgtaaatatagtagagttcattgtattgcacttttaaaagaggtgcattttataataaagttgtatctcagaagaattgggttcaggaggcactctctactgggcagtaggggtaagttgggatatttctttggaagctgcactctgtggcatcaggaaatatctgtgattctgtgaagtgaataattccagagcagcagttaaagacaacatggggttcaacttggccagcaatgaacaaatgattttgcctcacttttcgtcactgttttccccttaaaaagagggacaagaataaacatattaactgttaaaaaaaacttccatataaaactgtttttgccaagcctattcctaaacaaacaacaacaaaaacctatagcacattagaaaatctggtaaatacataaaactcattcagtgaaattaatgaaatgccaaatgtactttacctggttccaaaagaaagcaaacgaaacaaaattcacttgggggaaagaaaacaaaatcatagaa

SEQ ID NO: 720242 - DNA, 2948 bp, Homo sapiens
tgttatacataattctttatatatatactttatgattaagaattaaaaatttattgtaaatataattcttttaatctttctttatctttttacctctctatgtatctgttattaagccataccttcaaagtaaccatctcttctgggctgtaccatctttggtgattttggaagagacactttattttcattgtttttgaataaggctagacgcacagtggaatctaaacaaaacgaataagaaaggagcagagttcatctttggttaattccttctctaaatgtccacatatttcttatatggtggtagtaaaaaaaaaatccactttataaagctctatgaaattgatgatgttatattaagcttcataacatggaaaggtagccaaccatgtacgtattattggttatctgattaaacaaatagccaatacttaaagaacagaaatactctacttttccatctaaactgtggggagatgggatacaaaagatggaagcaagacaactaatggaataagaaacaggtaggaaaaggttatttcattaatttaacacctaaaatagtggtttttctttgccctaatgtattttcagataacaaagatgtataaattttctccatatattcaaagacaagaatattcaagatctattaatattacaaaaaatagattgtgaatgcagactatacatatcaaattaagaaacaagatttttaatgttgtaaataccaaattacatattttaattaaatgctaaagtagcaaaaataaatagtatttgcatagctattctccagcatgagcaacatgacaatttccattagtcttctagtaataattcatctttactaagtatgatttacatttttcacaatgattgtatttctcaagattagggaaaatgttggacaatgtttaggtacatttcataagtattaatatatgtaatctcaggtgttattaaatgtttcttatgaattcaatatgaactatcagtaagaataataaaatctgtgtatatatatttcataaaataagtattatatatcatctaagtcatttacaaaaaaaaatgacatgtcaaagaacaattagtcaatgaggaaagacattaccatgggcttgcaaactgttcggtgtcttataaccatctctctactctcttgctcttcttgcctttttatttgatctatgtattttctgacaacatcacaaacaattcagcagacctgggttagatcctagtgccaaattttactagttgtatgactccggaaaaactgttctcaccttctgtctcttcctctgtccaacagaagtaatattgtttttgaagtactagtagtactgtacaaattaatgagatcatttgtgtaaaaaaaatcagtcccatgcacacatttgtgtaggttctcaaccacagacataattatgacatcaacaatgaaacatttccagtttatattcttagaaaaaaaacttacattcttcataaaatttactgcaatatataaaaatacatagaaccataattggctccatttcatttaacacagtgcactgaacagaagctatggatattttataagttctttggcatttctttggccaaataataaaacaatcatactttcctcatactattatcaaggtcaaataatttaatatgtacamaatatttagaaaggttatctagctaaagttactcaaaataattttattctccaagagcaatagtgctacattatcagtcattctgattgcatcagcataaattgatttaatcttgaattaattcaaattgcaaagggataattataagaagtaagaaacatagtacttttagatagaaaaaaaatcacttgattttgatagtccctgaaaataccactggtaataatgcagtattcttacctcaataaaaaaatgaataaataaataaaaacacaacccagttaaaaaaaaaagccaagggataaggtaattgtaaacagtatagtttgttacacgtttttattcattataaagtcagttttgtacacttaagtctactcctctgtggtaatcaacagcaggtgtaagttgccttataaacataaatctttttatctcccagcaatgacttgcccagtgttggggaaataggtattaaatagatgttcaaaaatgtttcaagaaacccctaggtaagtaaccatgtccctattatgcatgcatctctatacttaacagtttattatttcatttaaataatataattttagttaagcattagagtatccatattattaaattccttgtacaatcccttttcaacttctataattctaatttatctcattgttttattttagtatttttcttcttacatacaaatctggttattattacccattttttgcaggtgtaaaataaggtgtatagcagtgctgtaaaataagcttgaataactagcaatatttcataatcttaaaaggagtactatttactaatttaaattttcccaaatataagcatatatttacatgactaaaatgcacacacatactgtaaaatgtatattagtgacttttatctagttttttttttttagtcaattgacattcattggatatctaccaggtgctaggcatggtggtagtaggtctgagatgtcaagagtgtttcagccctcaaggattttactattcagatgaattttattattaattttttgtggttgagagcataacacagtaacatctgatcaaaattcttgtaaaatctttctgaaaattgatgtggtaaacaaaataaatcttgaataaacttcattttggtagagttttgtctatactattccctgctggtccctcccccttaacattctttagttacatttattatcattctgcaatctgatggctttgctatagcccatgagttgtttacttgacataaaaa

SEQ ID NO: 720243 - DNA, 1605 bp, Homo sapiens
tgttaatgtctgagctgatgaattttctcattgttctgatttggtcaaaccacatggcagagatgtattgaaatatcacactgtatcccataaatataaacaatcattatctgccaacctaaaaaatcctttaattaaaaaggattgtattgccatacattacaagtgattcaacacagagcctgaaaaaaataccatttttatttgaaatagtgaaattcctaacaacatagttacactcatttgcaccaagctgtgtatttgatcatggtaagcatagacagacttatgcatagaataatatattttaattatagacttctacttaatactataaatgccaatacatttaaaacaactaagcaaaaggaataaagttgatgaaatgtgtgtggtgtgtgatgtgagcaatttttctttaaccacgctgtccatgttggatgtgtggtgtgtgtctgtatctgtgtttactctgcttggggttctctgtgattctgggatctgtagttcagtgtctttcacaaaattgggaacattcttaaccattattttttcaaatactttctctgtatctataatttctacttttcagaattaaagtatacatttactacacttttgatattgtttagtttcttcactcttttcctttgcaatttacttgttaaatttctagtgacattttaagtgcatggtttcatttaaaagctgagccagctctaatgagcagtgtgcccaaagattgctcaatgtttatactgcattgcttttgatttctcatgcatttccatttgattacttcttagtattttcatctctcagtcccctatctagtcctgcattatgtccacagtttcttcaagagatttttacatatgaattatagttacattatatatcttatttaattagttataatacctgtatcttttataaatccctttctgattatttctttattgtgactttggtatttctcattaatatatgtaataatcrttgttgataaccagacatgttgggtttgacagttgatactggcttatttcattttatccattttctgcctgtatttgaccacactttatctttgccaggcaattattgtggaaatgtccgtgaatcttctcacagctacatttgacatttacttttgcagtggacatcagagttgaagtctgttctgtgtccaccagagacttcagatgctccagtgataccttgtttttctttcctgcttggctttgtctcatcacctgttccctcctccagagaatctctttcagctccttcaggtgggttaaaatgttatatttaactgacaatagtgaaattggttgaaggcaatagaataaagggagattttgcgacttttcctgggtccatattgtgatcctgagtctgggtgtgagctttccagtgtttctgaacttcctccagatgagatgttggtctgcgtgttcttgctcttttcctgggtagagtcctcttgttttccccagttgttccctcccacagctccagtgttctcttttggtgttatcaccttccagatttgatgacctgaggttcaaattaaggctctgattaaataagaaggcagca

SEQ ID NO: 720244 - DNA, 2060 bp, Homo sapiens
  misc_feature 1284, 1285, 1286, 1287, 1288, 1289, 1290, 1291, 1292, 1293,1294, 1295, 1296, 1297, 1298, 1299, 1300, 1301, 1302, 1303,1304, 1305, 1306, 1307, 1308, 1309, 1310, 1311, 1312, 1313,1314, 1315, 1316, 1317, 1318, 1319, 1320, 1321, 1322: n = A,T,C or G
  misc_feature 1323, 1324, 1325, 1326, 1327, 1328, 1329, 1330, 1331, 1332,1333, 1334, 1335, 1336, 1337, 1338, 1339, 1340, 1341, 1342,1343, 1344, 1345, 1346, 1347, 1348, 1349, 1350, 1351, 1352,1353, 1354, 1355, 1356, 1357, 1358, 1359, 1360, 1361: n = A,T,C or G
  misc_feature 1362, 1363, 1364, 1365, 1366, 1367, 1368, 1369, 1370, 1371,1372, 1373, 1374, 1375, 1376, 1377, 1378, 1379, 1380, 1381,1382, 1383: n = A,T,C or G
tgttcacatttggcaggcatagatactgtttgaaaagagaaaagtcagtacatagaggtaacaaacttaaatatgtgccaagtctagaaacaagagactagggggataaggacctttcgaaataaaatgcaagatttgaaaactgattggctgggggatgaggcaaaggcaggtctttaaggtcaatccctgttttgctttaagttgttagcgggtggttttatcatatattgtagaatatgtcatttcagttttgaacatcttgagttaaattgtcctaacatatcttacgaatttgattttcttccctgggaagctaatatttcaaaaacttaaagagtatagatttccaactggtatccaatttataaaactatctctaggctgctgatttcaggaggaggctcatgaatattctctttgcagagaatatatcaggagttaacatcagcttcaatatttgtggacgaccagttaactaagccacctcttagtgtatttagatgggaaatcttagctgaagatattcaataatgaaccaacagtgactaaaaaattcaatattgaagtatatttccttgtaattaatttgaattgaagtagccatatacagctagtatttactacattgaacaatgcaaatacgaggaaaaaattaataaccatctctaataccacatgccaaaatcctcatcaatttgttctagctaaaggagtttatcagaagcagcagttgaaagcaccaactaaaccagctggggttagttcactgtcattctctcagaaccatctcttctctgaacaaaacaagtacaagagttcatcgtgaatctgcattctccttgcctattttaaggttttgatgttgacactaatttgtgraatccctcctgtggtgtgatatttcattttccttgctttctgttaggacaagaatgcttcagctcttaatttaaaattatgtttctccctcctaggttgagtgaacttagaatgcattctctgacatatccaagtttttgttcatatgaatttggggaaaaaagcatacttaattagctaagacttcttattctaggcttgaccctgtgttcaacatctattgaatttgtagttgcatgggctgctctctgacactgcttagtgacctggaagctatattaacgttaggggaggtggtgtatgagcattagaggtatcattgcaaggaaagacttgtcttatctcaatttgtctttttttttgcacacaagaaagtcagtgtttgagtcttctaaaatcttnnnnnnnnnnnnnnnnnnnnnnnnnnnnnnnnnnnnnnnnnnnnnnnnnnnnnnnnnnnnnnnnnnnnnnnnnnnnnnnnnnnnnnnnnnnnnnnnnnnngtgtgataaaatgatctgacgactgaaatttcctttacaataactcagatttagggaaaacaagagtgtagagtggggttggggggtgtgagtggagtgggaaagaatggatgaaatgtgactggcgccagctgaaatactgttgcagcaatgtgatgactacatgaggatatagtgtatgattctctggacttttgtatatgattaaaattttccataacaaaatgtttctaaaaggaaaaacagagtaacagtgtatatttcatataggtgttatgggtattaaatgagatatgtaaaagtgcaatactgtctgggatacagaaggggttttgaaaagattattttcccttttattttctcttttaaaatacacctcccccacaacacacagaaaagacacacacacacacacacacacacacacacacacacacacaccaggagtcatccaaaaacagtctttgtgatgttctgcaagggttgaattgtcctagtaagggtttgtgaaagacttggatcttttttacattgaaatcaaaggctggtgtttttagacacacttcagagtcctggagccttgggtactggaccttcctactttgggaaaataatcaactcctgagctctgtaaacaataaccagtatagaatagaaagcaggattctctgaagaga

SEQ ID NO: 720245 - DNA, 2060 bp, Homo sapiens
  misc_feature 1284, 1285, 1286, 1287, 1288, 1289, 1290, 1291, 1292, 1293,1294, 1295, 1296, 1297, 1298, 1299, 1300, 1301, 1302, 1303,1304, 1305, 1306, 1307, 1308, 1309, 1310, 1311, 1312, 1313,1314, 1315, 1316, 1317, 1318, 1319, 1320, 1321, 1322: n = A,T,C or G
  misc_feature 1323, 1324, 1325, 1326, 1327, 1328, 1329, 1330, 1331, 1332,1333, 1334, 1335, 1336, 1337, 1338, 1339, 1340, 1341, 1342,1343, 1344, 1345, 1346, 1347, 1348, 1349, 1350, 1351, 1352,1353, 1354, 1355, 1356, 1357, 1358, 1359, 1360, 1361: n = A,T,C or G
  misc_feature 1362, 1363, 1364, 1365, 1366, 1367, 1368, 1369, 1370, 1371,1372, 1373, 1374, 1375, 1376, 1377, 1378, 1379, 1380, 1381,1382, 1383: n = A,T,C or G
tgttcacatttggcaggcatagatactgtttgaaaagagaaaagtcagtacatagaggtaacaaacttaaatatgtgccaagtctagaaacaagagactagggggataaggacctttcgaaataaaatgcaagatttgaaaactgattggctgggggatgaggcaaaggcaggtctttaaggtcaatccctgttttgctttaagttgttagcgggtggttttatcatatattgtagaatatgtcatttcagttttgaacatcttgagttaaattgtcctaacatatcttacgaatttgattttcttccctgggaagctaatatttcaaaaacttaaagagtatagatttccaactggtatccaatttataaaactatctctaggctgctgatttcaggaggaggctcatgaatattctctttgcagagaatatatcaggagttaacatcagcttcaatatttgtggacgaccagttaactaagccacctcttagtgtatttagatgggaaatcttagctgaagatattcaataatgaaccaacagtgactaaaaaattcaatattgaagtatatttccttgtaattaatttgaattgaagtagccatatacagctagtatttactacattgaacaatgcaaatacgaggaaaaaattaataaccatctctaataccacatgccaaaatcctcatcaatttgttctagctaaaggagtttatcagaagcagcagttgaaagcaccaactaaaccagctggggttagttcactgtcattctctcagaaccatctcttctctgaacaaaacaagtacaagagttcatcgtgaatctgcattctccttgcctattttaaggttttgatgttgacactaatttgtgaaatccctcctgtggtgtgatatttcrttttccttgctttctgttaggacaagaatgcttcagctcttaatttaaaattatgtttctccctcctaggttgagtgaacttagaatgcattctctgacatatccaagtttttgttcatatgaatttggggaaaaaagcatacttaattagctaagacttcttattctaggcttgaccctgtgttcaacatctattgaatttgtagttgcatgggctgctctctgacactgcttagtgacctggaagctatattaacgttaggggaggtggtgtatgagcattagaggtatcattgcaaggaaagacttgtcttatctcaatttgtctttttttttgcacacaagaaagtcagtgtttgagtcttctaaaatcttnnnnnnnnnnnnnnnnnnnnnnnnnnnnnnnnnnnnnnnnnnnnnnnnnnnnnnnnnnnnnnnnnnnnnnnnnnnnnnnnnnnnnnnnnnnnnnnnnnnngtgtgataaaatgatctgacgactgaaatttcctttacaataactcagatttagggaaaacaagagtgtagagtggggttggggggtgtgagtggagtgggaaagaatggatgaaatgtgactggcgccagctgaaatactgttgcagcaatgtgatgactacatgaggatatagtgtatgattctctggacttttgtatatgattaaaattttccataacaaaatgtttctaaaaggaaaaacagagtaacagtgtatatttcatataggtgttatgggtattaaatgagatatgtaaaagtgcaatactgtctgggatacagaaggggttttgaaaagattattttcccttttattttctcttttaaaatacacctcccccacaacacacagaaaagacacacacacacacacacacacacacacacacacacacacaccaggagtcatccaaaaacagtctttgtgatgttctgcaagggttgaattgtcctagtaagggtttgtgaaagacttggatcttttttacattgaaatcaaaggctggtgtttttagacacacttcagagtcctggagccttgggtactggaccttcctactttgggaaaataatcaactcctgagctctgtaaacaataaccagtatagaatagaaagcaggattctctgaagaga

SEQ ID NO: 720246 - DNA, 1520 bp, Homo sapiens
ctttaagtggaaacagcccaccttgtcttatcagaaatttttagaggtcacagactccacatgtattgactaagcaaagatatttacattcaggagaggctttgttttgagttgtgaaatgttgctttttatctacctaagagttgtgaggatgggcaaggctctttggagaatttatctaattaagcttgatactattctcacgaggaaggaagaagtcatggtactggcaggaggaagagcagggccaggtgaagtgagggaagcatcttgattactgaatgtttttttctgtgtaacatggctttactcccctcaccttaatcctgccccatcaggtcttgtctttatttaacatgttgatattgtatacatcatcgattttttgcattaatttttattaaaatattgcgttaaaattatttattttaattattacaatttttagcattcccttaaattttgcacctcattgacctcactctagtcctggcccaaagagattctgaagtcagctactaactagtgcacattaaacaagaaagtatcaaaaacagactttctaaagactgcttctctaattacaattttactaagcaccatgactaaaataatcatcttaatgtcctgccagtgatgtttcagaactagcaaactcaatcatcctaagacaaagtttgtagaacatctttcatacctttgcagttgaacatatttcagaggcaataaggaaggcacaaaccatagttcctgttctatctagaaaagaaaagaagttagttcaagaacatacgtggtataaaaatacactcagaaatattcaaggagtgcattttaacttgattttctttcttttttttgagacagggtcttgctgtgtcacgcaggctggagtgcagtggcacaatcttggctcattgcgacctccatctcacaggtgaaaaataggcaaattacatttacagtaaaaatatctctcaccatctctccacaaaaggacacgatgaggtttttactaaaatctataagaaagcaacaattcatgtmttttatgatttttttggataatagtaaaaaagaaaaattcccaactcatttagtacgttaatataactgattccaaaattgcacaaatgcagtagaagatatttttacaccagtctcacatataaatgtagatttaaaaatatacatatattttcaaagtgaattcagcaatgtagaaacaccatgtatcaacaccaagtgccatttctcttaaggatgcaaggatgttttttccaagatggcagattacaggcttttagcatgcctgcctcagtcatttggaaatagcaagcaagtacataaagaccaactctgtgagctttaattcaagaaagaaaatggcaattccccggaattttgaaggacatcccagatcctggggaggacaatgcaggcaagcagccctcaggacagcattcgactgataaaagtgagtgaagcctcagtatgtgagacaggcagacagcatccct

SEQ ID NO: 720247 - DNA, 1725 bp, Homo sapiens
  misc_feature 606, 607, 608, 609, 610, 611, 612, 613, 614, 615, 616, 617,618, 619, 620, 621, 622, 623, 624, 625, 626, 627, 628, 629,630, 631, 632, 633, 634, 635, 636, 637, 638, 639, 640, 641,642, 643, 644, 645, 646, 647, 648, 649, 650, 651, 652: n = A,T,C or G
  misc_feature 653, 654, 655, 656, 657, 658, 659, 660, 661, 662, 663, 664,665, 666, 667, 668, 669, 670, 671, 672, 673, 674, 675, 676,677, 678, 679, 680, 681, 682, 683, 684, 685, 686, 687, 688,689, 690, 691, 692, 693, 694, 695, 696, 697, 698, 699: n = A,T,C or G
  misc_feature 700, 701, 702, 703, 704, 705: n = A,T,C or G
caaacaaaaaatataataataaaaatatttcccttaacatatcttgtcctgttttattttataatattattatacagattatccctaatctctatcccattacctccttgtttyttccttgtatgtattataattgtggaatagcttgaatatttcaaaaatatacattgtgttttttgggatgtgaatgtgatcctcattttaaaacaaacagtgtatttactgtcactctgacacagtcatgtgtcacttaacaacagggatatgttctgagaaatgcactgttaggtgattttgtggttgtacacagaatgtgagtacagcctagggtgtactcacaaacctggatgatacagcctactacatacccaggctatatggtataatttatcattcctaggccacaaacctgtgcagcacattactgtgctgaatattgtaggtgactgtaatacaatggtaagtatttgtgtatctaaacatgtctaaatatagaaaaggtatactaaaaatatggtattgtaatcttatgtgactaccatcatataggtgatctgtcattgaataaaatgttgctctgtggtacatgactgtattctacttaannnnnnnnnnnnnnnnnnnnnnnnnnnnnnnnnnnnnnnnnnnnnnnnnnnnnnnnnnnnnnnnnnnnnnnnnnnnnnnnnnnnnnnnnnnnnnnnnnnntgggagtgcagtggtgcgatcttggctcactgcaacctctgcctcccaggctcaagtgatcctcccacctcagcctcctgagtagctgggaccacatgcatgagccaccgtgcccggccaattttttgtatttttggtagagacagggttttgccatgtttcccagctggtctcagactcctgagcgcaggcaagcaacctgcctcagcctcccaaaatgctgggattacaggcatgagccaccgcacccagcctatatatttataatttgtaattgatgtgttaattcattatttgggagttaacaaactcaggagccagaacactgttaacagggactctgctaagtgctgagaatacaaacatatatcaggcaagaacaaaggcttcaataattcgtaattatgatttatacttcctgctttgtacatttgtgcctttatgtacacagttttctccacctgaaatgaccttccatcttgacttcatctggctacttcatcattgtcatagaaaaccccccttatttgtctctgcaccctgaatgagtcaccttatcctctatctcttgtccatattttatgtttccataacacccctgtggtctttcctctcacagcgcttacctgtaatgtagactcacctgtctactaacttactaaactataagctctttcatggtagggattatgtcttgtttctctttttataatagatgctcagtttacaccatgtgtgtaaatgaatgaatgaataaatcttattgggatagatctaaaataaatggtaaaaaaacaaagtctatgtcttataattaagtaagggaagagttctgtgggcaatgagtgaagagatcatctgggtctgcctgacatgactaagtaggttctgtgggaggcaggcaaagaaacacttctcagataatgcagtgttccagtgaagacttcacagttgactcagctatagctcatcaggcagaatagattttctcatagatgttgtgagttatccacagataag

SEQ ID NO: 720248 - DNA, 1725 bp, Homo sapiens
  misc_feature 606, 607, 608, 609, 610, 611, 612, 613, 614, 615, 616, 617,618, 619, 620, 621, 622, 623, 624, 625, 626, 627, 628, 629,630, 631, 632, 633, 634, 635, 636, 637, 638, 639, 640, 641,642, 643, 644, 645, 646, 647, 648, 649, 650, 651, 652: n = A,T,C or G
  misc_feature 653, 654, 655, 656, 657, 658, 659, 660, 661, 662, 663, 664,665, 666, 667, 668, 669, 670, 671, 672, 673, 674, 675, 676,677, 678, 679, 680, 681, 682, 683, 684, 685, 686, 687, 688,689, 690, 691, 692, 693, 694, 695, 696, 697, 698, 699: n = A,T,C or G
  misc_feature 700, 701, 702, 703, 704, 705: n = A,T,C or G
caaacaaaaaatataataataaaaatatttcccttaacatatcttgtcctgttttattttataatattattatacagattatccctaatctctatcccattacctccttgtttcttccttgtatgtattataattgtggaatagcttgaatatttcaaaaatatacattgtgttttttgggatgtgartgtgatcctcattttaaaacaaacagtgtatttactgtcactctgacacagtcatgtgtcacttaacaacagggatatgttctgagaaatgcactgttaggtgattttgtggttgtacacagaatgtgagtacagcctagggtgtactcacaaacctggatgatacagcctactacatacccaggctatatggtataatttatcattcctaggccacaaacctgtgcagcacattactgtgctgaatattgtaggtgactgtaatacaatggtaagtatttgtgtatctaaacatgtctaaatatagaaaaggtatactaaaaatatggtattgtaatcttatgtgactaccatcatataggtgatctgtcattgaataaaatgttgctctgtggtacatgactgtattctacttaannnnnnnnnnnnnnnnnnnnnnnnnnnnnnnnnnnnnnnnnnnnnnnnnnnnnnnnnnnnnnnnnnnnnnnnnnnnnnnnnnnnnnnnnnnnnnnnnnnntgggagtgcagtggtgcgatcttggctcactgcaacctctgcctcccaggctcaagtgatcctcccacctcagcctcctgagtagctgggaccacatgcatgagccaccgtgcccggccaattttttgtatttttggtagagacagggttttgccatgtttcccagctggtctcagactcctgagcgcaggcaagcaacctgcctcagcctcccaaaatgctgggattacaggcatgagccaccgcacccagcctatatatttataatttgtaattgatgtgttaattcattatttgggagttaacaaactcaggagccagaacactgttaacagggactctgctaagtgctgagaatacaaacatatatcaggcaagaacaaaggcttcaataattcgtaattatgatttatacttcctgctttgtacatttgtgcctttatgtacacagttttctccacctgaaatgaccttccatcttgacttcatctggctacttcatcattgtcatagaaaaccccccttatttgtctctgcaccctgaatgagtcaccttatcctctatctcttgtccatattttatgtttccataacacccctgtggtctttcctctcacagcgcttacctgtaatgtagactcacctgtctactaacttactaaactataagctctttcatggtagggattatgtcttgtttctctttttataatagatgctcagtttacaccatgtgtgtaaatgaatgaatgaataaatcttattgggatagatctaaaataaatggtaaaaaaacaaagtctatgtcttataattaagtaagggaagagttctgtgggcaatgagtgaagagatcatctgggtctgcctgacatgactaagtaggttctgtgggaggcaggcaaagaaacacttctcagataatgcagtgttccagtgaagacttcacagttgactcagctatagctcatcaggcagaatagattttctcatagatgttgtgagttatccacagataag

SEQ ID NO: 720249 - DNA, 660 bp, Homo sapiens
ttaatgaactgtgccagaagatcataactaccctgaccaacagtttttaataagacaaacaataagccatgaagagagaagggccaaattacttatcgaagaaggatttacatgaaatgagggctgaattgtttaactggaagggccacatctacaggtctccttacatgagaccataatgaaaaccaacagatgtgagagcacaggatacagtcctgagcagcccttcagccacacctgcatatttagctacaacttctgaagacaagaagcactggtggacttaatggcttcttattaccaaagcraacaattaaatctggccctctgagaacaagggatcgtagaacatctttagggaaaatgttaagtgtactttttgtggcccatcagaggatcattacatagtggcactgaattaagccttgacttaaggtaacatgagtatgggagagaaaaaattgcatttaagaatgtttcatttaatgggaggctcggagaaaatgtagttgataatggatgtcatttgctcgcctccagccacacacacctttatcctttgttgccccccatctcaatgttaaaaaagaagtcccccaaaatgttttattaagggaattgttaagggtttctacaatttccacagccaccttattcagg

SEQ ID NO: 720250 - DNA, 660 bp, Homo sapiens
ttaatgaactgtgccagaagatcataactaccctgaccaacagtttttaataagacaaacaataagccatgaagagagaagggccaaattacttatcgaagaaggatttacatgaaatgagggctgaattgtttaactggaagggccacatctacaggtctccttacatgagaccataatgaaaaccaacagatgtgagagcacaggatacagtcctgagcagcccttcagccacacctgcatatttagctacaacttctgaagacaagaagcactggtggacttaatggcttcttattaccaaagcaaacaattaaatctggccctctgagaacaagggatcrtagaacatctttagggaaaatgttaagtgtactttttgtggcccatcagaggatcattacatagtggcactgaattaagccttgacttaaggtaacatgagtatgggagagaaaaaattgcatttaagaatgtttcatttaatgggaggctcggagaaaatgtagttgataatggatgtcatttgctcgcctccagccacacacacctttatcctttgttgccccccatctcaatgttaaaaaagaagtcccccaaaatgttttattaagggaattgttaagggtttctacaatttccacagccaccttattcagg

SEQ ID NO: 720251 - DNA, 588 bp, Homo sapiens
tttctgatggaacagtcattcttcctggctggtggaagcattaacttgggtcyttcatcccccttctcagggtcttgtcaaggctattacagggtcttaccaaggcatagtgagggaagggatacttctgatccttggtctaaggaaacatacaaaaactccacatcttccatttgttttctcaactcacatggactctcttgtcagtcttgatgactattttaaaaaatgaccattctgttctaatcattgctaataatgcccaagctatatgtggttgtgccatgagaacagctaaacaaaaagactgtttcttttcactctaaaaaaagcatgagtgcatagaacaacataatagccattttcactgccagaaactagggtggtgagattctgcatcttcaaaactcataatgatgggactgaatctttggatatttttttgatgagaacagtcaatacatcaccaagaagcagcttttctgtgatgagcctgcaatttctttataagcagggaaaaatagacttgaatgtcattatgcacaattttgaatgtaccacatgatcataataactttaaaacaaaaa

SEQ ID NO: 720252 - DNA, 610 bp, Homo sapiens
attttaaagaaaaatagtaacaaaaatcctgtaatctcaccaccctcaccctgccacatgacccctcacctgtccacagatgtgttttacagccgcaatcccaatgaacttatcagcttttcacttaccttcacatctyaaatgcttttgctcatcacccagtccttaaaaagattatttcctttatcttcatcaccttccagagggccaataaactttaatttatcaaaccactatttcaatgttgatagcatgatgatcattacaatactagttgtgtcatcctagtttatgcttttaaacattatttctccttgaggccccttttctattatggctttttgatatatgaacaacattagtttccttttttattctagtatgatttaaaaggtaaatacttggttttcatattactcattattaacttcagaacttgcataaatagcccatgtcctataaccatcaatttatatttgtctattgttgcataacctagaggtccttttatggcagataaggagttggacctttttggattttctttcttcctttgtgctttctcattaatcattagcttaatcagagagctaatctacctattttatgc

SEQ ID NO: 720253 - DNA, 610 bp, Homo sapiens
attttaaagaaaaatagtaacaaaaatcctgtaatctcaccaccctcaccctgccacatgacccctcacctgtccacagatgtgttttacagccgcaatcccaatgaacttatcagcttttcacttaccttcacatcttaaatgcttttgctcatcacccagtccttaaaaagattatttcctttatcttcatcaccttccagagggccaataaactttaatttatcaaaccactatttcaatgttgatagcatgatgatcattacaatactagttgtgtcatcctagtttatgcttttaaacattatttctccttgaggccccttttctattatggctttttgatatatgaacaacattagtttccttttttattctagtatgatttaaaaggtaaatacttggttttcatattactcattattaacttcagaacttgcataaatagcccatgtcctataaccatcaatttatatttgtctattgtwgcataacctagaggtccttttatggcagataaggagttggacctttttggattttctttcttcctttgtgctttctcattaatcattagcttaatcagagagctaatctacctattttatgc

SEQ ID NO: 720254 - DNA, 1137 bp, Homo sapiens
tcgagagattattttgagatatccacatgggcccaatataatgacaaaagtctttaaatgtagcagaggaagcagaagagtcagtgccagagtgatgcatgtgagaaagactccaccagccattgctggctttgaagctgtaagaagaggccaccagccaaggaatacaggtggcatctggaagctgcagaggcaagagaatggattctcccccaggacctctgcaaaggaacacagccctgctgacatcttgatattggtccaggagactcattttggacttctgagctccagagctgtaaaataataaatgtgttgttttgagctaccagatttgtggtaattcgttacagtgaaaataggaaatgaatacagggcccaagcattagttatttttaagaggtaccaggtaattctaataagcagccagattgagaacctctaattctgatgaatggctgctcattagaatcccctaagacatttttgatatcatatcttccatctatcaccagggatccaaattcactttcaaagtatcaacttatttaatccccataacaaccttataagatagaaatcattawgagaagcacaattttttaaagaaagttgtccaacattatccagctactaagtgataagctttaaacctgcacaggctgtctcctactaccacaatcatgttggcttaaatgcttgtgtagggtctgtttagttccatttgaaaatatcattacaattactggttattttctgagttcctttttcacaagaaaagcaggaaattagaaatgaaaggtgccagtagaaataaaaacattgatggtagtatgcttgtgattgggaaactgattctgagggataagaattgaaaatataaagtccttccacgttcaaaaatcatggaaatctgaggtcttcataggagttgtaaatattaccaaatgcagcaatatttagtgctattgggagtactattgtatttgagtagagttgaattaatcttaataattctgacttaccaagaaaaattcgtttttgttttgtatacttcactcatgagaggaggtatatatttataactcttaatagtaatttatataagtaaaaatgcttctgagagaaagaagcatc

SEQ ID NO: 720255 - DNA, 732 bp, Homo sapiens
tgaaataatgacaggatggagaagaatggaaatcaggataaagkccacagtttaagagactaaagttatattttagtcttttctatacgaattcaacttatctatgatttctctttatgatggaaatacaaaaacaataataaaggtatattctaagtcaatatctacatactatgtgtgaaaggctgtattaggtttctccaataaagttaccacatccagaaccaaagcaataatttatatcaacgtctgaacaattagttaatttttataactctttttgtttttgcattggccaaacagataagttaagtgtggatgtggtaagaatcaccatatttctcaatttactgcctattatcttggcaatttttccaaggtaggtagtatcatttttagtttgccatctagtgagggcatttatatagaacaattttgtattcttctcaccaaaataatactttaacacccttcccacctctgtaagtttttgtgagaagtgcaaagattctgacagaaactaagtatatttatttcccaatatattttctaggactgagtaaataaccccagtaagcctccatggttccattggatccctgtgagactgacttaggtcaactcttcaattgtcactcaactacattaattcatgtcttgtaacatttagggtcttttgggataagcacaaaaagtctatatcaattaactctaggaatatctgcaggggaa

SEQ ID NO: 720256 - DNA, 608 bp, Homo sapiens
taataataaaattttaaaaaaagtataaatatagcattttwaaaaaaatgggcacagtataatataactgatttaaccaatatgaaagaaaatcttaaaggaagttacaaaaaaaggaaaggttactttcaaaagagcaacaattacattaatagcttctcaataaagcaaggaggccagaagacaatagaattatcttttttagatagccaaagaaaaataattgcaaatgtagaattctatatccagtaaaattgttctcaagaatgaagtatcaaacagaaattgagagaatttatcactggtggcactgcaatagtggtttctttaaaaagaaggaaaatgatcccagatgaagatcagaatgcaggaaggaataaacaatgaaaaggttaaatatgtcattaagtctaagtgattgttcactgagtaagtatttagggcaagtttaaaatacatgaagaatcaaaacagatagcaaggatagtttctaagttagagtgggataaatgtaattgttgaagaggaaggtaaattaatattcaactctgacaaataaaagatacgtgtaaagcagggatgaggaaactaaattcagcccatggctt

SEQ ID NO: 720257 - DNA, 608 bp, Homo sapiens
taataataaaattttaaaaaaagtataaatatagcatttttaaaaaaatgggcacagtataatataactgatttaaccaatatgaaagaaaatcttaaaggaagttacaaaaaaaggaaaggttactttcaaaagagcaacarttacattaatagcttctcaataaagcaaggaggccagaagacaatagaattatcttttttagatagccaaagaaaaataattgcaaatgtagaattctatatccagtaaaattgttctcaagaatgaagtatcaaacagaaattgagagaatttatcactggtggcactgcaatagtggtttctttaaaaagaaggaaaatgatcccagatgaagatcagaatgcaggaaggaataaacaatgaaaaggttaaatatgtcattaagtctaagtgattgttcactgagtaagtatttagggcaagtttaaaatacatgaagaatcaaaacagatagcaaggatagtttctaagttagagtgggataaatgtaattgttgaagaggaaggtaaattaatattcaactctgacaaataaaagatacgtgtaaagcagggatgaggaaactaaattcagcccatggctt

SEQ ID NO: 720258 - DNA, 1644 bp, Homo sapiens
atagattctgtaagtcctatactgggcagaggtgcttacattcttttactgatatgaatatgccttcaaaaaattttttttaattttaaaaaaggaatataccatcaaaaaagtttggaggccactggcttaaactactacagtgttgtaatacagaacaacactgtgaactgccaatagggaactacagtgcatggcatttctcaaactcgtctggccatgagtcatttggaggcatgaaagttccaagaaaccctctttggaccatgctgtatggtggataagagcatgaacctggagtcagacaaagctgacttcagctaactaccagactcatcttatactagctaggcgacctgagcattttactaaatctttttgaacttttttccttatctgtgaaatggggatagtgatatctacctcatatggttgtatggactttaaaaacaatattgtatataagtgcatagtataatgcctgatgtcttgtaagcaccccttaaaaggaagtttctatcattctatcatctctgatagttatttagagacctgatgtatctttcataactacacttcttcagagcagaaattgaatcttctcttatgagtcccatggaacacttagctgcaataggtatgtgagaatgaagaaataaatgatattaatagaagcagagttctctgaaagactgagagactaactataccaccaaagacagaaatgtttctttctcagctgtttataacttaccattttaatggctacaccagaacattcacataggatgaatcctcatagtaattttccttacctaggcagttgataacaattagtctgttactaattgtttccagctgctcccctttgattaatcaatcaaaacaaatttataatggttctcctgtggtttgatactgctaggagcctagcatgcctgtgatgaagacaagatgactacgtgtgcttaaaagtccggggagtaggctaggcacgatggcttacgcctgtaatcccagcactttgggaggctgaggcgggcagatcacctgagrtcaggagttctagaccagcctggccaacatggtgaaaccctgtctctactacaaatacaaaaattagccaggcatggtggtggctgcatgtaatctcagctactcgagaggttgaggcaggaggactgcttgaacctggaaggtggaggttgcagtgagccaagatcatgccactgtaccgcagcctgggcaacacagcaaaactctgtctcaaaaaaaaaaaaaaaaaaaaaagtcaggggaataaggactggagtggccaaagcaagttcagcatcagaggattaggtgggctttaaaggagagacagtgactcaggcctataatcccagcactttgggaggctgaggtagatggatcacttgaggccaggagtttgagaccagcctggccaatatgacaaaactgcaactctactaaaaatacacggattaggtgggcatggtggtacatgcctgtaatcccagctacttgggaggctgaggcatgggaatcacctgaacccaggaggcagaggctgcagtaagctgagatcatgccactccagcttgggcaacagagcaagactctgccttgaaaaaaaaaaag

SEQ ID NO: 720259 - DNA, 1542 bp, Homo sapiens
tgctgtggtatcatactacattaaaagagacaatctcttaatatatttaacattcaatgctaaatttactccttttctgtttattaatttctttagctcttatgtgagtttgtttagcatrtgcatctgggctaaaatcccattacaaagactaacagtattttttacattatatacacaagaattctatagaaacaaacacacacacagaaaacctgttgaaaaaggaattcccatttatgttccaatggaaagacccacccaaaagaccgtcacctggttatgctaagtcaccttataaatccattatgaaaaccacttctaatgtcttgatcttggtctaatcttctaaacgcccaggttggtgataaactgagctacagttaagtagttcatagagccgtcatacactcaaaataatgtttaatctttctttaacttttaattttgtcacagcagttttatatattataccattcttatcccttcgtaattgctctttaactgccaccttaaagaccccaatcacctaaataaaaacatgttgtccacaaatccaccacaaccagaaaagggtactaagaaattttaaaaggtatgtaaatcctgacaccttttttttttgccattctagatatcaatcatttcttaatacttttaaattaactggaaatgaagcatcagctctcatttagctgtaagtttcacatatttaaaacgtttcattttttttaagtctacaaaataaatttagaccaggaatttttaccaatgtttcagacatacacaagaagttatgtttgaacccctaccaacatactcaaatatatatatccttcatatatatttgagaatacatatatactacatgtatatatgtatatgcacacatacatatacacacacacatatgtatatgcacacatacatacacacacacacacacacacacatatatatataaaatttgaaaagcagtagtatctactcacaaccagtgtctttgaggtggttgatggcactggaaaaagatgaacacaacggagaaatccagcaccttgtttcttatggatcttcttgtgattccatacactgattgtaactgaatcagacttttcaatatacctaaaaatgaaaacggctacatgagtatgttggtagttataaggcagtgggcgtaaaatttttcttttgttctttttataccctaaagttaaaatttgcttcagagcctggctagattatgcaaaatacatgacttaatccacaggattgaatataaattttttaaaaatcttgaaagtaaaatttttaaaaacaattttagtatatttttatcacatctgccactctcaagctgggctataattctagttagtaaaaaggctattttagtagctagtgtctaataacactaagggagtttattaaataacttctttccaagaaaaagaatcttcaaaacttttatcacggccgggcacaatggctcacgcctgtaatcccagcactttgggaggctgaggcgggcggatcacaagg

SEQ ID NO: 720260 - DNA, 603 bp, Homo sapiens
ctgtggggctgccgggacaggtgctggggaagggctctgggcaggcagcagctgctgcaggaggaactgggcagaaagtgcctggaggacccccccactgcaggaggccaggccagggtcccccaaggggtcccagcaaggtcctgagacaggagacccctgggaacaggaaataacgggttggaagccagaggagtcaaaattgccccgggggcaaggaacagcagcagagagaaaggccagaggctgtgacttccagggayagggaccatccagtcagcagggggaggcagggacttctcagggtcaagagaggagacatcagatcggggaggcagagacccccaggaccaggagaaatcaagccagcagatgggagaggcagggaccccctaggattaggagccaccaacgcagtggctgggacagggagtaaggatcccagagaagcaaggaggcccagggacaaccatgcccccctgcttcccggtgctgcgggctgagccatgcccggccccgccgccctcctcacccttgtagtagctgtccgtgtagctggcgttgacaagctccttcaggctgtccgtttgccgcgcgatctcc

SEQ ID NO: 720261 - DNA, 923 bp, Homo sapiens
caaccagatctcatgagaactcactatcacaaggtcggcatcatgaagatggtgcttaaacattgatgaaggaacaaccacccaccctcaactcccactgtttccaaacagaaacctgctggacaggcagagcctcttggaaaacctctaccagggaagtgtggaaggaaaatatgggcttgaagcccccatgcagatggccaccaacctccagaccccagattcatagacctaccaacagctcacactctctgtggaaaagcgacaggcactcaacaacagcccagcccgtgagagcagctgcaggggctaaatcctgcaaagccacaggtgcactgccctagtagaggttttccatgaggctttgcctctgcagcaggctactcccgattcctacyatcccccaccctcccaccattctactgccagcctactcctccccaccctaaccaacccttttgtgataccctaccttgttttaacctggtcgactctcccttagctgagagagccagacagactccatcttggctccttcacttgcagccccttacccacccctcttcctcaaggacttaacttgtgcaagctgactcccagcacatcaaagaattcaattactgataagatactctggcaagctatatccacagttcccaggaattcacccggttgatagtacccaaaagccctgcatttgtgtccagttgatagcacccaaagcccccacatctatcacctttggatggatttaaagcccctgcacctggaacggtttgttttcctgtagccatttatctttttaacttttttgcctgttttgctgctgtgagattccttcagctaggctccccctcccctctctaaaccaaagtataaaagaaaatctagccccttcttctgggccaagagaattttgagca

SEQ ID NO: 720262 - DNA, 649 bp, Homo sapiens
agacatttgcataggtaagaaactttggatttctagcttgtcatcactactctagaagattatcatcatgttttataaaacaaaatgctaattctagacataaggggaaaaagaaattaaaactgtaggggtgggggaaaaatattgcataatttattactgttgacctcatcatatcactgattaagggcactgcatttaacttgtatgtgaagtagaccccatattagctgcagttaatcagtagaccaggtgttctagcagaattaaatttgatgctcctgtgttatctttaaatgacacagctcttctgaaaacccgtactcacagtgcatgattatccattaagacaaggtgatggaatgtgtgaatacagctgaggagacaccacaaggcaaatgctcaatggttcccattartattgggtaaatcaacactataaaacagaaagccataggcattatttaatatttggttttggaaggtatttttagtgacactgcatacagttgtactgaatacttgcaaaattagagatgtaaaaataaaacaaaggcacattgtgtttgagtagggaatctgtagatgtgtagctggttttcccatccagtcccaaaattctaaatataatcatggtacccacactcaa

SEQ ID NO: 720263 - DNA, 1408 bp, Homo sapiens
caccagctatcaggcagatttgcaattctgtggacttttaaaaaagcagacttgcttattttcaattctttttggagagtcatatcgtggtaacttaccacatgataggcatcatcttacacactttaccatttgctatatcttctaagcctcacagtaactctacatattattatcagcctccattttacagatgaagaaatagaggttcagagagattaataattcctaacacttgttaaccacttactgtgtttcgagcactgggctaattgctttaaatgaatttgcttattttattatctcacacccttacaaggtaggcaatattaatattattattattattatttttgagacggagtcttgctctgtcccccaggctggagtgcagtggtgggatctcagctcactgcaacctctgcctcccaggttcacaccattctcctgcctcagcctcccaagtagctgggactacaggcgcccgccaccaygcccggctaatttttttgtttgtttgtttgttttttagtagagacggggtttcaccatgttagccaggacggtctctatctcctgacctcgtgatctgcctgcctcggcctcccaaagtgctgggattacaggcgtgagccactgcgcctggccacattattatacctcttctgtagatgaggaaattgaggtttagagaggctaaggagcttgctggcagctgctagagccaagcatcctctctgtgaggccccaaagcccaggcactcaccactccacccaggatgcagcccagagcttcagggcaagcattccaggctctgctgtttattagtcacagtgccttgggcaaattaattcactttcccaagcctggtttctaatctgtgaaatggggataagactagcatctccctaatatggtaattctggggattaagtgagacattggattaaggggttagcatagtgcctgacccatagttaggctcccttgatataagtgatttttattacccagcttctttctggggtggagggcttcttgattaaagtcggatcattttaggactttaggaatcttctggaaaaattggccttcccatgaccatctgggtgattttatgtggatactgctctggcttttttctgtgcgaagaggagaggggtgctttacttttacttttacttagagctagggcagggtttattctggcatttgggaaggaaaagactaaaatcaagtgacgaagaaccagagttactgtgtcagtgtgagtgctgccctggagtttcagtcttgcttagtgtctgaaactggttcctggttcaggcaagaagagctctcagggacaccatatgctacccagagagtgccctaggtgtagacacatgtaaataaaagagttgttga

SEQ ID NO: 720264 - DNA, 1408 bp, Homo sapiens
caccagctatcaggcagatttgcaattctgtggacttttaaaaaagcagacttgcttattttcaattctttttggagagtcatatcgtggtaacttaccacatgataggcatcatcttacacactttaccatttgctatatcttctaagcctcacagtaactctacatattattatcagcctccattttacagatgaagaaatagaggttcagagagattaataattcctaacacttgttaaccacttactgtgtttcgagcactgggctaattgctttaaatgaatttgcttattttattatctcacacccttacaaggtaggcaatattaatattattattattattatttttgagacggagtcttgctctgtcccccaggctggagtgcagtggtgggatctcagctcactgcaacctctgcctcccaggttcacaccattctcctgcctcagcctcccaagtagctgggactacaggcgcccgccaccacgcccggctamtttttttgtttgtttgtttgttttttagtagagacggggtttcaccatgttagccaggacggtctctatctcctgacctcgtgatctgcctgcctcggcctcccaaagtgctgggattacaggcgtgagccactgcgcctggccacattattatacctcttctgtagatgaggaaattgaggtttagagaggctaaggagcttgctggcagctgctagagccaagcatcctctctgtgaggccccaaagcccaggcactcaccactccacccaggatgcagcccagagcttcagggcaagcattccaggctctgctgtttattagtcacagtgccttgggcaaattaattcactttcccaagcctggtttctaatctgtgaaatggggataagactagcatctccctaatatggtaattctggggattaagtgagacattggattaaggggttagcatagtgcctgacccatagttaggctcccttgatataagtgatttttattacccagcttctttctggggtggagggcttcttgattaaagtcggatcattttaggactttaggaatcttctggaaaaattggccttcccatgaccatctgggtgattttatgtggatactgctctggcttttttctgtgcgaagaggagaggggtgctttacttttacttttacttagagctagggcagggtttattctggcatttgggaaggaaaagactaaaatcaagtgacgaagaaccagagttactgtgtcagtgtgagtgctgccctggagtttcagtcttgcttagtgtctgaaactggttcctggttcaggcaagaagagctctcagggacaccatatgctacccagagagtgccctaggtgtagacacatgtaaataaaagagttgttga

SEQ ID NO: 720265 - DNA, 636 bp, Homo sapiens
ttcctcctacgcccacctgctcccccagctcagcccctgttctgattatttacctggcataccacaacgtttttcttgtctccaaacatggattgggcccatggccatgacttccaacaccacaaactaatgtcagtgctagatttcatctagcataaattatctgttgctgtccacagaccaactgttgggctcttcccagagagtttccgtgattaaccgtctttcctttagctttttgcctgtagctaattgccccgtatttcctagctttgtgctttctatatcgtcctaaacatacccctgttttctcttattgagaacctccttagttacttgccrtgcattggtagctgtgtctaggatctctgtgtcataggactcttgcttgtcttgttcttccttgaactcttagatttcctgctggtcacaaagcccagtggtggacactggccatccacattattgagacctctagtgtctctaccatgaaggatggctttcacagaggttatagacctgggctctggagtcagacagctcctccacttagagctgtgcactcttggttatgtaactagctttctataccttactttcctcattggaaaatagggtaatggtagctagaaaata

SEQ ID NO: 720266 - DNA, 600 bp, Homo sapiens
ttgtaacaattacaaaaatgattaaaggcacttctatgtgtgtatgcatacacacacacacatacacacacatgcacacacacacacacctgtgagggagcagaacatgatgctcaattaacaattctgaaagattaatacacaaacacacacacacacacacacacacctgtgagggagcagaacatgaaaacataatgtgcaattaacaatgctgaaagtttaacacacacacacacacacacacacacacgggttatatctttatttgaataaactttccatcaaagagagtgaaacttacaggcaatatgaatgagagaatgtgtccaaaagttgtgaaaaactaccccaggaaaatatctcttttaaaattaggtttttataaacagtgcatttaatgaagcatattagtccttttccatattaaattggattatcacattttttcttgtttgttttaatgcctcaggattcaagactgaaatcaatcatttactgatccagattaaagtctgtatatatagatatatamatgtatgggtttaccaataatattgataaaatattctcatgaatcttttgtgaagcaatggaaaa

SEQ ID NO: 720267 - DNA, 1493 bp, Homo sapiens
tggttaggatgagcctggttgtgagtactaaagatctatgtacaatttcaggcccgcatatggatgtcaaaaaatgacatgttttgcttgttcttaagtctgtatgcccaaccgtgatgcccaggtcaccactggttatcaggtaagggctcaataaatgctcataaacttgagcctggtcatgagcagactgtactgttgggcaggaagggagaggggactaggcacatctaattgacagtaaataacttgaattttcttttccttgttaagagcaccaatgtgtaagaacatttttaagacatttaagtatgtgccaggcactgcgcagattaaaaaccaaatcaaaccaaaacaatacaaaaaacaaaaacaaacaaaaaacccaaccacaggcacttgaggttatagctagtaagtgccagcattgccaatagcagtaataatggttcatgggactggtcattaaaatctgagtttggggttatttgtggctttcatcagccaggctaactcaaggcaaaaccatcattcatttacttattaatctgacacacatttattgcaaggtggattgatgctgtaagggtacaccacaggatagggtgaaatgggaaaagttctctgtgcatgacaacctatacccttcggcagtgagtgcctcattgtcatgtgagagattcagtgagtaaaagtggtaagagtagagtaaaaagagagacagcgcttccagcagagatggccacttcctgggccaggtggcatttatactaggcattataaaacatgtggttaatcatctctataaatgtttattttgagtttcatttgaaatagctttctctctctcccccacactcccacgcacagaaactccatacccatcctctgtggtcagctatgaccttgcaaaccagaacatttattggtcatttagatctgcatctatcttgtttccaatgaagtcagacctaatgaggactggcaaattctgagaataaggacaggatgaacctctgttaactcctaggctggtaatcaaaatgctgggcttcatgctgtgggggatgtrtcctacttgactgtgcccttaaatcaatttggaccaatttcacccccaagcgggctctgcacatttccttttcaggaatttaatcttggctgtgatgtgctgctgttattgaccattagcctggttccaacaaggccatttgggaaaaatcagattggataacatgcttaagtttggtatacctgctcatgtcatttcttcttcctttgctcctctatactaaccagaggaaaagtggggcaggaaagtgatttcatttaatgagaatatttataaaatcaggagatcctgtgagtaaatcagccttcctcttgctctgagctactttcttttgtctaataatttaatgtcctgctgcttctgtcaacaatgaatagggacttggtgggtgtctattgtgtgcaaaatattgaacctacta

SEQ ID NO: 720268 - DNA, 601 bp, Homo sapiens
ataaggcagtaaccgaggccatgcaccataagagcctggatgaagctacatctatgcaggtggagaggcaggaataggttttcatagagtttttctagagaaattctgcagagtcaggtgacttttgagtgtatggagtgagtcagaagtaggaactagggatgattctgtggtttctagttggagtgactccatataagatcaggccatcaccaaggtaggaaatagagaaggagaaacaacatttgacctsgaatttacaaacagtccttagagttgtgctttttaacaccctcaaaggcattaaaaatattaatatttcctatttgttataccctttcctagaaggcaatgggtagtaaaaataccatggcctgacagaggagaaacaagaagaagagaaggcaggcagatctcaaaggtatggtggagagagaaaaagataagcaaatcttgtcttgaatgtgacttcactagaatgtgtttcccataatttgtttttattgaggagatgtctcagggatacactgtcctggaagaagacagctacacaaagaccaaatagattcgtggaataatctaggaattttacaaataatac

SEQ ID NO: 720269 - DNA, 601 bp, Homo sapiens
ataaggcagtaaccgaggccatgcaccataagagcctggatgaagctacatctatgcaggtggagaggcaggaataggttttcatagagtttttctagagaaattctgcagagtcaggtgacttttgagtgtatggagtgagtcagaagtaggaactagggatgattctgtggtttctagttggagtgactccatataagatcaggccatcaccaaggtaggaaatagagaaggagaaacaacatttgacctcgaatttacaaacagtccttagagttgtgctttttaacaccctcaaaggcattaaaaatattaatatttcctatttgttataccctttcctagaaggcaatgggtagtaaaaataccatggcctgacagaggagaaacaagaagaagagaaggcaggcagatctcaaaggtatggtggagagaraaaaagataagcaaatcttgtcttgaatgtgacttcactagaatgtgtttcccataatttgtttttattgaggagatgtctcagggatacactgtcctggaagaagacagctacacaaagaccaaatagattcgtggaataatctaggaattttacaaataatac

SEQ ID NO: 720270 - DNA, 601 bp, Homo sapiens
ataaggcagtaaccgaggccatgcaccataagagcctggatgaagctacatctatgcaggtggagaggcaggaataggttttcatagagtttttctagagaaattctgcagagtcaggtgacttttgagtgtatggagtgagtcagaagtaggaactagggatgattctgtggtttctagttggagtgactccatataagatcaggccatcaccaaggtaggaaatagagaaggagaaacaacatttgacctcgaatttacaaacagtccttagagttgtgctttttaacaccctcaaaggcattaaaaatattaatatttcctatttgttataccctttcctagaaggcaatgggtagtaaaaataccatggcctgacagaggagaaacaagaagaagagaaggcaggcagatctcaaaggtatggtggagagagaaaaagataagcaaatcttgtcttgaatgtgacttcactagaatgtgtttcccataatttgtttttattgaggagatgtctcagggatacactgtcctggaagaagayagctacacaaagaccaaatagattcgtggaataatctaggaattttacaaataatac

SEQ ID NO: 720271 - DNA, 2782 bp, Homo sapiens
gcataactaaagacaaagtggatggaacctgggataaacctgctcctaaatgtgaatatttcaataaatattcttcttgccctgagcccatagtaccaggaggatacaaaattagaggctctacaccctacagacatggtgattctgtgacatttgcctgtaaaaccaacttctccatgaacggaaacaagtctgtttggtgtcaagcaaataatatgtgggggccgacacgactaccaacctgtgtaagtggtgagtatgaaaagaaagctgggttgggaggttggggtcttgcctttctgtgcagaccacgttttgtaccctcctgaaggacaaacattgtgaacatgtaatgatgagggtggaagaaggaaacaagggaaaaggtgaaagttatggcttcttcgtggaggcatataactgctcgttcaaaaaacatcaattgagcaaaggagtttaaagtacatggaaaaatgtaattaaacatacctaataattgagtagggtaagttttgcaaggatggggtcagagtttgttggggatgtgggaatggggtggttttcaactgtatatctgtgttactgttaaaatgagaagaacggtgggatcttatagcaaaaatacacccaatggatttgaaattaatgtataagtagctgctaacaccgtctagcacaggtgatatcctgctctctgtggtctctgtaaacatgttttgaagttatccactatttccccaagtcatcttctgagccatcacatttcaaataaatgcctttgaaaatagggacctactgtaaattattcattccttctcttttggtttggtttatgttgctgctgaaatataaatctgaatttgaattccacaattacaagaaatggcaatatttgacaaaaattatactatcaaattaggtattttcttaataaagaacaatattgacaaattttaagcagattaaagagctgacaaaactgttaaattagtataaaatgggattctgtttattgattgattgattgataaatagccttggaggaaggagatcttaacgatagttacaaagggcaatggctgctgaaaacagttaagcctttgtaacaatttagacagacatatatgtatggacatggaaggatatcgtatacatgtcgctaagtagaggaagtaaggcatagaatatgtattagttgtacacacacacataatataggtgtatatatgtatcatgcataggatcccaataaactatattgccaatatctaccaggatagcccttgaaatgatagcatgctacttttggaacagagaataagcttaaggatagggtgagaatataggtgaaaattgactttttttggtaattgaaatttttcacaaggcaaatgtaattcatatagtgtaactaaaaatgaaaaataaggtactatttatggctatttgtggcataaaatggatacacttaaaccacacctgtttgatctttaaaagactaggttgaaagttaataccaactggctaccatagatcatgtgtcatttatttaaatccatatcctaagtcagcatctcgatcaagcttgtccaactcgctacccgtggacagcatgtggcccaggatggctttgaatgtggcccaacagaaattcataaactttcttaaaccattatgagattttttttttgcaatttttttagcttatcagctatcattagtgttagcgtatattatgtgtggcccaagacaatttttcttcttccaatgttgcccagggaagccaaaagattggacccccttgattctagattgtgaaggatgcatcatctgayggcttttttttcctggtatgtgtgtgtaaagttttccctctcgagtgtccagcacttcctatgatccacaatggacatcacacaagtgagaatgttggctccattgctccaggattgtctgtgacttacagctgtgaatctggttacttgcttgttggagaaaagatcattaactgtttgtcttcgggaaaatggagtgctgtcccccccacatgtgaaggtaccctaaatttacaatctattttaagaatctgggctgttctgttatttgccatgcatttctcatctttggtttgttttttagaggcacgctgtaaatctctaggacgatttcccaatgggaaggtaaaggagcctccaattctccgggttggtgtaactgcaaactttttctgtgatgaagggtgagtgtcaggattatttatgagatttaattcatttgtcttgtgtgtgcgtggtgtggactgtgaaacctgcagaagtctcctctgtgaggatctctgggcagtctggggtagggttgtgagaggtaatgctgataaaaggaacagatgcacactgattgaaatgaacttgtcttgaattgtaagtagaggctgctgttcttcagcacaaactgcctaatagttctgaatgacaaccttctgtctccaggtatcgactgcaaggcccaccttctagtcggtgtgtaattgctggacagggagttgcttggaccaaaatgccagtatgtgaaggtaggctaggcaactatggtctgacagcactgcattctcagcttaactaaaagcttttggttcagtcattaccttacagactcttactgaacacagaactcctagagatctttaaggatatgtgcttcaccaaagcatccttattttttgtttcctcaagtaaaatggggttcctaggctttccctcctctgaaagctatgcagaccttc

SEQ ID NO: 720272 - DNA, 576 bp, Homo sapiens
aaatgctccctaccagagaatagtaaagaactcattaacatcatccaatatcattgtcattggggaggggagagacgttaatactttttcttccttgtaataactcactaattgtcatttactgctataatattgtagtgataaaccaatttgagttttgttttcctatctagttggaagagccatctctggtcaaaatagctctttagaaggagatmttttcatttactgtataaagtaatcaaggtcatcaagtctcaaatttattttataaacgaatgaataatttgataatatacatgttcataggatgtcaaattcattgtaaatatttgaaggattggcctataaaccattgggaggtatttacactgaaatgcataccaaactagattgaggtggggagaaatgagttcttagagaatgttttgaaatgctgatacattgacataagctacatgaaaagtggttaatttttcttgtttgtccaaagttgctttactaagttgtaagaccaaacaaaacaaaaacaaaatagatttttctatttttagagatttcaaagagtatttaaaa

SEQ ID NO: 720273 - DNA, 595 bp, Homo sapiens
tattatataaccagaaaaattaaaaattaaaaataaataaaaatactaaatacagtaataatagctaaaatttactgagtatttatcataaggtaggcaccctgttggctttttatttgcgtaagccatgtctaattctcacaatgttgtacccatttcacgcataaaactaaatgattggtccacagtcacattgttaataattagctaagctaaaattaaagcccagatcgcctacatttcaatgtctacattctttcagtaccctagacaaccattaccaatgtagtactgcctttgcccacgggctttatgaagcataggccctrtagtgttccagcaagtgtttctgggtgtctgtcctggaaactctgctcacctttggtcacaagatcatgcttcgttactttttttttttttttaaatcatctgtgattctttcccaggagtggtcttcttgctttcaaatttctgaaaggctacttcacaattgacagtttcttaagggcagggcctaggtctttgttctctatattactagtatcaaggagagtatctagcatatcccaggtattcatcagacactttttgaatt

SEQ ID NO: 720274 - DNA, 595 bp, Homo sapiens
tattatataaccagaaaaattaaaaattaaaaataaataaaaatactaaatacagtaataatagctaaaatttactgagtatttatcataaggtaggcaccctgttggctttttatttgcgtaagccatgtctaattctcacaatgttgtacccatttcacgcataaaactaaatgattggtccacagtcacattgttaataattagctaagctaaaattaaagcccagatcgcctacatttcaatgtctacattctttcagtaccctagacaaccattaccaatgtagtactgcctttgcccacgggctttatgaagcataggccctgtagtgttccagcaagtgtttctgggtgtctgtcctggaaactctgctcacctttggtcacaagatcatgcttcgttactttttttttttttttwaatcatctgtgattctttcccaggagtggtcttcttgctttcaaatttctgaaaggctacttcacaattgacagtttcttaagggcagggcctaggtctttgttctctatattactagtatcaaggagagtatctagcatatcccaggtattcatcagacactttttgaatt

SEQ ID NO: 720275 - DNA, 1084 bp, Homo sapiens
taaatatgtaaacacatatggaattggctttttcaaagcaagaagtaatctttttaactgcatcctggccattctttggtcaaatactagaggataaaacgctgataagagcctccagtagagtgcttgcacacattgtacttcctaggttttcaataaatacatgctgaaagaattaactgattattattttatgacggtttttcatgtgcaaaacactgtttaagacctttgcaagaatacacacacacacacacatacacacacacacatcctcccagaaattatgactttaaagcaattattttattctctgtttttgagtcatgttaattaaaatttgtagaaggccattgttttggactgagctcctgcactagatcccaatagaccaaactaaagcagagcgaactgaactgtaaggaagtaggaaaatcctcggacagacaagtttttgtctgaaaacaggagcttcaacaaccaattggaaagaactcagtcaacttctgctgaaataataaggaagtcactgctttaactcttacgagtaaaataacrtgaagtacctggtattaaccaatttgctcttttgactttcttgttcctaccttacgaaacccaactgttcgcctatgtccaacatagcacctctctatttttatatgagatgctacctgattcacgaatctcaactaaaaatcaataagatcaatgaactaaatttgtcatactttggtttttggatagtcatcacttggaaaaaatattgagtcagaattgtctgactcaatttcactacataactatttaaaatgaagagaaaattctactgttggttttaattcagggcacaggaacataagcacaccaaatttttttggtcataccaaattctttcatttcttcatatatgtcttcctagcaggctttgtgcctgccctaaatcttctcagatacttcactcttattccttctttagaatttaaatcaattgccatccttctaggtaagcaagtatctcctggccttctcagctctatgagactcatttaaaattatttcatagcattgtgtactttgcctt

SEQ ID NO: 720276 - DNA, 1723 bp, Homo sapiens
taataggtcaataaaattaaatgtaagcaaaacatttttatttgaaaatctccatagctgtctttagtcttcagacatgtatatttattgggttccaaacagattaaacaatttttaaaaaacataaaaatgtgctattccctgtgatcaattgtttctaagtagatttaagtttgggaaattcaaaactaagctcagatgcaataattaacattttttgtgttatttgtagtttagctatagctcctcactctcatattcattacttttaaatttatcatcctttaaatatgaactttaatttatatattttaaagaaatatttaacttcagcatccaccaaaggatatatataaactttaccatataaacatagctttagcactcatatctcttataaattttttcaaatatttaatgtttcacaaaatacaaatattttttctcatgcaaattcaagtgtaccaccaaacaaatgttagaatattcataaaatttgcattatatttgtttatatacaatagtacaaaaaatgaagaagtgaggcaactgttaaagtaattaacagtttggcctaaagtaatttaggccaaaacacacatastttcatttaaaataagtgtcagatttgaaaaatttcggtttagttattttttttttaattctgcatggaaggtgtgcagagtgttctaaaataactaaagaaaaataatcacaaagacttttgaaaacataacctataaaagtttaaattagcacaatttgcaacagattattataattgataatgtgcaattattacttgtgataaataggaggctgttgctctcccattaagggtttatattttacaagaaaatagtattaaaaaagatgaggccaacagtaattaaaagtgatattattgacataatgatgaagtatcaggagccaacattaatagtttatatctatattgacctacaattaagcatggatatttgctaagtacattttaacatttaatgaactgttctacacctaaatttctgtagatttcatcatgactttctacgccaattgctgatatcttactctatttctatgtgtgttgccttatagttgaagtattacattgttttaatcaggtcttttttgttaaagataggataattgttggaaagaactaagaattctgagtgaataaggcctaaaactcattgtaagtggaaatatagaataaatacgtttttgtcagtgctagaacaagctgtcactgacattctccttgcataaaagatagcgtgaagaatcactagttttttgtttgtttgtttgtttgttggttggttggttggttgtttttgagactgagtcttactctgtcacccagactggagtgcagtggcatgagctcagctcactgcaacctccgcctcccgggttcaagcaattctcctgcctcagcctctggagtagctgggattgcaggctcccaccatcgtgcccagctaattttttgtatttttagtagagacggggtttcaccgtgttagccaggatggtctcaaacttctggcctcatgatttgcccacctcggcctcccaaaatatggggattacaggcgtgagccaccgtgcctggccggaatcacgagatttttatattctgtgtcaccagccctggtagacccagtattgggcctatgcaaaaatgaataagccaactaagtatataacttta

SEQ ID NO: 720277 - DNA, 1723 bp, Homo sapiens
taataggtcaataaaattaaatgtaagcaaaacatttttatttgaaaatctccatagctgtctttagtcttcagacatgtatatttattgggttccaaacagattaaacaatttttaaaaaacataaaaatgtgctattccctgtgatcaattgtttctaagtagatttaagtttgggaaattcaaaactaagctcagatgcaataattaacattttttgtgttatttgtagtttagctatagctcctcactctcatattcattacttttaaatttatcatcctttaaatatgaactttaatttatatattttaaagaaatatttaacttcagcatccaccaaaggatatatataaactttaccatataaacatagctttagcactcatatctcttataaattttttcaaatatttaatgtttcacaaaatacaaatattttttctcatgcaaattcaagtgtaccaccaaacaaatgttagaatattcataaaatttgcattatatttgtttatatacaatagtacaaaaaatgaagaagtgaggcaactgttaaagtaattaacagtttggcctaaagtaatttaggccaaaacacacatactttcatttaaaataagtgtcagatttgaaaaatttcggtttagttattttttttttaattctgcatggaaggtgtgcagagtgttctaaaataactaaagaaaaataatcacaaagacttttgaaaacataacctataaaagtttaaattagcacaatttgcaacagattattataattgataatgtgcaattattacttgtgataaataggaggctgttgctctcccattaagggtttatattttacaagaaaatagtattaaaaaagatgaggccaacagtaattaaaagtgatattattgacataatgatgaagtatcaggagccaacattaatagtttatatctatattgacctacaattaagcatggatatttgctaagtacattttaacatttaatgaactgttctacacctaaatttctgtagatttcatcatgactttctacgccaattgctgatatcttactctatttctatgtgtgttgccttatagttgaagtattacattgttttaatcaggtcttttttgttaaagataggataattgttggaaagaactaagaattctgagtgaataaggcctaaaactcattgtaagtggaaatatagaataaatacgtttttgtcagtgctagaacaagctgtcactgacattctccttgcataaaagatagcgtgaagaatcactagttttttgtttgtttgtttgtttgttggttggttggttggttgtttttgagactgagtcttactctgtcacccagactggagtgcagtggcatgagctcagctcactgcaacctccgcctcccgggttcaagcaattctcctgcctcagcctctggagtagctgggattgcaggctcccaccatcgtgcccagctaattttttgtatttttagtagagacggggtttcaccgtgttagccaggatggtctcaaacttctggcctcatgatttgcccacctcggcctcccaaaatatggggattacaggcgtgagccaccgtgcctggccrgaatcacgagatttttatattctgtgtcaccagccctggtagacccagtattgggcctatgcaaaaatgaataagccaactaagtatataacttta

SEQ ID NO: 720278 - DNA, 1355 bp, Homo sapiens
  misc_feature 777, 778, 779, 780, 781, 782, 783, 784, 785, 786, 787, 788,789, 790, 791, 792, 793, 794, 795, 796, 797, 798, 799, 800,801, 802, 803, 804, 805, 806, 807, 808, 809, 810, 811, 812,813, 814, 815, 816, 817, 818, 819, 820, 821, 822, 823: n = A,T,C or G
  misc_feature 824, 825, 826, 827, 828, 829, 830, 831, 832, 833, 834, 835,836, 837, 838, 839, 840, 841, 842, 843, 844, 845, 846, 847,848, 849, 850, 851, 852, 853, 854, 855, 856, 857, 858, 859,860, 861, 862, 863, 864, 865, 866, 867, 868, 869, 870: n = A,T,C or G
  misc_feature 871, 872, 873, 874, 875, 876: n = A,T,C or G
agaagtagaatttaataccagggatgttgggctaacagtcctttccattttcaggatgtcattataattccataaaagaagatcctagctattttgatttggtctggaaagtgaactagaatcagtgattgtacactatgaagacaaattttgattccatatgcaaaactatgcaataaagaggtgtggtgacaataaaataagagataaggtcaagaatcttgatttaaaaaaaaaaaagaaaacaactctaaggtactaagtcagctgacatatatacttcccaaagaaattcctgaagcactttcccagaatacattaatggataggtaaggtgtacttacaaatggaacaaagcaacacacacattcgatcaggtagaattatcataagaatttaaattcattatgtgtcgtgaaaattgattataggaattggagttattcttgtctaatgcaattagatttgagttgagggaccagggaaaaaatcactcaggtacaaagcacctgctccaggaactgtttcataaacccagctgctgaaaccatctgctataacagtaagtccagttttacccagtagctgccaaaatgacatgttctgaccctaagactagttttacctaccattgtcacccaccaatcagaggttgccagttcctgaaaaactacactgaagccaatgaactttctttcaaaatgactctatgtaacatgttttttctcaataaaaccccaaccaccaaattctttattcttcgggcatcccagtttnnnnnnnnnnnnnnnnnnnnnnnnnnnnnnnnnnnnnnnnnnnnnnnnnnnnnnnnnnnnnnnnnnnnnnnnnnnnnnnnnnnnnnnnnnnnnnnnnnnnttagtagagtaagtatcttctctatttttttttccatctgatgggttatcagattaatcactgttagcttagaaacatgaaaagcaaaacctagaaagactgagatatagaaagaaaaaagatagtgaagaagatgattcccagaagataccaggatagagatcagatgtggtagaagcaggttatataccctctttaattctgaaaacgatgccacacctaaggaagagagtcaccctgttaatgatgataaaaattaatattttggcacaatgattttaaacaattgtctctggaacctctgccatcactgtcacagacactgttatcaaataaattaattttcaaatgaatgtaaccaacattgaatacatacatactttaagtagattggcacctattacatcaacaaaactaagtcatgctataatatttgatagtatgattcttatcttaattyaattatcaattcagattta

SEQ ID NO: 720279 - DNA, 2303 bp, Homo sapiens
ttgactgctttatcttctttagaagctccagctcagatgtggttggatacttcaatgcacttgtgactgagacacaacacagtctaattacaaagcattctatcactcaggcacagggatataaacagatatatataatatgctttcatcatatattcttatgtgcaatttgggcaaaatcactgaacattgtctgaatttcagattcccaatttctaatggggaattttattacaattctttgactcttttattttcccactgtttgtggtctattactaggtgaaacaatttcttctggtgggattggcaatgctgaaaacttatattactatacatccacctgtgcttatggagttgaataagagatattaagtatcattcattctgggatcactagaaccagtcagatggttctgggcctgcacggtcacatckttgcttgaattatttatatgcaattattttgcttttaaaaataagagatgcaattggtgaagctgttaaaatgactgtaattaaagtaatacaagagaaaatgatccaattttgtggatagctgtttattctgcattttacctttcaaaacaattaaattgttgttatacacttatatgctcacagggaatattggcaataaaattttaaactggggaaaattagtattttatatcagcccattagaaaaataagcaaagaacctaatcgccgtccattaggttgagacaaatgctggtctcaggagatggttattccattattttccctagtaaataagaaaacaggggggaacttccctccgttattctcaggcctgtgaggccactaggattggtagttaaagggccataatttggtaagagtttctatggcccactgagttatccaatgatgatggcttaaactatactttaaccctacacctgcctcaactgattccccactcctccttaggttagaaaattgcattgccctggaggtttgtgtatttgggtgtctgggtagacttgatccttctgccatttttcaattaaatgaaaattcacaatgaaattacattctaaatgtctttcaaaaagtacgaacaattattcattactctatttgaatagctcagtagcctttagttttcatctgaattttaatctaattgataacgaccttcagccaacttccttctctttcaaattccctaatcacattttacaaccctaccatcagactgccctgaaataggcacatccacgtggaggtgccaaggaaatctatgtaggcttgaaacacttaaaaagaactggagtggacaagaaaaagaaagatcatccaagttcttcaagtttacaaaatgtaatatctggtaatgcatctcatttaatggcccaaagtaattttcaaattattttctaaaaataacacagactttatatttccagaaaacccaagttcagcatggtattgcagtgtttaatatcatttcagaatagtcataaagccttgtttttaacatttcttcatctttaaatgagcctagcattatctccctaatgatcaataaatgtagacctgtaacagtcaagatctatgccaattaatccggaaatgttggaaaagtaacttgaagagaacattgctcctcagaaataaatcccacaatttaagagaatcagtggggttccagggctttactgccaccaagccaagtcacaaaaccaaatgtgaaaacaatgtaatcaagcatttaaatgatttatctgaatgctggatgcttggtttaataaagctgggacaacttgcctaactgcttcagtgtttcacatttcatgggtttttatggggttgtgtagacactaaccagaagaccctatgatctatttttactaaataaaaattgtgcagccgggcacagtggctcacacctgtaatctcagcactttgaaaggctgaggggccgctcacttgaggccaggagtttgagaccagcctggccaacatggtgaagccctgtctctaccaaaaatacaaaaaatagctgggcgtggtggcgggctcttataatcccatctacttgggaggctgaggcaggagaatcgcttgaaccggggaggaggaggttgcattgagctgagatcgcactactgcactccaggctgggtgacagagtgagataaataaaattttaaaaaattaggcatagtattgtacatgccttgaatttatataatgctctctattatggcattttacaagagagaagatttaaagtgtgccatctgacttgcaagtaaaaagagcatctccaaaat

SEQ ID NO: 720280 - DNA, 2303 bp, Homo sapiens
ttgactgctttatcttctttagaagctccagctcagatgtggttggatacttcaatgcacttgtgactgagacacaacacagtctaattacaaagcattctatcactcaggcacagggatataaacagatatatataatatgctttcatcatatattcttatgtgcaatttgggcaaaatcactgaacattgtctgaatttcagattcccaatttctaatggggaattttattacaattctttgactcttttattttcccactgtttgtggtctattactaggtgaaacaatttcttctggtgggattggcaatgctgaaaacttatattactatacatccacctgtgcttatggagttgaataagagatattaagtatcattcattctgggatcactagaaccagtcagatggttctgggcctgcacggtcacatcgttgcttgaattatttatatgcrattattttgcttttaaaaataagagatgcaattggtgaagctgttaaaatgactgtaattaaagtaatacaagagaaaatgatccaattttgtggatagctgtttattctgcattttacctttcaaaacaattaaattgttgttatacacttatatgctcacagggaatattggcaataaaattttaaactggggaaaattagtattttatatcagcccattagaaaaataagcaaagaacctaatcgccgtccattaggttgagacaaatgctggtctcaggagatggttattccattattttccctagtaaataagaaaacaggggggaacttccctccgttattctcaggcctgtgaggccactaggattggtagttaaagggccataatttggtaagagtttctatggcccactgagttatccaatgatgatggcttaaactatactttaaccctacacctgcctcaactgattccccactcctccttaggttagaaaattgcattgccctggaggtttgtgtatttgggtgtctgggtagacttgatccttctgccatttttcaattaaatgaaaattcacaatgaaattacattctaaatgtctttcaaaaagtacgaacaattattcattactctatttgaatagctcagtagcctttagttttcatctgaattttaatctaattgataacgaccttcagccaacttccttctctttcaaattccctaatcacattttacaaccctaccatcagactgccctgaaataggcacatccacgtggaggtgccaaggaaatctatgtaggcttgaaacacttaaaaagaactggagtggacaagaaaaagaaagatcatccaagttcttcaagtttacaaaatgtaatatctggtaatgcatctcatttaatggcccaaagtaattttcaaattattttctaaaaataacacagactttatatttccagaaaacccaagttcagcatggtattgcagtgtttaatatcatttcagaatagtcataaagccttgtttttaacatttcttcatctttaaatgagcctagcattatctccctaatgatcaataaatgtagacctgtaacagtcaagatctatgccaattaatccggaaatgttggaaaagtaacttgaagagaacattgctcctcagaaataaatcccacaatttaagagaatcagtggggttccagggctttactgccaccaagccaagtcacaaaaccaaatgtgaaaacaatgtaatcaagcatttaaatgatttatctgaatgctggatgcttggtttaataaagctgggacaacttgcctaactgcttcagtgtttcacatttcatgggtttttatggggttgtgtagacactaaccagaagaccctatgatctatttttactaaataaaaattgtgcagccgggcacagtggctcacacctgtaatctcagcactttgaaaggctgaggggccgctcacttgaggccaggagtttgagaccagcctggccaacatggtgaagccctgtctctaccaaaaatacaaaaaatagctgggcgtggtggcgggctcttataatcccatctacttgggaggctgaggcaggagaatcgcttgaaccggggaggaggaggttgcattgagctgagatcgcactactgcactccaggctgggtgacagagtgagataaataaaattttaaaaaattaggcatagtattgtacatgccttgaatttatataatgctctctattatggcattttacaagagagaagatttaaagtgtgccatctgacttgcaagtaaaaagagcatctccaaaat

SEQ ID NO: 720281 - DNA, 2154 bp, Homo sapiens
  misc_feature 480, 481, 482, 483, 484, 485, 486, 487, 488, 489, 490, 491,492, 493, 494, 495, 496, 497, 498, 499, 500, 501, 502, 503,504, 505, 506, 507, 508, 509, 510, 511, 512, 513, 514, 515,516, 517, 518, 519, 520, 521, 522, 523, 524, 525, 526: n = A,T,C or G
  misc_feature 527, 528, 529, 530, 531, 532, 533, 534, 535, 536, 537, 538,539, 540, 541, 542, 543, 544, 545, 546, 547, 548, 549, 550,551, 552, 553, 554, 555, 556, 557, 558, 559, 560, 561, 562,563, 564, 565, 566, 567, 568, 569, 570, 571, 572, 573: n = A,T,C or G
  misc_feature 574, 575, 576, 577, 578, 579: n = A,T,C or G
tatcaataataaaaataatacatagaatcaaagccagcagcaaatatagcaaaactatattcatctataagaaacgaaataagaagcagtcgtacggctgggcgtggtggctcatgcctataatcccagcactttggaaggcsgaggagggtggatcacctgaggtcaggagttcaagaccagactgaccagtatggtgaaaccctgtctctactaaaaatacaaaaataaccccagctacttgggaggctgaggctggagaactgcttgaacctgggaggcagaggttgcagtgggacgagattgcgccactgcactccagcctgggcgacagagggagactccatctcaaaaaaaaaaaaaaatcatcgtaaatgaaataaaataaaacataaagcaataatttaaaacagactaaaatcagcaataacaacaataatagtaacaatagcaactaattatgtgccaggcactcttctnnnnnnnnnnnnnnnnnnnnnnnnnnnnnnnnnnnnnnnnnnnnnnnnnnnnnnnnnnnnnnnnnnnnnnnnnnnnnnnnnnnnnnnnnnnnnnnnnnnncctcgtcgggcgaaaacaagtcattgcctttggacggagaagccatgacttctctgccctacgtagctcccgacgcgcgactccgctggcaacccggcagcggcgactcaaacttttttgctgcggagacgggaggggcgcgctgggagctgagcctttcctccgaggggaagtgggagacgcgcgccgccaatccgcgccgggcctggcgctgacgccagagacgctcgcccctgattggctcttcccgaaggggctgccccccctcctttttttttttttttttttttttcctgttggaaataaattaggagttaattacaggagcagtcagcaaagttgttattaggcgatccctgaagggttataatcacgccgaaactgaaaagcccgagacctaattaagagcgattatttaaagcggaagttcgccgagtcccatttcttctctcttttgacccttctttaaaagggaccctgcgcccatcccactctccctttaccgccagaataagttcaagattcgcaaacagcattgcagaaacatttacgaagcccctactatgcgtcaaaattggcttactttacagttccagaaagtcggtgctgaaactcacaggccagtatccctgtgaaagaaatgtatgcacttagaagagtaactcgccactagccagcgctcaaaagcgcccactgttattattacaactctttcccctggaaaagaggggccggaaggagcccgagaagtggtcaggagtgcctctctcccaaatggttcggagtgaagaatttaaatcagttgtccccatctctctcactagaaagcaaatccagcgcacttttagaaagttgaaatctctgtacttgtctcctgaacctcctttctgagcgcgatccggatccgacctttttctcaagacagtgcaagtgtgcattcatgagtttgtttgagcctgtgtttgtcgtgcgtgtttgaatgccagtgtttgcctcggagggtaatgggggtgggggggaggaggaaaagtcgccaatatctagtgcctccctctcgtttgcaagtctcagaaataccggcttccaagtttgcacaccccaggcctacatatcattttgggaagcacatttttattcatggcacctggttttttataaaaacatagatgtctccaccccaccccaaattataccctcggtaattcctttccaaagcctcagtgatgactgtctcagcctggggaaggggagagcgagcttcgaggattagaggcctcggatctctccgctggtcctcaaaatgcctgacctagaaggttagcttcaaaagacttttttcaggctgcggctgtcttttcctatatctgaacgattatcctgcgactgacgaggtaaataggaagtcacccagttcaggacctcgcctacagcagatgcttgctaaacattccctagagcattggaagggagagacattgtttttaattatttaaatgaccaaggcttggaggctacctcccagttcaggagtattagaaacttgacccctagacctacagacccttatgtaccctt

SEQ ID NO: 720282 - DNA, 580 bp, Homo sapiens
  misc_feature 29: n = A,T,C or G
acaactctatgaggtaggaagtctcatanagcccattttataggtggggaagctgaggcatcaggaaaccaggggcttgtttctcagaaggacagtcccccatagggctccatttctcaaggcagaagtccaggaagggtaggacaaaaactgggtctccacagtttgggtaggcacctcgctttcgggattctctggggacaaccagaaaacacaaaggggcgaggacctggtaggctcctaaatgcttgtgagcaaaaagcctggtcacagcttagagggatgtcgtcctctaaacactgagtcactgagtgaccagctggctgctctggccaggccctgattggggcaggaggaactggagatgaatgggtcagcctcctcgccctgcaggatcctgcagcctcctgcaatagaccaggctggggcaagcggcaggaatcgaaagaagggaagcgatccgagtgggtygggaaacagccaagagtgagatcctgctcagggagtcctggaaacgcacagcttttgaccttggactgtttgttttcaaaataagctcagcttcattatctgttctttc

SEQ ID NO: 720283 - DNA, 1766 bp, Homo sapiens
tttgagtcccttaatctcctcgccctttgaatctttcagagtttctaacagggtggagagagactgccagaggggacagccactgacgcctgggtatatggccttgttttgttaacaaaatacagtgcgtctagtcttgagggctgaatgatgtaaatagtgaaaggatctctctcagctttggagaaagtccctccacagcccccaccctcacctttcctacaggtaggggatggsgtggtgggaaattagggggtagagaaaccataaaagccaagagataaaagtaaaagaggctgtaaaggatgacgtctccaaattgtaaaaggactcagggaccaaaaatggatgctgaagcggagaattctctgcagcctcaattctcaagtggggtgcaggtgcggatctctacctagtctctctggggagaggacgcaaaagtggtcagggcatatcaaacagaggagcagggcgtgggcaacaggtgcccctggccaatcagtggttgttggtaacctgggacaagcaaaggccgtcttctttaaaagcctcagcgtccacgtctgaaaaatagggtagtcacaagtccagtgtctacacttgggggttctagtgaggatctcgatctggtgagctagtgaacatcactctgcaaactctcaagccctgctggaatgcggttaattattactgtgagccaagaagagcccgtgcgcttctggccccagcccgctcccggcgaagctcagaaccttgccggggaggtgctggctgcggagaccacagagagacatttcctccccgcaccagactctgatgccaccatccctggtgccaccatcccttcgtgggatccggcttcgacacccgcgggactcacgaaagaaaatggtttctcctcaatgtctggctaagcccagttagctcatctttaaaatgggggcacaactctcagggttgagttttgaacctgtctcgttcctggtacatccaagtgctcactgaacatggatccaactccttcactccccaggcagagactccggggaacagtgaaacaaaaacaagccaagtggccagagcgcagggccgagggctgtagaaacggaccaccgagcgaccccgtaaacccagctggggttcgctcttgaaaaaacaatctgtatgtcgagggagtctcagacacacacagcgcggttattacccagagggtgtcttggatgcggacggcgcactgggcgcgccgaacgccccgggcacccaggagtccagaggccctgggcttgctttcccgggagtgtagcgcacgcagaagggtctcggtaccctcagccctggaacacccgccccccgctccctccagtaccccgcgctacctcctactcctgccccggcgcgcactcacttggcggcggcgaatatcggccgggttcctgcatccacgccgctccatcttctgaattttccgacttgaccgaggcggtctcgaagggcttcaccagcggcccggggctgtgcgcttcccgagcgccgtgccccgacagcagcagtggccgcagggtggccccggccgaggcgctttcggccggcagcggggacgcctccttgggcggcttcttgtcggacatgagcgcctccacgctgaagggcaggctggagaccttgacgcggcgctcctccgcggccccctcggcgcccccaggccccgggcctggtccggccaccactgctgggccctcctcgtcgggcgaaaacaagtcattgcc

SEQ ID NO: 720284 - DNA, 1766 bp, Homo sapiens
tttgagtcccttaatctcctcgccctttgaatctttcagagtttctaacagggtggagagagactgccagaggggacagccactgacgcctgggtatatggccttgttttgttaacaaaatacagtgcgtctagtcttgagggctgaatgatgtaaatagtgaaaggatctctctcagctttggagaaagtccctccacagcccccaccctcacctttcctacaggtaggggatggcgtggygggaaattagggggtagagaaaccataaaagccaagagataaaagtaaaagaggctgtaaaggatgacgtctccaaattgtaaaaggactcagggaccaaaaatggatgctgaagcggagaattctctgcagcctcaattctcaagtggggtgcaggtgcggatctctacctagtctctctggggagaggacgcaaaagtggtcagggcatatcaaacagaggagcagggcgtgggcaacaggtgcccctggccaatcagtggttgttggtaacctgggacaagcaaaggccgtcttctttaaaagcctcagcgtccacgtctgaaaaatagggtagtcacaagtccagtgtctacacttgggggttctagtgaggatctcgatctggtgagctagtgaacatcactctgcaaactctcaagccctgctggaatgcggttaattattactgtgagccaagaagagcccgtgcgcttctggccccagcccgctcccggcgaagctcagaaccttgccggggaggtgctggctgcggagaccacagagagacatttcctccccgcaccagactctgatgccaccatccctggtgccaccatcccttcgtgggatccggcttcgacacccgcgggactcacgaaagaaaatggtttctcctcaatgtctggctaagcccagttagctcatctttaaaatgggggcacaactctcagggttgagttttgaacctgtctcgttcctggtacatccaagtgctcactgaacatggatccaactccttcactccccaggcagagactccggggaacagtgaaacaaaaacaagccaagtggccagagcgcagggccgagggctgtagaaacggaccaccgagcgaccccgtaaacccagctggggttcgctcttgaaaaaacaatctgtatgtcgagggagtctcagacacacacagcgcggttattacccagagggtgtcttggatgcggacggcgcactgggcgcgccgaacgccccgggcacccaggagtccagaggccctgggcttgctttcccgggagtgtagcgcacgcagaagggtctcggtaccctcagccctggaacacccgccccccgctccctccagtaccccgcgctacctcctactcctgccccggcgcgcactcacttggcggcggcgaatatcggccgggttcctgcatccacgccgctccatcttctgaattttccgacttgaccgaggcggtctcgaagggcttcaccagcggcccggggctgtgcgcttcccgagcgccgtgccccgacagcagcagtggccgcagggtggccccggccgaggcgctttcggccggcagcggggacgcctccttgggcggcttcttgtcggacatgagcgcctccacgctgaagggcaggctggagaccttgacgcggcgctcctccgcggccccctcggcgcccccaggccccgggcctggtccggccaccactgctgggccctcctcgtcgggcgaaaacaagtcattgcc

SEQ ID NO: 720285 - DNA, 961 bp, Homo sapiens
  misc_feature 490, 491, 492, 493, 494, 495, 496, 497, 498, 499, 500, 501,502, 503, 504, 505, 506, 507, 508, 509, 510, 511, 512, 513,514, 515, 516, 517, 518, 519, 520, 521, 522, 523, 524, 525,526, 527, 528, 529, 530, 531, 532, 533, 534, 535, 536: n = A,T,C or G
  misc_feature 537, 538, 539, 540, 541, 542, 543, 544, 545, 546, 547, 548,549, 550, 551, 552, 553, 554, 555, 556, 557, 558, 559, 560,561, 562, 563, 564, 565, 566, 567, 568, 569, 570, 571, 572,573, 574, 575, 576, 577, 578, 579, 580, 581, 582, 583: n = A,T,C or G
  misc_feature 584, 585, 586, 587, 588, 589: n = A,T,C or G
cctaaggaatcccaaagttctctttcttgatttggctttaatgaaggaaaattgctacctttgcaagttggatggcgcccgtcctgattaaccttaagtatacaggactattattttgaaaatgtttgctgtcatgtgaatattagggttacatacaactgggaaggaggtgggggcagggagggtggagaggaggaggccctcactactcttttttccccaaaggaagatgaatcatgggcttacttcagctgtggtcattgcttgaaagatcaagaatgaaagtcccttgaaggccatgaccacgatgcctttagcaagctctgtgggcaaggctgttggctgccagtttctctacctgttgactgcacaggctggaggagtaattgtatggggtggttttatcattatcttgagagtgacctgtggagacgagatcacacaggagttagcacctagtgcaataaagcacttttattgcagtcccmgnnnnnnnnnnnnnnnnnnnnnnnnnnnnnnnnnnnnnnnnnnnnnnnnnnnnnnnnnnnnnnnnnnnnnnnnnnnnnnnnnnnnnnnnnnnnnnnnnnnnacgttgggcaggaggaatgctgagatgccaggggcaccccacatggccctgcccacaaggagcctgaggtctagaacagggacaagctgcaaacaacaactgcagtatgacatgcttgctggacgctgagatttatccctgaggatactggagtttcatgagaattgtataatttatcatttcttttgatgataacaaaaacaatcttttaaatgtcataaaggaaaaaagtcttactttaggaactgtgaggtcatccatgagagggtgacggtctctgcaaggttaggggcaagggagccgggcatcatggagaatttctccacagcagtgaccagcgcttttgagctgggtcaggctgtgtgaattgga

SEQ ID NO: 720286 - DNA, 605 bp, Homo sapiens
tgatcaggttatacatgcatacgcaattacataggcacatatatatgaaagaaggttcatcgaaaacactcccaacagtaagaaaacaaacaattaaaaaacgggtcaaagattttagcaaacaactcagcaaaaagatacaaagatgcctcattaacatataaaaagacgttctatatcatatgtcttcagggaaatgcaaattaaaacaacaatgtgataccackatacacctattagaatggtcaaaatgtggaagactgagaacaccaaatgctgacaaggatatgaagcaacagaagctctcattcactactgataggaatacaaaatagtatagccactttggcagtttcttttctgtttatttgttttttgaataaggatttcactctataacctttgctgaagtgcactagcatgatcacggttcatggaagctttggcctcccaggctcaagagatcctcccacctcagcctcccgggtagctgggactacaagcacggaccatcacacctcgctaattttttttggtatcttttgtagagatgggttttcaccatgttgcccaagatggtcttgaactccctggctcaggcaatc

SEQ ID NO: 720287 - DNA, 1783 bp, Homo sapiens
tttgaagccctattaagtgtgtcaaacatttgaaacatttattaaactatgatgatacattgaccttgttattttgaggcttcaactgaaatgatataggtaaaattcttattctatagtggattctcagtaaatgttaactatttgtatggtaagatgttttggatgaggtagtctataaatagatatttgttgagaatactcggcattaattttcttgggggttttatttcctttatcaaatatatattatttactaagcagataccaaaacatttagtgtccctgttttgagggaaattgcaatatgattttgaagactagatgcaaatgataagtgaagaagataactaactaaattttagttaagcttcaaaaatataaaagtcaattatgagcttttcccataattatatatcacatttacttgytttctttcagataaacttttattttcagtaagttaaaatttatatgataaaactgataggcagatagattataaaagtcattttcgtaagcagatagctcattcattttaaaatagttttctatttaaatatttatcaaaattttattactaaagggctttaatttgatagagtcatttagtttttttccaattctttagagtaatatcttaataccttctcctctattcctgctaatgagtgctaaaattctcaaaattaaaaacaaattggtgaaaaataagcctcctaaaatagaatgaattcattagaatacccaattctgagctttaagcctcaattgtatttgaactttcttttcagcattttccttgccattttctgcctatgattgcttttattaacattctctttagtaattatgacaatttgagaggcaaagactctcaaaaacatgcattggtgttgcattggcgcctagtcataggaatagtgagagaatggaaaataaatgtaaattatgatatatgtttctcaagaacttcatagtccttgattttgtaatcaatttgataaggaatatatatatgttcaaataacttcattaagagtatgaaaattattaaaacatttaatgactatgagtgctaaaggcatggagaataaagaaaacacttggataaaataaattaagcaaaaatttctagagaaggacagcttttgttatgattttaatggcaacagtggtgcagattggtagaaagaaatatctgaatagggttagatggacttgagcagtaaagaaatgaaggcagggatagcaaaaacacttttctagaaaggtcatagaaacagcaaatgaatgtattcaattatgggccaatatcctgaatttggacccagttgcttaaatgcataattccagcagtcctcaattttgtttcattgatttatgttttccccatctccactagaagcttggccaatttgatgtcaatggaaatgcgtgagatttttattcagcattcacacctgagcaatgcttttggtatgtcttaggctaatagccaatgttcagtcttagaattgtgataaaacttaatattattgcttgttccttagcatatatatttgagaaccttggcagctgctgctaatttaatggtaaagtgctgattgctgattttctcaaagcttttttttaaaccatacctagtcagactacctaaccaagtacctaatttaacaataatatatttacattttgctggataacaccagtggtaaaagtattgtttaagcccaaggaacctgacaagcattcagttggtcacagtttttgatggatttgt

SEQ ID NO: 720288 - DNA, 643 bp, Homo sapiens
atatgaacaagcatgctggtgcaatatgagctgatcattttctaaactgggcttactgaattcaacttgttaagctaaatattgtctttgaaagtatgctatatcaaagcacaaccaattttttattttactctttcctgaaatttattaaataactaaatgattgcttgcaacttccttttaaaatatattactgaatgttaaaactgatcttgaggttctggaggctctctactgggagttatatattcatcattgaacttaatatacataaacacttcagaggagagctaatattacacccataataaagagagaaaagttaccatcagagagtggaataaattgtttaaaatcacacatcaaagatgtggtggagactaaatttgatcctatgactttctggctccaagcctgtgctatttagattatactattaagtgtcttaaatccgtttttaaaagggttaactttgatatagctcacacaatacccattttttwaaattcagttgccttctgtcaggcaccattgagagcaatgaggaaagagaaatggacaacacaaccatcattgtggccttattggttttatagtttagtggcaaaatacagccactaatcaaatatgatcagaaattata

SEQ ID NO: 720289 - DNA, 623 bp, Homo sapiens
tgttacttcagtggtatcagcacttcaagacagagcttaaaatgaaatttactaatattttagaaagctcatttttaatgaataataaaagttaattatctttttgagctaasatgtgatttttaaaatcattttgactactgggtgtataaatgtgtttgtgtgtgtatgtatttatagatgttctttaaggtacccttgaaaactctacattatgtatgccacataatgacatttcagtcagtggtagactacatatatgatagtggtcccataagattataatggagctgaaaaatttctatcgcctagtgatgtcatagcctagtgatgacatatgtattgcaatacatcactcacgtgtttgtggtgatactggtgtaaacaaatctattgcactgccagtcaagtaaaagtacagcaattatgtcctgtacataatatttaataatgacaataaatgactatgttactggtttatgtatttactatactatactttttacaatttgtattagttcttgcattgctatgaataaatgcctgagattgagtaatttataaagaagagaggtttaattggctcacagttcaacagactgtacgggaagcatgaaaacttc

SEQ ID NO: 720290 - DNA, 576 bp, Homo sapiens
agtcacccccatctgactcttaaagttacaaatactgaacttttgaatggagaataaaagtctcaaaaaggagtagtaaatgtttctagagccaaagagaacaaaggaaagggttttctatatatcaaatttgcatttgaaaaatgggtcattaggagcatccctcttgtcatgattgcatccaaaactcatatagtatctcctctggaagacgctcgcctgctaaaagagaaagctaaatatgtaaaagccagaaacacaagatgccaaatgtaaatctacagttttagcagttgggcaygaatgacaggaaggatgaatatcccctgaaaaatatctttaactgtcgctgctgggataatacattcaactaactgtaaaaatgtgcctcttaaagaaatggctttataaaattattctctaggaagtgtgaaacttcatacacttattccattggaggagaatttaaaaccactcatacattactagcatacagctgatgagagagatgaaggttccttatcagtaacaacagatatactgctatagtcaagatgctttcacaatggcaataga

SEQ ID NO: 720291 - DNA, 616 bp, Homo sapiens
tgttgaaacatcttctagtgttgtttcttccttgaatattttatttggcttwgtgctcttgttttaaagaggtgattatttcattaatttcttaggttgtggtcaaatatttggtcacaattttcatttgctccatggcagtatgtttctgatgtatgttgttttttgccctgtcctgttcctcatatttcttgctcttctttgcagctgttgtcaggagaatcaaatggtgggtcccagctgatgggttcatagtgaacttgcttatacagcagtgtgtgtgtgtgtgtgtgtgtgtgtgcatgagtgcatgtgtgtgtgtgtgtgtgcatgagtgcatgtgcgtgtgtgtgcgtgtgtgtaatttgttaagctaatagagactggcagctgcagagatgctcataattcagtctttcctgtatccaccttcaaccacagaactcttcctgcaagataatgtgtctctttattcctgtctttgtcttcagcctatttcccatgccaaacagaacccagggaatctcctatagccagcctataagctgatcccactgttccagggacagagtgttgattctgctttcagagatatgccaccagcattagatctctg

SEQ ID NO: 720292 - DNA, 574 bp, Homo sapiens
ttctagaagtcgtttaagaaaataaaaacctaatgttcttcttttcctccttcttactgtctgggatatggacaagattgctagagacagggggacatcttggatcataaagtggcatggcagagttctagatagaaggaaactggagactcaccatgaggagtgtcataccagctctggattgtctgcttctgaacttccrggaaagagagaaataaacttctgtctagttaatttaaatatgcttttgagtgatgtgttatttgcagctgaacttactcttaattattatattggaatcaaacttttagcctttatcagtctccttcctaggtccttctgtgaagggcacaattattatgtaccagggaatctaatgggaaaattaaatatctttatttcttccaggcttaccacgaaggcaagtagatcttttgtcttggaaattgagggtctcctttggattggaaaaggttgtgttttcaaaagccaaaacaggtcctaggtttcaatgcctattccagctgtataggtagagtcagtgaggctggttgagtggggattgtggtgaaca

SEQ ID NO: 720293 - DNA, 602 bp, Homo sapiens
aggctgtctcttactcaagaccagctgcttacccaccaatcaccgctcccctcccccgatgtccagccacctcctgagcacagaaggcccagattcctcctacaccacccaattcaagctgggaaaattctgccccaaaaagccccagccccaccactgccacatcactccctcagggtcctcaaatgactcagaggctggaaggccagatttaagttgagaatcctcagactcttgtgtacaagtgtggacaaccagacaccccagscaacatgtccaagctctgtctaacccctccagatggccactccttggccactttatggcatagtgggaagaggctggaaagaggtctcacaaaccttggatgtgggcttgggccatttggacagggaattcaggggccctaaggaagtgatctagaagaggggacctgggctctgggggcacatcccctaggccccatactctcctcactctgtagagaagggtgtgactacagcagggcccaggacaggggccacccatgcccaaatctaaggagtgctgcatagaactttctaaaatgatttttagtccctcaattcccagttgccactgcc

SEQ ID NO: 720294 - DNA, 611 bp, Homo sapiens
taatgcaaaaaatgaaattgttcaaagagagttatttgatggtaattcagacccctcatccaaccagtcaaactgcttctgtaattctatgagttaggacaaaaacacaaaaacaaggttgctcgacttagtggtcaatgtagacctcatttcactggataattagcttgactcactcagtgtttcacctgcttgtgagaccagtttacagacaggcraatgcaactgggatggtgtccccaggctgagtttacagccatggaaattaaagaaaacagtgtaaatcccttcccccaccttcccagcttcctgccaaaatatggcccatcaaaatcactgtgctcattcactattgctttgtctgcaatgatgtgactttgaatgcttactcatgatactcaccttgatatcagggttgtttttaatgtaataatagtgatagtctctgccactgatggagttcttgctgtttcccaggcagcatggtatggcctttaggcattcatacaactcacatgtattaaatgtcgaccaagtgacagaactgttctaggtttgggagcacaatctgaatgaaacaaagtccatgctgtcatggaactttctctcca

SEQ ID NO: 720295 - DNA, 611 bp, Homo sapiens
taatgcaaaaaatgaaattgttcaaagagagttatttgatggtaattcagacccctcatccaaccagtcaaactgcttctgtaattctatgagttaggacaaaaacacaaaaacaaggttgctcgacttagtggtcaatgtagacctcatttcactggataattagcttgactcactcagtgtttcacctgcttgtgagaccagtttacagacaggcaaatgcaactgggatggtgtccccaggctgagtytacagccatggaaattaaagaaaacagtgtaaatcccttcccccaccttcccagcttcctgccaaaatatggcccatcaaaatcactgtgctcattcactattgctttgtctgcaatgatgtgactttgaatgcttactcatgatactcaccttgatatcagggttgtttttaatgtaataatagtgatagtctctgccactgatggagttcttgctgtttcccaggcagcatggtatggcctttaggcattcatacaactcacatgtattaaatgtcgaccaagtgacagaactgttctaggtttgggagcacaatctgaatgaaacaaagtccatgctgtcatggaactttctctcca

SEQ ID NO: 720296 - DNA, 611 bp, Homo sapiens
taatgcaaaaaatgaaattgttcaaagagagttatttgatggtaattcagacccctcatccaaccagtcaaactgcttctgtaattctatgagttaggacaaaaacacaaaaacaaggttgctcgacttagtggtcaatgtagacctcatttcactggataattagcttgactcactcagtgtttcacctgcttgtgagaccagtttacagacaggcaaatgcaactgggatggtgtccccaggctgagtttacagccatggaaattaaagaaaacagygtaaatcccttcccccaccttcccagcttcctgccaaaatatggcccatcaaaatcactgtgctcattcactattgctttgtctgcaatgatgtgactttgaatgcttactcatgatactcaccttgatatcagggttgtttttaatgtaataatagtgatagtctctgccactgatggagttcttgctgtttcccaggcagcatggtatggcctttaggcattcatacaactcacatgtattaaatgtcgaccaagtgacagaactgttctaggtttgggagcacaatctgaatgaaacaaagtccatgctgtcatggaactttctctcca

SEQ ID NO: 720297 - DNA, 971 bp, Homo sapiens
tggctttattagcttttctattgtgcttgctgcttctgtcctgtaggagcagattctggcaatattacctgattaagcacayactttttttttgttttctgtatgttcaaaggaggtgaaaaaaattgagaaaattgtggatggttctgagctagaagctgtcatgccatataatgtgagattagttttctgccttcagtttttattttaagagcacaaacgatcaactttccactctgtgtttttggatggagatactgaaaattctttgaggaatgagtagaggttaaatgatctctaggtaattacataagaagtaaaatggaaacactgcactttggggaagtggagggcagagaacacaaagccacacaaacagacaaaaatttcacaaaccgaaaataaacccctgtggtttctagagtaaaatctcatgttaattaaaattttggcattacatattttaaaatgtaacttggtatttactttttgtataaataattaacctaatgcaccaactgatggagggaagcaacatgagcagattgccagaagtggcttttactttcctgttcccacttgagaaacttatgctctctcctggtctcaggcattgttttcatagcagagcctctgaggccctccagggagatgtgtagcctcccctggagggcctctgagtctatctggaacttgtgataaaggttctgtgagcgaaggcatacctgtcacccccagacaccacatgccacttgaggatggcaccatgttttttcatcccagaatccccccagactagcagggcatttcccctaacagcagtttccatacccacaagctagtccaaggcaccctacaggaagtatctttgggtctcagggttggttggagcagcagatttcctagcaataacagccataactttttgggaatgtctcttccaggaatgggttagacaaggctggttattc

SEQ ID NO: 720298 - DNA, 684 bp, Homo sapiens
tttcagggagtagaaaaggatgggtgtaagtgtaaaggagtagcacaagatatgttttggtgatggaatagctctgtatctgatcatatctaagcattccaaacaattttctacatatgtgataaaagtacatagaaccacacacacacacacacacaaacacacacacacacacacacacacacacacatccatacaagtaccaatgccaatttcctggttttcatgttgtactacagtgatataatgtgccactgttaagggaaattgtaagagtttgtttgcaagacttatctgtcctacagagacaacttactatgaatctataattttaaaaatgagaaaattgttctcacaaaaaatcaagtttcctccaattctttaagtaaaagaaaattttgaaatttctgaaattgcctaagatttatgaaataattttttctackcaagggtaaatataaaatgggtgaccatttttctgcttcataatatgttgtaacttactaccctctagtcagaatttgagattattaattaagaacctacttcctatatttatgtttaaattaagaagtaaacaccgagactattatgcttatttaaccttatacatttagtataaaagtcaaagtgtaagccttaaatacaaattccacaaaagaagtttcctggaaaaagttagta

SEQ ID NO: 720299 - DNA, 963 bp, Homo sapiens
ggaagaattttctcttaccaaagggaggatcagcctttttgttccattcagaccttcaaaaggttagatgaagccctgccacattagggaaggcaatcctgctttacgacctaccgagttgttaatctcatccaaaaacaccctcacagaaatatcaagaataatgtttgaccaagtacctaggcacgctgtggcccagccaagttgacacataaaagtaaccatcacaatctgagtctcactgtcctttttgtaaaagggggataataagcatatttcatcaagggattgctgtcaggagcaaatgaggtcatacattccagattcccggtgttcagtaaaggctagttttcctgaagccccgttatactcataatccatcctaggtcaagtctacaccctamacaaaaatgttaataagtcctctctacaattgaagcagtcctgctccagtgaacttcttcacatcattcacatattgtgtagcaaggagagaagaataaattttacacttaggaagagtcctgtttcacaaactaatgcacgtgtgtccatcaccatttccttcctggtcttagtgttccttgcaaggtaaggcaaatcagatggccaaagtagtcacagtttctccagcctaaagcagattgtgagcagcccaactgctcttccttgccttcacttcttttgtaaatcagattgctcaggcaggaaagatgagatggcgtttcacctggtcagcactgggggagtgcagccagacatcacttcaaaatcactctgtgttttcttcctcaatattccattcaggccttctgtttgtgtgattactgcattttcctttcaagtcacaccttaactcccatcccatgtttctttccactgttacaattttcagattatagtaatttctttccagtgtgtttaatcttgagtaaatcaatatggctatactattttccatca

SEQ ID NO: 720300 - DNA, 980 bp, Homo sapiens
tgataataaaactgcatatactctctggagtgagaatatatgcaatttatgaggcaatgcaacaaaaatgggcatttactgggtttcgtctcaagttctttatcactagaaatctaataagcttgtttagctcaaaaatttaaacaaagtgacataaatctttagggggctcatataaaaatatctgggcagcccaaagtgtgttatataaaagtatatttaatattctaattttatactttgaacgaatgcctaattctttgtagacaatctatggaaaataaagctaaacatttcttgggctgttgaagttttaccatgcaaagctatcttttcctccagtatgtcatccataaaactgcctgacttcccttcactgctaagtatagggctgctcagtggtgctgtattgccctgtccctcttcctctttctgagttctgcccctcatggtcagtacattctctgtactctgatcagtacctgcgctcaacagatatgggaaaaggtcttaattcttcttttggttaggaaagccaatccttgtcagggtccaaaatgaaagtaaatcccgacttggacagcaacatgacagttactragaatatgacttcccagggcattattgtttgatcatgcacgtctaagatcatgtgggctacatatcaaccaagcagaaatgtcagcactttctaaagaagagaaagctgagcttcaggtaactagctttggatgtttcctcctcagatgctcatctgaatcatcggtatccaagggcagggattagtagcattaggatagccgtcagctttttccaactttgtcctgctcagctggtttagagcaacccagacactctaagatgggaagaagggaacccacttaggtagaaatatctttgttcaatgacagggattatttgaggaagggtaggtaggtaaaagagttgaatttgctctcatgtccacatagttaaaatcc

SEQ ID NO: 720301 - DNA, 3746 bp, Homo sapiens
caagattttatcccttgttcagttctgcttttatcttttcttggctttaccatgcagtgttatggccaccagcagttcctagaatccagtcttacatattttcagctgctatagagcttctcttgcccactggctccaataaaagtcccaggattgagtatcattgttaagccatgaaccactgtggtcaggggtatggaatgtactgctcaatgcttcctcctgaagtcccagaaatagactgagaccattgccactgaaactgaagagggcaagagaaagaggagtggtaccctaaagaaaaataacgatcctggccgggcgtggtggcttacgcctgtaatctcagtagctcatgcctgtaatcccagcactttgggaggccaaggtgggcggatcacaaggtcaggagatcgagaccatcctggccaacatggtgagacccccatctctactcaaaatacgaaaacattagctgggtgtagtggcatgtgcctgtaatcccagctacttgggaggctgaggcaggagaatcgcttgaacccagaaagtgaaggttgtagtgagtggagatcacgccactgcactccagcctggcaacagaatgagactccgtctcaaaaaaaaaaaaaaaagaaaaataatggtcctctgaccataagcagtggcattggatgctgagcatgaaaaacagcagatgtcactctttcatatttgatatcagatttcttttaaggataaagcatatagtcacactgtaatttgtgtgattacatgaaagaaaaacatacttatgtaagtaagcaattctaagtgcattttatatatgtctatatatgagactagctgttggaaatattagtgaaaaatgaagataaaagttgttttaaatgaagtttttatataaattgtcacatctttaggaggcatatatcttgtttagttttacgagtatattcagaagctgaattaatataacagtaaaggattacatgtttaaatttgctttatattaatgatataygtatacagaagaaatctacagtcaaatgaaatctatactctaagtactaatcataaaatatatatgtactggacaatttccttctacagctattcttttaaaaaatatattaattttatagaaaaggagagggagtttttaaatctgacaacatttctactatctccatcctaaaagatgtgctttctaaagaagctacaaaaaggaaaattaacctcaacatatcatacggtaaacaaacaaaattaataattctttctgatgtttattttgtgttgttgttacattattaatgtttctgatcaaagtgatttatctaactgcatctggtcaactccttctagagataaatgaagtatcagtcaaacacactttaaagctaatccacccaaagctggagtaccagttgcttttggctaagaaagtgcagttaattgatgctttaaaagtaagtacatgtgtcgtcgtggactggtgattattatttgaagtcataggatttctaaaattatcaatactttaacattacattggattgaattttgaatattaaggtgcttctgtttttaattttaaataggaattacagattcatgagggaaatacgaactttctgataccagaatatcactgtattctagaagaggcagatcacctacaggaagaatacaaaaagcaacctgcacatcttgaaagactctatggttagtggaccattctagaataccttgccatatttcttttcaactggctatttcccaaggatcatgtaagagaagctgggcagaaagataaaaagattacatcagtcatgattcatgaaccagtcatgaatcagttgacaacaaatttattgcacagaatatttctgtattttgtcaagctacttttaatatttaattcttttacttgataaaatgcaagtatattaagaaataagtatactgtgatgaattaatctatatatatgaacaaacctggtataaaatgaatgtaatctatgaacctttagagcttagactgtatttcacacaaataattgtcatgttttgttgctattgtgaattataaaaatgcagcatttaaaatttttaaggcaaaatttaataaaggatatacagtatttgtgttgtgtcaatttatagttcaaaactttggtggtgagaagctgaatgtttcacaaattgtattgaaacagagtaagggaggtgaggagagggaaagaaggagtgaggaaggaagaaacagcttaagaaaaacaattttgttagcaatctttacataagacctgttgtatatagcacactatttacactgtcttcataatcaggtgagatatttaatccttacaatagctctgcaaggtaggtggtattatcttcatttttcatatgctttaactgaaatctgagtctaaggaatttgttgtcacctagcaagttagtgatcatgcctgcattagaatcttctcaccccaaaatgcatgccttttacactatgccaagccttccatagtcactgtagagccaattggtatcactagtacacatggatccttaagcctgcctactgaattttttattacatatccagagactttctcacaaactgtagctatatttaatgtcttaacctttattacatgacaagcacatgatctcttttatccttataataacttatgagattggctgtacataatatcactgattgcaaaatccagacagctttgtaaaccaaagtttttttcataaataatttgacagcaaaatcttgacttaatctgaattaatttaataacaaaatctgacttaaactgacatgaggttttatatatattttttgtttgtttgtttgtttgttttttgagacagagtctcgcttggtctcccaggctggagtcagtggcgcgatctcggcttactgcagcctctgccccctgggttcaagcaattctcctgcctcagcctcctgagtagctgcgattacaggtgtgcgccaccatgcccagctaatttttttgtacttttagtagagacagggtttcaccatattggccaggctggtctccaacccctgacttcgtgatctgcccacctcagcctcccaaagtgctgggattacaggcatgagccaccgtgcccagcccaaggttatatcttttttattccacttagtgcaaatattcatccgtatattttgtgccagaaatagtactatgttttgctattggatgctgctactcagtccccttggggttaataccatagtatattcctttcattatcttcctaaaataggaaaaattctgaaatacatcttgcatcaagctttttggataaaagattgacagcttgaattattcctgttttacatatgagaaaactcaaggtgaaatgatttgcccagatctttgaacctaggactatttgccttcaagtcaaatcccaagaatggtcaacatataggtggaatattttaattcagataagctgttaaaaatagaatctgcctagactatgtcaaaatggtcagcttggtggaaaaaatataccacttgttgtgatgttatatatactgatagcagttcaaaaatggccagtagttgattgtctgaattaatagcttgtaatcaattgttaagagggttattaggcagatgatttatatcttgaaacttgttttaaaatccccccaaaatgactatttttaaaaacatggc

SEQ ID NO: 720302 - DNA, 3027 bp, Homo sapiens
tgatagttataaaacagacaatattcagaaaaagtagaagggaaacagaagcaagtggagataaaacctgaaactagtaaaagagagaaaagacaatacaatagattaatagataaatctcggaactagttcttttgaaaaatataattaatacatgatgaattatttaatcaagataaaatattggagggagtggagaaagtacagaggcacaaaataagaaataggaaggagaatttaagtacagattgcaaaatgtaattttgctcaatccaaattaattgaaaacctgcatgaaatggatgattttctagaaagaggacaaattattttatacttctggaatttggagaatttttctcagcaagaaataaacctcaaaagatgaaaaaaataaatattgatatacttatctataagattttggcaataggaaaataagataaagaaatttgaaagactaataaccaattgaagtaaaaatccttgctgacaatagcaaaaacaaaaacaaataaacaaaaaagctactttctttaatagatgaaaaactcatacaatcaatgagaaaaagaatatcaatctaatagaaaaattgacaaagaacacaaactagtagtacacagtacacacagaataaatggttagaaaaaataaagtcaatgtcattatgaaataaatacatgccatccattttttatctatcagattgacaaaaaattacttgagagattatatctggagacagtttgggaaacaaactttagtgaaatatgcatgtaaattctcatccttcattacaatttgcaatatttaccaaaattgaagacacatagcctttaacccaagcaatgctccttctaatgagctaactgatcttcaaagatactgacacatttgagcacaattacatgtactaagtagttcatggtagcagtgatttatggaaaatgcaaattggtttgtctaattcttctacatttgttgaaaaatatatctacaaacacatatatggttgtataaacataatatttctggaaggacacagaaaaattggcagtactaggtgcctctacagagagagtttgagggggactcactgggggaaacaagattgaatttttactatcatccttttggttctaaatgttttctattggcaaacgttgtttttacataacaatcaattaaaatgacaaaaccaaaatgaatgagaatgtgaaatgcacaagcatattttacaatgaaatcctgtgaagtgtttagcactattgactaatggttccttaaaacattagctaagagtttgtttttcagcacctattcctgtgtctaccagctctatcaatagaactccaattaaactcctcttaagctaatttagagagtcaaataccttgagtgttttaaaagagaaacttgatcattgttcatttacttttattacttagggtttattttacttgagtcatttattattcctgtgcaatgcactaggactgaaaagtcattctattttaagtcacattcaattcatgtggtcatgtttgttaacacaaatgaaattttaggtctgttagaatctaacatgggtataatttatgaaaataatttagttcacataaaattttctaaagagggacaattggggcttgaatacttggctttacctatttgagtacaaatgatggttatatccctgtgccagattaataatttgaatatatttgagttctaagtacactctgaattggtcttaggcaaaattgtgaagtatggagcttgtcctcatcacattcttatttgagtttcacattgtcacttatgcatttagtgaatcttatcaaactgccctattcttccaaattctatcctcccatgaaaccaaactatcagaaaattgctcatttttatcttattctagtaataagatctaacatttattgaacactttaatacatgccaaggactgcactaggcactttatccacataactttatttaatcccaaccaatttttcactgctgaggggagtatacattggtatggtcattttggaagcttatattaaaataagaatgtttagtttatgttgcatcaattcttttctttaactctagaaaaaatgcttacatttgcatattaagatatcttcaaggaarttcatttcaatatagtttactatagttaaaaataaaaaacagaataggttctttttaatttgaatgtccacaggaagcaatgtggggatgaaaatattataggacagcttaaaaaataatattaccctgtatgtactaacctgaatataattccagaaaatatgatgaataataaaacaagtaaaagaacattatgtacagtataatagtatctatctgaacacatgtaagacaaaatgatctataaaattagttataattgcatagcaaagttctgaaataatatattttaaaaaatcaataaaagtagtatcactgagattataaatacaactggggatggtgatcacagggaatttttatctatgatgcttgaatttttacaaaaataatatatttacatattttaaattaaaaaaattgtttgagagctgctttccctgacttatgaaagagtcataaaagaaagactattttctttcaaatattattgctgaagatacataatttcccccttttgtctttgttgcttgagactctactggtaaatttagtgcacagttacattttatttgcaggaggaagtggcccagggtataaagaggaaggagcaactctaaagccagtttcttttttacctctgggattatttaatctagatagcaaaactgacaataaggtatgtttattattcattttacagatcaatcaactgaagttatataatttgcccaagattccattgcttattagtgtgaatacataacaacgaaacgtgggtgtacaataaagcttctagcctgtggatcatgcttattcttcagcagaattcatggaaattagacaaacctgctacttttctct

SEQ ID NO: 720303 - DNA, 605 bp, Homo sapiens
ccagtcctattggattaggaccccactcttacaatctcatataaatttaactatctcctaaaagccctgtctccaaacatggtcacattgggagttagagcttccacatacatattttgtgggaagacaatttggtccataacgtctgtctaactcaaactgctatcaagatagaaaacatgatcatcatcctagaaagttgccttttctcacccgcagagatggtcactgttctaattttttgcaccataggttggttttaactgttctagaactccacatgaatggaatcatgcagtaggtactcttttatataaagcttcttttactcaatatgttttcaagactcatctgtgttgcacataccagtagtttgttccttttttattcctgaggagtatccccttgtatgcatatrccacattttgttgatctgttctcttattaatggacatatgggtcatttccagcttggggttattgtgaatatggtttccataaacattcttgtatgagtcttttagtagacgtgtttttatttctcctggataaatacatagaagtggaattgctgggccttaaagcaggtatagggtattattatc

SEQ ID NO: 720304 - DNA, 449 bp, Homo sapiens
taatccaacaattacacttttaggaatttattctccaaatagtctcacacatggaaatgacatcattcaggtaccattgttctctctttctttatttattttcagacaagggtcaaagcatgattttttaaattttacttttagtaaagacaaggtctcactgtgttgcgcaggctgatctcgaacgcctgggctcaagcaattcctcagcctcccacagtgctgggagtataggcatgaaccaccgcgcccagcccacatactgctgtttttaataacaagaagaaacaacctaaatacccaacagtaggagacttggttaaataaattatagtaagtccacacagtggastactatgcagcagtaaaaaaaaaaagtgaggaagctttttacatagtgaatcaataaccctctatatactttctcttttttttttttttttttttga

SEQ ID NO: 720305 - DNA, 1876 bp, Homo sapiens
tcaaaactagaaaattgttaatatctgttaattctgagaagttggtacacaggtgattttttttttttttttttgagacagattcactctgtcacccaggctggagctcagtggtgcaatcttggctcatcacaacctctgcctcccaaattcgagctatcatgtgagccaattctcatgccttggcctcccaagtacctgggattacaggtgtgtaccaccatgcccagctcctttttttgttttttagtagagatggggtttctccatgttggccaggcaggtcttgaacttctggcctcgagtgatccacccgcctcagcctcccaaagtgctgggattacaggtgtgagccactgaacctggctcatgggtgattttaaattctctataattttagaactttactaaaaggatattagggaactaatagtaccttcatatctcagacagaacttctcatagtgttctatccatgttctcttatgagagcatgtcctactattttaatgtctaatgattcagcttcacaattcttgagaattttgaatttttatccatatttatattcttatctcaatattaaatatattttaattgtatactttttccctcaaaacctaggtaaaattaacattccaggaagatatgctttgattatcctatagcttcatatatccccatcatactacagggcatctcagggcagagaggttggagatgcttattctagtttggggagcagaactatagagtcactgtagattttcctttagaagaaaacaacatacagaagagaaatcctctgaatttaacctcacccttcccctttacaatagttaattttatgtggcaacttggctgaccagaggagccagatatttggtcaaacattattctagatgtttctgtgatggtattttttagatgagattaacatttaagtcagtagactatgagtaaagatgattaccctccataatgtgagtaggcctcattccaccacaggtgaaaaccttaataggaaaaaggctgactgtgcccaaggaagagggaattctacagaagagtccctttggactcaagctattatcttaactcttcactggactctagcttgctggactacactgcagcttttgctatacttgctatactccacaatcatgtgagccaattctttaaaataagtacttccctctccagtaggtaaacagacagasacacacacacacacacacacacacacacacacacacacacacgctattggttctgtttttcttaagaaccccagttaatgtactcttgcaccaaaaccagtactattttcttcaaggacactattaaatgaatcaaaacatatctcaaaccaactatcactaaaataggtatatgcttttccctaaaagactgggtcttttaaaaatctaactgtaagtattatttattaaacataatacatgacagaacacattagcataccactaatatatataaataaatctagaatgaatcaataaatatacaaaaggttaagatgttagaaacttaattttttgaaaagttatgctaaatatggacctaaacgtattctaaacaacagaaattttagatagtaaaaactgttcgattaaaaaaaaatcttaccttttagttttcatctggtccctcagtttgctgtacatctctaggacttaaaagaaagaaaagaatacacaaacatgatttagagaaagcctaattaaagcaaaaaaaaaattacaccaagaatccttctccatttccagttcctcacctggaagacacagcattaatttatcaacagtggcagaaatatttctctgttgtagtcgacactgcttcagctcttcca

SEQ ID NO: 720306 - DNA, 825 bp, Homo sapiens
gattttccttattgttttcagatttcaatgttaacaaatagtttttttttaaagctatattttcagtgatggctttaatgtcagtgagaaaccaaaccctatattggttctcataagcaatctaaaccgtagaaatttatgagacttaaatgcatctttttattttattcttagaaatttgattttggtcttgaagtggcaggtccaaaatacaaaaacaaagattagaaaaaagaaattaaaaaaaagaaatttaattttgggytcttggcctttctatagtctcttcaaataatttcatgagcctggtgattgtgtttctcagttacgtggttaagctatacattgagttcagtattttgtcatcttcctctgtgctgatacttacttcttgatatgaacaattgagtttactggtggctgtagtttcttttcagcaaccctcgacccctgccacgtgtgcagaatgtagtgaagccaagtttgaggtttggatctagagccctccaacaatccctgcgatgtgccctccaacctgggggatagatcttcctggccctggagaaacccagttgagaattcataggattgttgtgctctcagcaagtgctttagtcttgtcctctggcagatgttttctttactgggcgtgaaaaccccatcaaaataatgctaagggaactgaaatatagagaaatacaaataagcaaagaagaagaaatattcaaaatgttcaggatggccaaagcaatagacttaaggatgatctagaagagagagaaatctagctgacttgtgttttctcacatccttctacatcttgag

SEQ ID NO: 720307 - DNA, 591 bp, Homo sapiens
taggtcagtgaagcmatttttaaaagcacggcatcaagacaattgtccaggagcgttattattagtagtgacgcagtgttcagaggaaagtcaaatttctttgcttttaaaggttttaagatgacctttaaacaaggagccagctgggttcttagttcacagtagtttagcacactttaattcagaggctttgaaagcagggagaaatatttggtggcatggttcccagaaatagccggggtggagaaactggagctcccatggggagtggggttagggggtcaggaagctggtccaaatctcctctgtcaccagcttctcatctccagactcaggaaatcctttccaccctggggccgttcccacactgacgtcccacttcctcctgcaagggcagtgccctcctctggcctctggatcttgagttgggggtggggaagaagatgaaggagagtctgtgtgtagcagtggccctgcctatggggaaagcaggaggaggggtgtgtatgtgtgttggggagaacactctcattttctgatcttctgttgttttaggccctgggctgagtacttcatatattttatattata

SEQ ID NO: 720308 - DNA, 591 bp, Homo sapiens
taggtcagtgaagccatttttaaaagcacrgcatcaagacaattgtccaggagcgttattattagtagtgacgcagtgttcagaggaaagtcaaatttctttgcttttaaaggttttaagatgacctttaaacaaggagccagctgggttcttagttcacagtagtttagcacactttaattcagaggctttgaaagcagggagaaatatttggtggcatggttcccagaaatagccggggtggagaaactggagctcccatggggagtggggttagggggtcaggaagctggtccaaatctcctctgtcaccagcttctcatctccagactcaggaaatcctttccaccctggggccgttcccacactgacgtcccacttcctcctgcaagggcagtgccctcctctggcctctggatcttgagttgggggtggggaagaagatgaaggagagtctgtgtgtagcagtggccctgcctatggggaaagcaggaggaggggtgtgtatgtgtgttggggagaacactctcattttctgatcttctgttgttttaggccctgggctgagtacttcatatattttatattata

SEQ ID NO: 720309 - DNA, 608 bp, Homo sapiens
attctcctgcctcagcctcccaagtagctgggattacaggtgcctgccaccaagcctggctaattttttttttttttttttttttttagtagagatggggtttcaccatgttggttagggtggtctcgaactcctgacctcaggtgatctgccctcctcggcttcccaaagtgctgggatgagaggtgtgagccaccatgcctggcctgctatttttatttcatataaataattttaggctaaatatgcccattttctacaatttttatttttattcatttattatgagaaagggactggttctgttgcccagggtggactgcagtggtgcagtcttggctcactgcagcctccctctccaaggctcaagccatcctcccacctcagcctcttaagtagtttggaccataggcgcaggctaccatgcccagttaatttttctattttttgtagagacagggatttgccatkttgcccaggctggtctcaaactcctgagctcaagcaatctgccagcttcagactcccaaagtgctggggttacaggcatgagccactgtgcctggcctcattttctgcaatttttaaattcaacattaacagtttca

SEQ ID NO: 720310 - DNA, 635 bp, Homo sapiens
aaattcttgtgctttgccaattcttgtgctgcctggagagggcagggctaaatttatcctttgaacattaagagattgaattaagacatgtgtctggaagggccttatgtgcctgggagaacacataagcactaaatctgcatttacaggagatgtgaagtgaaagaagggggacgggaacaaaccttagccaacctcactactgaagatctgtttggggttacagtgaacctaagggtaaaaatggtatctggggacttaagactatgagttaagcactgtcccactgtcgttcataatgtagaaaatggttgcattgctctttttctcatgcacccaaaatatgaagaagccaaacagaaactgatgcaaattgattttgcttgtgtcttagtctgttctgtgctgctataaaagaatattacagactgggtaatttataaaagaatataaatttatttctcacagttcttgaggctgagaagtccaaaatcaaggtaccaacatctgatgagctgctccttgctttcacaatggcgacttgaatgccatgttctcytgtggggaatgctgtgtcctcacacggcagaagatggaagggtaagaagagggatcggctccctctgtcaaggcct

SEQ ID NO: 720311 - DNA, 631 bp, Homo sapiens
taaggtttcagatttctcaatctatgaggagtgacttctttcttatctgatccttttgccctccacagagactttggtgatctctacctcagcagcagatgaaccaaagcacagctcctgaaattcctgaaattatattctgacaattccctcttcctcccccaggcaaaacagggatctttgcaggagagaagggcaataatttccttgtttgggagcttagaggtatctctccatcaccaaatacttaggttgggcaattttagaaaaaagttgctcattctrgagtccctatgcttccaggaagcaaggcaacatcaatcctccactctaggccatggccatttttataacagtatgaccatgtggcccataagagagtcaagggctgtaaccccaagggttaggatcttgggccccattctttaaagttattatttatcgggattccttctcacctagcacctcaccttagctcttaggcctcattttacagaaacagagaatgtagtgtggtttttcctttttcaaaatttccttttcctccacccagtccaatggaaggtttctgccttttaaacaatactcttgacaattaaattaaaaaaaaacaatttttattaccatttgg

SEQ ID NO: 720312 - DNA, 1167 bp, Homo sapiens
ggctctattcacaggggtgggaaggaaggctgaggggtaacacggcctttctgaaagagcactggagtggggagtcaggacacatgggatttgtgttcttgatctgtgattctgatgaacctggttcaattttgtcacctgttaatttttcttagaaaaactcatcattcattcccctagcctgccttggtagtgagaacagttgagataaagaggaaaatctctgtatagcacagaacagaattgcaaaattgttggtttataatgtaattttgtttaagtagctccattgctagatataaaggtcctactgtgcagcaaattaaaaactggagtaaggggaatgaggtattttgaactcagtagaagatgaaaaaatttctgttctactccaactgtaaggtactcgatactccatttctgttctcctataaggtctaaggtgctttttgagagaaaagagaggcagataaaagtatctcaaaggaaactcaaagattctatgccagagattgttaactgaaacagggacaggaggtacaagtcttttattgttatagtcaggatttatacagaaagggtactgcccccaaatattgccacttgtggcytgcctatggggcctaaccaaagcccacagggatagggctccaggtaatattaagtatctaacatttgttgagggcttcctttgggctaaatacaaagagtgttcatgatccctttcatttctcacataaatcctagaatgctggcaccatgatgctccttgtttcacacagaaggacaccaagctgtagcaaggttaacaaacttgcataacattgggacgttgaaaagcagcagagcccaggctccaatcctggtctaacgatcccagaatccttagtttaacattctactccactgtctcttccaggaagtagaaagtgggatgaagctggtaacatggcgactccaaagacctcatttgctgagtttatctatctctgatctgatggttccaagagaaggttaagtatcataaccaaggaaccaactcatggtttctcttcaaccacatctcagcagcaacacagagcttacctttggacctgcctcctaattatccctggatctctcctcttttccccacattctctaaatctcttttaagtttttgtgata

SEQ ID NO: 720313 - DNA, 627 bp, Homo sapiens
ttagtgatcaagcctggatttgagcccaggcagttgggcggcagagcacactgcctagtaccacccaacatcccggcagcctccacactgcttgaccccacccactttaagaattaacaggtggggtgtggtggcttatgcctatagtctcagcactttgggaggcggaggtgggtggatcacttgagcctaagagttcgagaccagccctggcaacatgtcgaaaccccatctctactaaaaaaaaatatatatatatatatatattagctgggcatggtggtgtgcacctatagtcccagctgctaggaaggctgaggtgggaggatcacctgaacccaggaggcagaggttgcagtgagccaagactgcatcaccgcattccagcctgggtgacagagcgagacactgtctcaaaaaaaaaaaaaaaaaatttacagattagtccaaatgaattaattacttatttatcatgtttattgtttgtcctcctttcgccagtatctaggctccatgaagtcaagaatttttgtcttttaaaattaactgttgaatctcaagtaccaagaagagtggaagcatatgagatgcttaataaatatytgtggaataaataaagttgttaat

SEQ ID NO: 720314 - DNA, 2693 bp, Homo sapiens
gcattcaagaccagcctggccaacatggtgaaaccctgtctctactaaaaatacaaaaattagctggatgtggtggcacacacctgtgatctcagctactcggcaggctgaggcagaagaatcacttgaatccaggaggcgggggttgcagtgagccgagatcactccactgcactctagcctaggtgacagagcaagactccgtttaaaacaaaacaaaactggacagaatagaaaagaataaaaaacataaaaaatttgaggatccagaaatcaaccaaaggcaaagcaacacgtcaagaagcatttgttcattttgttcataaaaaactgaactttggataagagaagtaggagtccacaaagttctagcctgttgctcttcccgtccccacccccatctttttgtggctcttcttgggtggggctaaccactgggggaaaaaaaagaaaaaaaaaaagggcagggggcatcttgacagcaggaagtctgacttgatttggagcagaaggccttaagcttgtaggtgtccaggggtagacagtaaaatcttctggctcagcaggaaagcaaatgggcagggcccacagctctgctggactgaggttacagtcctaactgggacaaacagcagagaaaacaacaacaacaacaaccagaaatttagcaggtaactcctggaagagagagccacagagcagctgaagaagtatctcttcctgacaagctggaaggttgacacacagggaagacctgaaatggcctggtgggaagtaaaaggaaggaagactcgaaaactgcccgaacttttaaggtgctcccccagtcagaggatgggacatttatggctcaatatatttgcacacatctctgaccaattgctggatgaccaccaagttaatcggacatagagacaaattttaagtcgggataaaaataaaaagagttttaaaaaactgagtaaagacattagcagctatgcaacactagggagagagattccccagattaagttcaaatatgttgctataaaacaaaacaaaacagaaaaccaacaacaacaactctcaaggggggaaatatcagactccaaagtttgtacaacatattatctaaaatgtccagttttcaacaaaaatgttacaacatgtaaaaaaaacaggaagataacccatattcagaaaaaaacaaattaatataaaccaactctaagcagacccatatattagagttagcagacaaaatcttcaaaagcaactgctagaaatgcatttaaagattaaagaaagccacacttaaagagctaaaggaatgcatgataacaagataagtcagtagaaattatccaatttgatgaacaaaaagaaaaaattactgaaggaaaatgaacagtctcagagactggtgggatgatgtcaatcgtgccaatatacctacaatgggagacccagaggagagaaggaagagacaggggcagaaaaaatgttagaagaatcaagacaccttcctacttgaagtccccttcacctctacactttggatttgggagagtcgggtgaggaaggtcaggggctgctgcatttgtggtgagagcccctgcaagcttcaactgtgtgctcaaggaggagaaactgcacctatgtgtgctgggcaccatgccaatacttaaatcagcctattggcccccacagtagtctatgagctgttctatagccaccttcccaagatgcaggctctaagaggtaaagcaactgcccagctcacaaagctggcaagcggcccatctgggactagaaccaaggtccctcttcttcatgcctttcccccaacactctgatgcctctcagcagctcacactcttatgccatgggagacccagcagtggaggtctcctcggagccctggatcaggtaaggacacctggaggtgtaactctgggcagagtgcagtgctgagtgggagtctggggctcaggaaggagcagagcaggaaacagggtgaacacagatctagcagcctgcaggtgcctctcctctttccacagagagctaaggcctctcaccagcatgggctgccccactcccagggagagagaaagggagacatgccctttctccagagggctgattcaccaggcaggggctggggttgaacagaagctgattctgggctgactcaggatgcccaagagcttcagctaaatggaccctgcaggctccagctccagcaacctcctgcctatgcctggctgaaagtccatctgggccttgcctcccagctacagggccactcctcggatacatcactcccggtttccattcaccctcacaactctcctgacacgtggacaccagatgaggaatctgaggcctgggcaggctgtgcaactagcctgaggccaccatgcacctgaggagcctggatttgtgtcctaatgtgatggactccaaagtctatttctctctatctctctggggcaacttggtctgaatagtcacccagactcctctcctgggaaggctgggaccagcagcacacatggttcatascccaaggtccagcactgtaaagagggatgctgtctccatcaagaaaagcagcctctgagtctcagcctgactatcctttctcactccagtgccctctgcctatgctgcgccccagagcacccagaggccgaaaccaaagaaag

SEQ ID NO: 720315 - DNA, 595 bp, Homo sapiens
tgacattggtatcaatgcagacaatggattaggcttcttatattgaaaaatgttacctgtatatctgttaatattttggattatgaaagaatgcttacttcttctccctaaatatctgtttgtgtagcgaaaaattaatctttctggttttggtagactgtaccttaattataacttgtacacttgattcttayaaaaatcctctcaggtattactactcacaagtcacagataagaaaaccaaaggggtcagagagaccaggacttgtccagattcgtaggtggatgaactagaactggaaaccagcaatgtggtattatcctcttttccatatccttttcatgatcccaaaacaacttgcaagttaaatttattccattatctgcatataatccatctggtcacagtttgggagagcagaaagccttgtgagtagaccattcacgaatcattcccatcaaatacatgtatgtggtatatatttttggtggtggtgtaaggtactgtgttcttgggaggtaatcccaagtactaatgaatgctcagcttcaaagtcacatgagctccccagtcatattttaaccatgtgctagt

SEQ ID NO: 720316 - DNA, 595 bp, Homo sapiens
tgacattggtatcaatgcagacaatggattaggcttcttatattgaaaaatgttacctgtatatctgttaatattttggattatgaaagaatgcttacttcttctccctaaatatctgtttgtgtagcgaaaaattaatctttctggttttggtagactgtaccttaattataacttgtacacttgattcttacaaaaatcctctcaggtattactactcacaagtcacagataagaaaaccaaaggggtcagagagaccaggacttgtccagattcgtaggtggatgaactagaactggaaaccagcaatgtggtattatcctcttttccatatccttttcatgatcccaaaacaacttgcaagttaaatttattccattatctgcatataatccatctggtcacagtttgggagagcagaaagccttgtgagtagaccattcacgaatcattcccatcaaatacatgtatgtggtatatatttttggtggtggtgtaaggtactgtgttcttgggaggtaatcccaagtactaatgaatgctcagcttcaaagtcacaygagctccccagtcatattttaaccatgtgctagt

SEQ ID NO: 720317 - DNA, 2998 bp, Homo sapiens
gacattttttaacaacatggataaatagctcaggaacaaaatatttaaagtgtaaattgtaaaataaccactaaatatttatattataaaacacattcagaattaaataatatctgctttagggattcagaaatgttgtaaaactatttttaaaagcaagggggtaacaaagataagtttagactgagtggatargggtattcagtactcttctaaagcaaagataatatcctccacttaaagtagtatatgggtgccatgttgctctttgctttttcctctacgcagattttttaactactgatttgaatttagtcaacatttaacaataacaattttcttctcatttatatgccctttacacaattacatgaaacttataaaagttaatatgcttcagaagggcatataagggaagggctcattttccatactcctcttcctcctccgtgctacagataaattagatggtaagacctattagacagagggatgcatttcttaaaggattacaaactcattaaaatatttggaagattaagaaaaatctggtttgaaaagagaatttagtaagcataaaaaaatcagccaatgaatagagaagtatgacaagccgtttttacttttgtctaaggatgaactttaagggctggtttatggcttctctggctgctaaaaatatacaaattggtatcttctaaagaatcttgaagaatttaggttcaaaatgagttttttgctaaagtggtaggttactgtttatttgtaaacagaggttagaattccactatccacatattttcttgaataaagatgacacagtctccatatacctcaaaccaaaaccacatgatccaagcagacccctgagaatgaaaggcagccaattttacatgggagtagttagtacaaactttgctaggtcaatgtggaagccagtgaaccccaaagtgactagtcagggatatgataatttagaatttgggataatcttattcttctggacttctcaaatagctgagtttcggattgacatttaaagcagagaatcataaaacaagcttaggaacaattttaatgatgcaaaagtaattaatttttcttttccttgtagacaaagcaattaagaaaaagaaacaacttacatcattaattatcatgcttgagaaagcatgaagaaaaatttcccccagttttaataaagcaatactaagaaaaacaaagatatatcggatttaaaggttttgttttgttttataaagtcagagtgacagatcattacacctgagacagatggctgcattgagaaatctaacagacaattatgttcttaaaataatatttttagctatagcactatttttttgttatgtgaaacagacgcacatctaaacatagttgtgtgcttcatgtcatcaaaaatattgtaaacatgataattatatacacaaccttaattttcttatgtcctaattttcaaattattaaattatttggtatttcatccagtttatgcaaattcacacacacacctgtgagaaaaatgttgtcgttatttagtgtttgaatataaacagaataaaaaattaccttgtccactgaaaggaaggtccctcttttcctaacagaagtagcaatctcattgtttgtactgattatccatcttatttcacagtaagagcacatttcaggcattatcttttccttctcaaatattgcaatgatactacttaacagtacaatcttgaggtattgtttttaagtaacatactggaaattgctcttttctgcaaaaattcgtaattatttaaaagttattgtaagcaaagtcatgctttgtaattgtggaataaggtagaaacattcaacagaaaagaacataattaatgataacataagtaattcttaaaatcacgtacaattctactgattatagttaatgttcttgttgctgtggtatgaattgccaaactttaaatttttatttaaaacccatctagtttttagttagaaaaataaggtacaaagacagccaatacagctctgcctaaaggttgtaaataaaatgaagattcaaatatgactccattaaacttaatagtgattgagaatccttgatcctagatgggaaaattaaaaaagcagctttcctggaaagggaaatagaaattaatctgtaagatcaaaagttgaatatgaaatgacttaaggcaatatgatcaactgatttacattctgtgcaatactaacaaatataagtcttgtacattatcttgttgttatctgtaacaccagatctctataatacagtacattagaataatggtttttaaaagtcttgcaattgtcaagcttactcaggaatccttcaacccaagggaagctctcagaagagttcaaatgcatctagttgacagatgccacagctgagggaaaggacacatttgttgacttcagaaatgaagcagagactatagtgtctgtgatgttgggccttttcacctcttcttttgtaaagaaatgtgtggcaatgctcaagaatctagggatttggaaacctgtcacatggagaaaccaaaccaaaataaaacaagaaacaaaaaacaataacaaaaaacttacaggttgtcaaaaatgacactggacatcaagaatcctctgaacaaaaacaattttatttttccagagagaaaacaattccacagtctacaaaaactcaagatgaaagtgtttctaaattattaggtctacaaagaaaagattccctaaatttagggcttaagaattctgtttgctttttactgagcatgtctcaatttaatctggtttttagagattttcttataattctatcagcattttataatgcttacagcattagtactataaacaaatggtatttacttgattgattttaaagtacactttcacataatttcaattctggagaccgtagaggaataacaatttagttccctagttgtgttttaaagtatat

SEQ ID NO: 720318 - DNA, 1074 bp, Homo sapiens
acttgagaaggaaaataaagaatgaatcaactctttcaacaagaacacatctgcttttgtggtacttaytaaatgtataacctaccttttctataaatttgaatatttcactttttgcaacttcctgaaaaatagcaatctgatctatctatgctgactttaatgttgcctcttgacacttgatactttgtcaaaattcagctaatatgtataataaaaatacttttagacctggatagcgataaagggttacaaaactgcctagcataagagttgaaaccacctctcccatcctttcatttggcagatgtggatgatgacagctgagtgcagatatgcctcaaattcttctcaaggcagcacttcaggaggccccaactgatccatcagagttagcctgtgagataagatttactggccatccccgaagctgctaaaactctgctatcaagtgacctgtgaccttgggaaaatatattttttgtacttttatttttcttcaaagagcaatgtagctaattatagctacctcccatgattgatgtgaagaacacatgaaataaattgcaagaaacagcccaatttgttataccatagttggaaaaggcttgtggaatgaatccattgaaacatgcctaaatggtacttgaatttaaaaacaaaaaacttttaaattttaacttaaaacttgataatattataattttaggatttctctttttcttttaattgtggcaaaatatgcatataaaatttactgtcttaaccatctttaagtacacagttcagtgacattaactatatttacattgctaagtaaccaatctctaggaatttttcatcttgaaaaactaaaactctatattcattaaacaaacctgtattaacccctcttttcagcccctggaaactagcattctactttctatttctgtgaattagattactttagacacttatgtaactggagtcatacagtatgtgtcttttcatgactgacttatttcacttagcataatgtcttcgggttttatccatgttgtagtaggtgacgggatttccttcccttttaag

SEQ ID NO: 720319 - DNA, 1074 bp, Homo sapiens
acttgagaaggaaaataaagaatgaatcaactctttcaacaagaacacatctgcttttgtggtacttactaaatgtataacctaccttttctataaatttgaatatttcactttttgcaacttcctgaaaaatagcaatctgatctatctatgctgactttaatgttgcctcttgacacttgatactttgtcaaaattcagctaatatgtataataaaaatacttttagacctggatagcgataaagggttacaaaactgcctagcataasagttgaaaccacctctcccatcctttcatttggcagatgtggatgatgacagctgagtgcagatatgcctcaaattcttctcaaggcagcacttcaggaggccccaactgatccatcagagttagcctgtgagataagatttactggccatccccgaagctgctaaaactctgctatcaagtgacctgtgaccttgggaaaatatattttttgtacttttatttttcttcaaagagcaatgtagctaattatagctacctcccatgattgatgtgaagaacacatgaaataaattgcaagaaacagcccaatttgttataccatagttggaaaaggcttgtggaatgaatccattgaaacatgcctaaatggtacttgaatttaaaaacaaaaaacttttaaattttaacttaaaacttgataatattataattttaggatttctctttttcttttaattgtggcaaaatatgcatataaaatttactgtcttaaccatctttaagtacacagttcagtgacattaactatatttacattgctaagtaaccaatctctaggaatttttcatcttgaaaaactaaaactctatattcattaaacaaacctgtattaacccctcttttcagcccctggaaactagcattctactttctatttctgtgaattagattactttagacacttatgtaactggagtcatacagtatgtgtcttttcatgactgacttatttcacttagcataatgtcttcgggttttatccatgttgtagtaggtgacgggatttccttcccttttaag

SEQ ID NO: 720320 - DNA, 1074 bp, Homo sapiens
acttgagaaggaaaataaagaatgaatcaactctttcaacaagaacacatctgcttttgtggtacttactaaatgtataacctaccttttctataaatttgaatatttcactttttgcaacttcctgaaaaatagcaatctgatctatctatgctgactttaatgttgcctcttgacacttgatactttgtcaaaattcagctaatatgtataataaaaatacttttagacctggatagcgataaagggttacaaaactgcctagcataagagttgaaaccacctctcccatcctttcatttggcagatgtggatgatgacagctgagtgcagatatgcctcaaattcttctcaaggcagcacttcaggaggccccaactgatccatcagagttagcctgtgagataagatttactggccatccccgaagctgctaaaactctgctatcaagtgacctgtgaccttgggaaaatatattttttgtacttttatttttcttcaaagagcaatgtagctaattatagctacctcccakgattgatgtgaagaacacatgaaataaattgcaagaaacagcccaatttgttataccatagttggaaaaggcttgtggaatgaatccattgaaacatgcctaaatggtacttgaatttaaaaacaaaaaacttttaaattttaacttaaaacttgataatattataattttaggatttctctttttcttttaattgtggcaaaatatgcatataaaatttactgtcttaaccatctttaagtacacagttcagtgacattaactatatttacattgctaagtaaccaatctctaggaatttttcatcttgaaaaactaaaactctatattcattaaacaaacctgtattaacccctcttttcagcccctggaaactagcattctactttctatttctgtgaattagattactttagacacttatgtaactggagtcatacagtatgtgtcttttcatgactgacttatttcacttagcataatgtcttcgggttttatccatgttgtagtaggtgacgggatttccttcccttttaag

SEQ ID NO: 720321 - DNA, 1074 bp, Homo sapiens
acttgagaaggaaaataaagaatgaatcaactctttcaacaagaacacatctgcttttgtggtacttactaaatgtataacctaccttttctataaatttgaatatttcactttttgcaacttcctgaaaaatagcaatctgatctatctatgctgactttaatgttgcctcttgacacttgatactttgtcaaaattcagctaatatgtataataaaaatacttttagacctggatagcgataaagggttacaaaactgcctagcataagagttgaaaccacctctcccatcctttcatttggcagatgtggatgatgacagctgagtgcagatatgcctcaaattcttctcaaggcagcacttcaggaggccccaactgatccatcagagttagcctgtgagataagatttactggccatccccgaagctgctaaaactctgctatcaagtgacctgtgaccttgggaaaatatattttttgtacttttatttttcttcaaagagcaatgtagctaattatagctacctcccatgattgatgtgaagaacacatgaaataaattgcaagaaacagcccaatttgttataccatagttggaaaaggcttgtggaatgaatccattgaaacatgcctaaatggtacttgaatttaaaaacaaaaaacttttaaattttaacttaaaacttgataatattataattttaggatttctctttttcttttaattgtggcaaaatatgcatataaaatttactgtcttaaccatctttaartacacagttcagtgacattaactatatttacattgctaagtaaccaatctctaggaatttttcatcttgaaaaactaaaactctatattcattaaacaaacctgtattaacccctcttttcagcccctggaaactagcattctactttctatttctgtgaattagattactttagacacttatgtaactggagtcatacagtatgtgtcttttcatgactgacttatttcacttagcataatgtcttcgggttttatccatgttgtagtaggtgacgggatttccttcccttttaag

SEQ ID NO: 720322 - DNA, 2059 bp, Homo sapiens
cagcacccccaggtgactgtcagcggtacctccggactcgggcgggtgggagcctggcgggcaccccacgccgtccggtgggcccgcccttggactctcagcgcggccccagccccggccccggcctccctgacccaccctgctctcccactgcaggcctcttcggcacaggaattcggtcctacttcaccttcctccgcttcctgctgctactcaacctgctgagcctgctgctcaccgcaagcttcgtgctgctgcccctggtctggctccgcccccctgacccaggccccaccctgaacttgagtgagtgtgaggcccaccaggggaagtgctccggtgcccacctgcgccatgggggggctggcccagggcccagagcgtggcgacaacgctgggcgtggtcctgccgtgcaggccccggggctctctctccctgacctcgccttgtgtggggcacgcctttggcacatcctcagccccctgcccaggcctccccagggttgggggttatagagcagtagccgcagagcctcacctatgccttggggatccctctctattgacccccttcctcctcaacagccctccagtgccctggtagccgccagtccccgcctggcgttttgaggttccacaatcaactttggcatgttttgactggcagggtgagtgaggtctgtcccggctatggtccagaggctgggagacccagggaactggcttcaggggacacaagtctaagaggacctctgctcctccagggacatttcggctcctcaggggatggtcttacctagacagactggcctggccggtggtggggttagagagaggctgaggccactgtgcccaacatagactcatggacacatgcccgtggtcctcagagcccagctggtgtaggcggtgccagggacaaagggggaaaagtgccccggcctctgggagaagcacttccccaccctcatcctgggaagccatcgagtggtcaccaatggggttcctgggttccagtcgtggctctatttctcaaagccctgtgaccgtgggcamgttgccgaacctctgtgggcccttgtaagacgggacactccctacctgatggggggattgcacgggggctaacaagatcatatatggaaagcacttgagcagagcctggtgctcacccgggctgggtatcttcgtcgctgtccccaggccttcaccaacacctatctcttctacggtgcgtaccgagtggggccggagagcagctccgtgtacagcatccgcctggcctacctcctcagcccgctggcctgcctgctcctctgcttctgtgggactctgcggcggtgagagcgaggtccacaccttcaccccttccccagggaatcttccctgatcaccccttccttggcagggtaccctcccattggcaggaaggcccatggcccggcacagcaggctcctgggtgcttcctcagcccaggctctggccgcaaaccttaggaacagggccaccgccccctaccccgactcctcactcaccaggacctgcacctggggctgcaggggccttcccagacccagagccgagccaaggctgaggctggatggtagaggtgcccctcctccagcagcccctggtctcctgccccgcaggatggtgaaggggctgccgcagaagactctgctgggtcagggctatcaggcgcctctcagcgccaaggtcttctcctcatgggacttctgcatccgggtgcaggaagcagccaccatcaagaagcatgagatcagcaacgagttcaaggtgtgtgcacgagtgagtgcctgagatccacaagctccaggtatatgggagcgagtgcgtgagagccacgtgttccaggtgtgtgcgagcaagtgcgaccgtgccagtgtgtgtgagcgtgtgtgggagggagcctgtgggagcgtgatggagagcgtgtgaatgtgtgtgcatgtgtggccgagtgtgagggcacatgtgactgaatgggtgatggcgagcacgcctgtgaatgtgtgaatctgagtgtctatgggagca

SEQ ID NO: 720323 - DNA, 2059 bp, Homo sapiens
cagcacccccaggtgactgtcagcggtacctccggactcgggcgggtgggagcctggcgggcaccccacgccgtccggtgggcccgcccttggactctcagcgcggccccagccccggccccggcctccctgacccaccctgctctcccactgcaggcctcttcggcacaggaattcggtcctacttcaccttcctccgcttcctgctgctactcaacctgctgagcctgctgctcaccgcaagcttcgtgctgctgcccctggtctggctccgcccccctgacccaggccccaccctgaacttgagtgagtgtgaggcccaccaggggaagtgctccggtgcccacctgcgccatgggggggctggcccagggcccagagcgtggcgacaacgctgggcgtggtcctgccgtgcaggccccggggctctctctccctgacctcgccttgtgtggggcacgcctttggcacatcctcagccccctgcccaggcctccccagggttgggggttatagagcagtagccgcagagcctcacctatgccttggggatccctctctattgacccccttcctcctcaacagccctccagtgccctggtagccgccagtccccgcctggcgttttgaggttccacaatcaactttggcatgttttgactggcagggtgagtgaggtctgtcccggctatggtccagaggctgggagacccagggaactggcttcaggggacacaagtctaagaggacctctgctcctccagggacatttcggctcctcaggggatggtcttacctagacagactggcctggccggtggtggggttagagagaggctgaggccactgtgcccaacatagactcatggacacatgcccgtggtcctcagagcccagctggtgtaggcggtgccagggacaaagggggaaaagtgccccggcctctgggagaagcacttccccaccctcatcctgggaagccatcgagtggtcaccaatggggttcctgggttccagtcgtggctctatttctcaaagccctgtgaccgtgggcacgtygccgaacctctgtgggcccttgtaagacgggacactccctacctgatggggggattgcacgggggctaacaagatcatatatggaaagcacttgagcagagcctggtgctcacccgggctgggtatcttcgtcgctgtccccaggccttcaccaacacctatctcttctacggtgcgtaccgagtggggccggagagcagctccgtgtacagcatccgcctggcctacctcctcagcccgctggcctgcctgctcctctgcttctgtgggactctgcggcggtgagagcgaggtccacaccttcaccccttccccagggaatcttccctgatcaccccttccttggcagggtaccctcccattggcaggaaggcccatggcccggcacagcaggctcctgggtgcttcctcagcccaggctctggccgcaaaccttaggaacagggccaccgccccctaccccgactcctcactcaccaggacctgcacctggggctgcaggggccttcccagacccagagccgagccaaggctgaggctggatggtagaggtgcccctcctccagcagcccctggtctcctgccccgcaggatggtgaaggggctgccgcagaagactctgctgggtcagggctatcaggcgcctctcagcgccaaggtcttctcctcatgggacttctgcatccgggtgcaggaagcagccaccatcaagaagcatgagatcagcaacgagttcaaggtgtgtgcacgagtgagtgcctgagatccacaagctccaggtatatgggagcgagtgcgtgagagccacgtgttccaggtgtgtgcgagcaagtgcgaccgtgccagtgtgtgtgagcgtgtgtgggagggagcctgtgggagcgtgatggagagcgtgtgaatgtgtgtgcatgtgtggccgagtgtgagggcacatgtgactgaatgggtgatggcgagcacgcctgtgaatgtgtgaatctgagtgtctatgggagca

SEQ ID NO: 720324 - DNA, 2059 bp, Homo sapiens
cagcacccccaggtgactgtcagcggtacctccggactcgggcgggtgggagcctggcgggcaccccacgccgtccggtgggcccgcccttggactctcagcgcggccccagccccggccccggcctccctgacccaccctgctctcccactgcaggcctcttcggcacaggaattcggtcctacttcaccttcctccgcttcctgctgctactcaacctgctgagcctgctgctcaccgcaagcttcgtgctgctgcccctggtctggctccgcccccctgacccaggccccaccctgaacttgagtgagtgtgaggcccaccaggggaagtgctccggtgcccacctgcgccatgggggggctggcccagggcccagagcgtggcgacaacgctgggcgtggtcctgccgtgcaggccccggggctctctctccctgacctcgccttgtgtggggcacgcctttggcacatcctcagccccctgcccaggcctccccagggttgggggttatagagcagtagccgcagagcctcacctatgccttggggatccctctctattgacccccttcctcctcaacagccctccagtgccctggtagccgccagtccccgcctggcgttttgaggttccacaatcaactttggcatgttttgactggcagggtgagtgaggtctgtcccggctatggtccagaggctgggagacccagggaactggcttcaggggacacaagtctaagaggacctctgctcctccagggacatttcggctcctcaggggatggtcttacctagacagactggcctggccggtggtggggttagagagaggctgaggccactgtgcccaacatagactcatggacacatgcccgtggtcctcagagcccagctggtgtaggcggtgccagggacaaagggggaaaagtgccccggcctctgggagaagcacttccccaccctcatcctgggaagccatcgagtggtcaccaatggggttcctgggttccagtcgtggctctatttctcaaagccctgtgaccgtgggcacgttgccgaacctctgtgggcccttgtaagacgggacactccctacctgatggggggattgcacgggggctaacaagatcatatatggaaagcacttgagcagagcctggtgctcacccgggctgggtatcttcgtcgctgtccccaggccttcaccaacacctatctcttctacggtgcgtaccgagtggggccggagagcagctccgtgtacagcatccgcctggcctacctcctcagcccgctggcctgcctgctcctctgcttctgtgggactctgcggcggtgagagcgaggyccacaccttcaccccttccccagggaatcttccctgatcaccccttccttggcagggtaccctcccattggcaggaaggcccatggcccggcacagcaggctcctgggtgcttcctcagcccaggctctggccgcaaaccttaggaacagggccaccgccccctaccccgactcctcactcaccaggacctgcacctggggctgcaggggccttcccagacccagagccgagccaaggctgaggctggatggtagaggtgcccctcctccagcagcccctggtctcctgccccgcaggatggtgaaggggctgccgcagaagactctgctgggtcagggctatcaggcgcctctcagcgccaaggtcttctcctcatgggacttctgcatccgggtgcaggaagcagccaccatcaagaagcatgagatcagcaacgagttcaaggtgtgtgcacgagtgagtgcctgagatccacaagctccaggtatatgggagcgagtgcgtgagagccacgtgttccaggtgtgtgcgagcaagtgcgaccgtgccagtgtgtgtgagcgtgtgtgggagggagcctgtgggagcgtgatggagagcgtgtgaatgtgtgtgcatgtgtggccgagtgtgagggcacatgtgactgaatgggtgatggcgagcacgcctgtgaatgtgtgaatctgagtgtctatgggagca

SEQ ID NO: 720325 - DNA, 1320 bp, Homo sapiens
ggttcattttaaaatcttgccataaattgatttaaaattccagaacaaaatgagccaaaatcagaccttaccaaatcaaacactcccttcaagagttcctaaactttaagtggaattttaatctaaagttactgtaggattttccttggaaaccattgaggtggactgtatgagttttctttgtgggttgtcctgaaaggtgaacactatcctttcccacctcccaggacatgttttgtaggtgaatctccacacagtggtggagaatagaacatagactcgaccagttagctaaccaaataaagtccataactagatgtatgttaaaagatcagcatacatttcctttttctcatcaaactatcaaactgtcctcagtttgcttttacctgaactggagcccatttgtcattctcttttcctttaaagcccttttcaatatgaagttctatgattcccagtgctcaaacacaaacacagagcactatattagtgtttggtatacagcagtgacaaaatagatggtctctgccctcctggagcttataggcaagagagtgagtgacagtaaacatttgaagtcacaaattagaaagagttcttgcacattacagagtgtggaaaggtgtctctgaggtatccagcatttttctgtgatagaaagctatcatttgatttcctaccacaacaaagaaacaacaaatagcacaagccaaatcaaaaggcctttctttttacttctctcatcccttcttctaacactgtcctgtagaagtcaacagtagaacagctgatgggaaaggaaatcaaataatgagagcaaatgagaaaaaaaaatttccagggcctgccttttgctctccctgttgagtccagggccacaagtaaaggctgagttgtcattctcttttcctttaaagcccttttcaatatgaagttctatgattctatgattcccagtgattatggggaagaaacactgaagtaggygagagagtaggttttaactcagattagtttatacgttgtggtacatttttaaactggacaattctaattgaattctaatgttaatagccccatattaccagagaattatggatttccccaaaatgttgctaagaggttgggcatggagatccgggagagtgagtgtgtaggtagtggtaggagaggacaaaacagtagtattcttctgattttgcctcccacatttggcatattcaataaataacttacagctgtctttctctgtgactccgttacaaatttcttaacagcacgtaggagtttaatatataacagtgcctaacacaatgc

SEQ ID NO: 720326 - DNA, 658 bp, Homo sapiens
acatccttacaataaagataatgtgttaatctcaatatttaaatgtcctggggactaagtggacacatctcttcatctcattagagatgttttatgtaactaaaaatttaaaaaattgaaaaagtaaggaagaagaaggaaagtcgagctgcttttgtcttccttttggcttccttttctgcatcattgaaactttaggagaaagttagaaaactcttctttcactgcactgatacctcttgctgaatctagtcagagattrtgcctcccagatgacaagggagacaaaagtggagtgatacatttcatcccgggtattatgcaggttcccaataaaacaaacaaaaaaaggaaaacaataagtggtcatctcatctaaagacagcaaaatctttctaaatgaaagcttaggataattgagctataacacatgtcaaaatgaaaattgcaccaaagtcaaacaggccaggaagattttattcaagatgattgtaataggagagagaggccagaactcagttggaactcaactccagtgaaacccagggctggagagtttttaggagctgaggttgaggctgctgaggttgggggagctgaggcgggctgccctttgtcggctaattggcattacctcagggaaaagcaaactctctca

SEQ ID NO: 720327 - DNA, 658 bp, Homo sapiens
acatccttacaataaagataatgtgttaatctcaatatttaaatgtcctggggactaagtggacacatctcttcatctcattagagatgttttatgtaactaaaaatttaaaaaattgaaaaagtaaggaagaagaaggaaagtcgagctgcttttgtcttccttttggcttccttttctgcatcattgaaactttaggagaaagttagaaaactcttctttcactgcactgatacctcttgctgaatctagtcagagattgtgcctcccagatgacaagggagacaaaagtggagtgatacatttcatcccgggtattatgcaggttcccaataaaacaaacaaaaaaaggaaaacaataagtggycatctcatctaaagacagcaaaatctttctaaatgaaagcttaggataattgagctataacacatgtcaaaatgaaaattgcaccaaagtcaaacaggccaggaagattttattcaagatgattgtaataggagagagaggccagaactcagttggaactcaactccagtgaaacccagggctggagagtttttaggagctgaggttgaggctgctgaggttgggggagctgaggcgggctgccctttgtcggctaattggcattacctcagggaaaagcaaactctctca

SEQ ID NO: 720328 - DNA, 1730 bp, Homo sapiens
tgaagtccttgcatagttaagaaacattattcaatgccttctagtctttatgactttagaggacacttcagattctgatattcctggtccttcttcctgtaacagtcaggcagggaatcacccataagtaaatgtgtattgagtcactgtgtatgacagtcctgttctaggcactgaagacacggaggtaaagcaagggacagtagatttacattttatttgaaattataagattataataaaaacaagtgaataataaagataatttcatgcactgatggtaattaaaaaatgataaaataatcatatgtgattggcaaaataacttctagcaagtggaaaggaaacagcttctacacgaggtaatctttatttgtgaataaatgacaaaaacgaggaattcatgcataaatcaggaagacgagcttctaaaagaagaaatgtgcaaaagctttacgatcaatgtgaagaaaagagactgagagataaaggtgacaactttagcaggagattacattgaaaggtggctttgtcaaaattacacactattccaagaaatctgccaccaatccattttctgatttagacatctgaccctatatgatcaacttccaaatcaattttggacttcttctatatttctcctatctatctgctttttttgtgctttatttttacaaaatattccattcaaataccatttcaataatacgttaaaaaatatttcttcaatgcacctaagactttgaagaccacctaataatgcttgaagtagacgaagctgatctccctgaatgtcttctcagatttttggtaagaacgtttatatagccatccagtgataaaggggaggttttccagawtcctctttgtgtgcatcctttactttctgatttgaggagatactgctccataaattctgagatcttctgatcctttagggaaatcagagcatgatttttgagatcccacctcttgtcttcttagatatctgtgagttccatacaccatttctggtctgataatatttatgatatctaaaacttatctaataactttttgaagagcacatacatccaggtttcaaatatagtttatacagattcctttatatatgttgagattggactttaagtttttacttactggttaaatttacccagactctcctataaaagtttaatttttctatcaattaaatctctttcttaagccagcttaactattcgctcttttcatatttatttacccacatgttctgactgtaaggctaacaagttttatttttacttttaattctttcaacagttctatttttctttattttcctgaagaaacttagttttaagaaaaacagtattaatgatgagcttctttatacttgaaataattttatagatgttgttgtttctctacttgattgcaacattataatgctgtttctgctttctaatatacgttttgtcttaataaaatataccaccttccaaaggaaaatctacagtttagattttcaaattttgagtccttcccataaattaaacatttagctacaaatggtagtaatgggtaggggtgggagtttaaacttggatcacctgatcaagtactgtcaacttaggtcttattctaaatatttaacgacatattctcacttgtcatgcgtagaaaacaaaaatctttgcaatttaaaggccaagactcatataaacattgctaagaaatatagt

SEQ ID NO: 720329 - DNA, 2848 bp, Homo sapiens
ttttgtatcttttgaccaacatcaacccaatccccctgcactcagtccctggtaaccaccgttctcctctccactttttatgagtccaacttctttagattccacatataagtgagataatgtacatgttaattaactcaatttaatttttctataatgtttatatatttcaaaacaacatgctgtataccataagtttgtataatttttgctgaattaaaaataaaaatacttacgattatttgagatgtgtcgggcttctgtggaactatgcctatgagatattcarcttagagttattattttcctagcctttttttatctctgacttgagatctacgttttagctctgccacactgcgtacaattctccaggcaattaatactgaggctagtttctggcacttctccataaactgtcccatcttccttaactaaatttgcctcttacctgtactccagtcgctaaagggcttcacgcctggtcaccgtgagtacatccctcaactacccaatgtatacataccaatttaagaggaaaaagttttttatttctattttagtagcaagttattaattacagtaattaaacatttcgtctaaaagaaagaaaatacatagttaaatctagaatatgtggtaagttaaagaaacattaattttggtttcaggcaaacgttgttagttttacttcattagattgattttctaaagctagaagcctagggaagaataatttgtatataaagaattaaataaagcttttacataaaaattataaaaacatatatttatatacattccagtgattaaacacaactctttcctcttcttttaagtttcgaatgtacctttgataactgtctgtattgaattctagtcattacttaagctatccttaattaaaagtaagagctgaagagttttggttaaaatatatatgtatgcttgaagttcattttacttatatccaaaccaatcaatgctaataatatcaccaaagtgattttacccacataaaatatttcaacatggatttctgaacctatactggtgccaaatttttataaatagattgcttttatttgaatattagttttttacagttgcaagaatcccttcaaattgtctaaataaggcagacaagaagagaaacagatgtacataagtgaacctgaatagatagacagatgatagataaataggagagagaacaagagagagagagagagagagaaagagagagatgcatgataaatgatggaatcttggtaatagtaaactaactgaattagatattaggaaatatactaatgtaaatactaaaaagagatgttcatcccatgaatattcaagcagaacaataaatctatgtttcagttttaatatatgtaatattaataattttaaaagtaaaatattaccttaaacttttcactttttataaattatctttttcaagagaatcatttttaaatattgtgttactttatttgtatctataatttttaaatattttctcttcaaaattcctgaaatgtgtatgccacataaaatatacttagtattttctcattctaaaataaatctgaacagctttaaagcatgacaattatgcttaagaatattactaccggtttcttgaaaggacattttttttactctctgatttgcatataaaatcgcatagaatagattcacattattaatttcagcattcctgagactgaaaaatatttagagtgataaaaatactgttggttttctcacattttgtggccatgtacactgaggcaaagtgaagaactgatccagggatttcaaatagtgttagcaaatgattcagcattataacaggaaatgttttatccaatatatttttagtaaagtgttcatgtcagagtaaaccaaaatgatttacaaaaagaatgaaagaacaatttacatatcagggatatccaccccccttttaaaaggcatattgtatttttaaattgaagattatatactttatgttctagaaaatgtactttaattaaatatatataatatatgtgtgtgtgtgtatatatatactctttttctttctttccttctttctttctttcttttttttttttttttttttgggtttgaggcagagtctcactctgttgcccagatcagagtgcagtggtgcaatctcagctcactgcaacctcctcctcctgggtcaagagattcctctgcctcagcctcccgagtagctgggattacaggcacgtgccaccaagcccggctaatttttgtatttttagtagagacagggtttcactatgttgaccagtctggtctccaactcctgatctcaggtaatccacccaccttggcctcccaaagtgctgggattacaggcgtgagccaccgtgcctggcctttatttaaatatgaattctgagttttgtatgtatcttgacagatccactgagaaaatgtatttgagtatttagattaattcactaagcaaaaactcagtttagcctttaaaggcatcaacaacaaaaaaaatgggcattttcatccatcaaatatatgtcattagttttggcagtaaattttaatttcgacatgaggaacatattagtatagatgaatcttattttatttttatttatagctttattaatattattaaactacaaaatgttttaaatagcttgaatttcaactaaacatattaaataatgtcaatatggtaacaaaataattgaatagctattcacccatttaaattgatgatgtaggtattttgaaggcacaaaaacatatttacagtgcatcattaagtgaaaagacaaacttctaaata

SEQ ID NO: 720330 - DNA, 1213 bp, Homo sapiens
atggcataggggccaggcacgatggctcatgcctgtaatcccagcactctgggaggccgaggcaggcggatcacgaggtcaggagatccagaccaccctggctaacatggtgaaaccctgtctctactaaaaatacaaaaaattagccgggcayggtggcgggcgcctgtagtcccagctactcgggaggctgaggcaggagaatggcatgaacctgggaggcagagcttgcagtgagccaagatcgcgccactgtactccagcctgggcgacagagcgagacaccgtcaaaaaaaaaaaaaaatcattccactattggagagaggtaataagacacaatgttaactttggaagccaatgaaaagtccttccggtagaaagagtactgatgagtgccttctctttccatccaaatgaatgatgagaccatctgaaggagagccgtacatttttcatattacccaaagtccacctgtggaattcacagctgtcagcttaaaacagtgaacagcccagactcaggaatactggctgtctctccaatttaagacactgaaaggggtgcgagtgccaggactgtcctctatggcaaacactcctcatgcaccaatagaagatgatcgcaaaagttccgagggcaggactggagaggggattttggttatgactgtagcagagcacggaggtgctatattctggagattctctttattgaggaggatcactgatggagaataattcctattcaagtctggtagtcaaggagattcatggctaccttgcctatcaccattaggctaattctgggtgatctttcaggcctatggagaaactgtttaggacagggtcagtgtgagcgcatagggacctacttagcactgcctggtcaagaaaactctagggcagagtggtaaggaggccacctgggcacccatggcttagaaatggttctgatcacagctgggtggagaaaagctcccttgctaaggtttacccaactacatgccaaggtgttctattagttgtccttttgggacagtggttggcaggtcagtgctcagttaagtgttgctaatttttatatttttagaagagatggggtttcaccatgttggccaggatggtcttgatctcttgaccttgtgatctgcctgcctcggcctcccaaagtactgggatgacaggcatgagccaccgcgcccagccagatatt

SEQ ID NO: 720331 - DNA, 1213 bp, Homo sapiens
atggcataggggccaggcacgatggctcatgcctgtaatcccagcactctgggaggccgaggcaggcggatcacgaggtcaggagatccagaccaccctggctaacatggtgaaaccctgtctctactaaaaatacaaaaaattagccgggcatggtggcgggcgcctgtagtcccagctactcgggaggctgaggcaggagaatggcatgaacctgggaggcagagcttgcagtgagccaagatcgcgccactgtactccagcctgggcracagagcgagacaccgtcaaaaaaaaaaaaaaatcattccactattggagagaggtaataagacacaatgttaactttggaagccaatgaaaagtccttccggtagaaagagtactgatgagtgccttctctttccatccaaatgaatgatgagaccatctgaaggagagccgtacatttttcatattacccaaagtccacctgtggaattcacagctgtcagcttaaaacagtgaacagcccagactcaggaatactggctgtctctccaatttaagacactgaaaggggtgcgagtgccaggactgtcctctatggcaaacactcctcatgcaccaatagaagatgatcgcaaaagttccgagggcaggactggagaggggattttggttatgactgtagcagagcacggaggtgctatattctggagattctctttattgaggaggatcactgatggagaataattcctattcaagtctggtagtcaaggagattcatggctaccttgcctatcaccattaggctaattctgggtgatctttcaggcctatggagaaactgtttaggacagggtcagtgtgagcgcatagggacctacttagcactgcctggtcaagaaaactctagggcagagtggtaaggaggccacctgggcacccatggcttagaaatggttctgatcacagctgggtggagaaaagctcccttgctaaggtttacccaactacatgccaaggtgttctattagttgtccttttgggacagtggttggcaggtcagtgctcagttaagtgttgctaatttttatatttttagaagagatggggtttcaccatgttggccaggatggtcttgatctcttgaccttgtgatctgcctgcctcggcctcccaaagtactgggatgacaggcatgagccaccgcgcccagccagatatt

SEQ ID NO: 720332 - DNA, 1213 bp, Homo sapiens
atggcataggggccaggcacgatggctcatgcctgtaatcccagcactctgggaggccgaggcaggcggatcacgaggtcaggagatccagaccaccctggctaacatggtgaaaccctgtctctactaaaaatacaaaaaattagccgggcatggtggcgggcgcctgtagtcccagctactcgggaggctgaggcaggagaatggcatgaacctgggaggcagagcttgcagtgagccaagatcgcgccactgtactccagcctgggcgacagagcgagacaccgtcaaaaaaaaaaaaaaatcattccactattggagagaggtaataagacacaatgttaactttggaagccaatgaaaagtccttccggtagaaagagtactgatgagtgccttctctttccatccaaatgaatgatgagaccatctgaaggagagccgtacatttttcatattacccaaagtccacctgtggaattcacagctgtcagcttaaaacagtgaacagcccagactcaggaatactggctgtctctccaatttaagacactgaaaggggtgcgagtgccaggactgtcctctatggcaaacactcctcatgcaccaatagaagatgatcgcaaaagttccgagggcaggactggagaggggattttggttatgactgtagcagagcacggaggtgctatattctggagattctctttattgaggaggatcactgatggagaataattcctattcaagtctggtagtcaaggagattcatggctaccttgcctatcaccattaggctaattctgggtgatctttcaggcctatggagaaactgtttmggacagggtcagtgtgagcgcatagggacctacttagcactgcctggtcaagaaaactctagggcagagtggtaaggaggccacctgggcacccatggcttagaaatggttctgatcacagctgggtggagaaaagctcccttgctaaggtttacccaactacatgccaaggtgttctattagttgtccttttgggacagtggttggcaggtcagtgctcagttaagtgttgctaatttttatatttttagaagagatggggtttcaccatgttggccaggatggtcttgatctcttgaccttgtgatctgcctgcctcggcctcccaaagtactgggatgacaggcatgagccaccgcgcccagccagatatt

SEQ ID NO: 720333 - DNA, 618 bp, Homo sapiens
tcctatcagctctcctgctagaagccaaacttagcaccttatctgggaatggggaggaagaatgtggaacccagacaccccacagcggccccagagctaggcagggcaaggtccccggggcagcgtggccgggctgcccgtctggtccccgcttacaagaacctgcaagcttccctccttgctttccttcttcccctcggttcctcccccgccgacctacctggaggccgataataaagcaggaggagggagatggatggacgggagggcggggcgccgcgtggtgccataaagcccagctggaaggggcctgtctcgggagtgtccagccccaggagccggggaccgtccgcgtcgcgagccgggccarggcagtgggcagagggcagagggcagagggccggggctggggcagagggcgagtgcccgggaaggccatgctgcggggcgcgccaggactaggcctcacggcgcggaagggggccgaggactctgcggaggacttggggggcccctgccccgagcccgggggcgattcgggggtgctgggggcgaacggcgcttcctgcagccggggcgaggcggaggagccggcgggcaggaggcgcgcgcggccgg

SEQ ID NO: 720334 - DNA, 1436 bp, Homo sapiens
gtcataacttcttaaatatatgcagcatatacaattgacaggatattttcatttgtatttatctcatttaaatgtagtctctattgaaatcaagatgcaattcatgtttgctttttgaatgttacctattctaataaatacagcaactggtaaatatttgttgttggctattgtttgccctttttaatcaaattttagtaaaatttgrtatactggcagaaattagagagtaatgtaattatattcaataaaacttacagttttttagaattatatgttaatttagttgtttgtaagaaggaactattactgacattttttttttattaaactgatatattctttgaggtctgagagcatgtcttatattgtatctaccctagtatttatacttgtactatgtgtatactgaatttaatctcttatttgatttttttaaaaccctgcttttatcattaatttttgcttaagtactgtggtttgtattaaagttagtttttaatggtaaaaacccacttatcaaatgtagtctattttttttttttttttgagacagagtcttgctctgtcaccaggctggagtgcagtgtcacgatctaggctcactgcagtctccgcctcctgggttcaagcagttcccctgcctcaacctcctgagtagctgggactacaggcgtgcaccgtgaccacgcctggctaattttttgtattttagtagagagggtttcaccatgttggccaggatggtctcgatctcctgaccttgtgctctgcccaccttggcctcccaaagtgctggcattacaggcatgagccaccgcacccagcctcaaatagtcttttaaaaaaagcagagttgcagtcaatgaaatgggagcttttatatgtagtctctgtttaatctttctctttcttgcttttgatcccagaagacatccatggaagcctaagaggcacttttaagaaattctagagctccacagagtagatttaggaaactactgatctagtgtgttttttttcattttacaaatgaaaaattgagaccaaaaggcctactgacgtatccaaaaatcacatagtggaagagttataaacaaatagaactatagtttctgactctggtatggtattctagtgaactaagaagtttttctaatatctctgaagatatttacactttttgatgattgactatatttttccatctctctggacagacatctgttctccagcatatcctttgctacctgttttccacctgatacctgtcttactggatcatgacttaacaccagccctatgaattactttagtactctttagttaatggcttggttttccttgtcctctcaaaggtggccattattcccctgaccaggtgggcattatcatttggaattttagaaataaattgctcccaattattacaagag

SEQ ID NO: 720335 - DNA, 599 bp, Homo sapiens
ccaaatctgaaatctgcagcctataataaatttagttgccttaaatagcatctcaaataattatacttaacaagctaatcactgaaattgttctttgtgcaatgatattgatatgtgctccaaatatgcagcagtcaagaaaaaacttcagatcagttgcctggattcaaatttgatctacaattcaataactgtgtgacctttgctgtagttacttaattttgctgtacttcagtttcctcaactgtaaaatataaaaatagtacttatcttgcaatggttacttcaagaattaaatgagttaatatagtagttagaatcgtgccaggcacactgttagtgctagaatatatattattttattgttacacatatagtagagctgaaagattttataaygttaacaatccacagatattaaaaatttaacttaacgatgaattctcaattggacaaaacatctcttctatagctatgatttaatcatagatatggcacaaaatttagatcttttaaaaatacataacaatcaaaacaaagctgtcactgaaaaacagaaatcttacccttgctgctcagtcacactaagcaaaatatca

SEQ ID NO: 720336 - DNA, 573 bp, Homo sapiens
tcttttaggcatctgagttttctactgcttcttgttgtagacactgctcctctcrccacttttattgcaggggaacagtgtttcactctggcccaaaaaaggataaatatcccttcctttgattctttttgcatgactaagaggagctagaattttcctattgctttactaaattgtaaaagagaataaatgaatactacataaagtatattcagttgaatgtttttgcttataaggtcagagttactacttagcttacttttgggcactcttgggcactattcaaagatcaaagagtggaactatagatctgtgatggttaattttgtatttcaacttcactgggctatgggatgcccagatagccagtaaaacattatttatcaatgtgtctgtgaaggtgtttttggaagagatcagcatttgaattggagaactgagtaaagcagatgaccctgcccaatgtgactgggcagcatccaatatgttaagggactaaatagaaaaaaaaggcagaggaagggtgaatttgctctctctccttgacctgagacatccatcttctcttgtgtt

SEQ ID NO: 720337 - DNA, 573 bp, Homo sapiens
tcttttaggcatctgagttttctactgcttcttgttgtagacactgctcctctcaccacttttattgcaggggaacagtgtttcactctggcccaaaaaaggataaatatcccttcctttgattctttttgcatgactaagaggagctagaattttcctrttgctttactaaattgtaaaagagaataaatgaatactacataaagtatattcagttgaatgtttttgcttataaggtcagagttactacttagcttacttttgggcactcttgggcactattcaaagatcaaagagtggaactatagatctgtgatggttaattttgtatttcaacttcactgggctatgggatgcccagatagccagtaaaacattatttatcaatgtgtctgtgaaggtgtttttggaagagatcagcatttgaattggagaactgagtaaagcagatgaccctgcccaatgtgactgggcagcatccaatatgttaagggactaaatagaaaaaaaaggcagaggaagggtgaatttgctctctctccttgacctgagacatccatcttctcttgtgtt

SEQ ID NO: 720338 - DNA, 678 bp, Homo sapiens
tgaggctctgcggaggaaggggtgcggaaagaaaggggaagcctggcaggcaactagacaggctcagcaacctgcccccaatcccgggaacggctggcaagcagcatcccagacccatcctccagccaggcgcgaatcccgtgtcttcttctaggcatcagggcccatgggatgggcagggaggacttgtgacgcctgcaagtgtagacctttggaatcttcctctgagcataactggggagatgaggactgacccagtcatggagggaacagctctacccagtttgcctgagacatttttttggtgttagctctgaaactcccaactccccrgccctgggcaaacaaggacagttggccaccctgctggacactgcctgagtccctctgttgtcctaggttctgtaaatacactcactctttagtaatatgtccttagacaccagaattgattgcaagtactgaatgcaggaagtttatgggaccataatgtggaatgctttcctttcccagttctgacgaatagttttcaagccctaacttgtacagcagagatagttaacattttgataaaggcatggcccaatgatttattttcccagaggaaatctggaagatgagtttgggtgagtagggggaaaggccctggctcaccatagttccttgtgcaaaatgctg

SEQ ID NO: 720339 - DNA, 648 bp, Homo sapiens
tggatatttatagaatatactcaagtgtatttattttagaaggtctgttagrcatttcacaaaagaatctgtaatctacagaaattaccaaattatgttacataatattttaaaaacttgttttagaataagttggaatgtgaggtttataaaacaactggaataataaactgaaattataatttaatttttatacccagtgcatttatttttcttcctatgacttgactatagtttaaaattcttataggtttagtatcccttttttgaaaacaggttttcaatgtgtttctgtaacaataatgaaaagtaaaggcatgtaatctcttttccaaaataaaagattggtttgagaattatgatcatatatacaatgtactaaatgcaaccttttatgatgatgatataaaagattcacagactcacaaatcatatgccactcaactaaaatactaagagaacataactttatctttataaaacatatacataggcataaatacatagacaaaggtctagaaaaatatgcatatcagtgtggaaatgcaagtgatgataatgatttctgttgttttcttctaatttctatagagtcactatgctatttaaattttcaaaaaattaagttatgtgcaataatctttttaa

SEQ ID NO: 720340 - DNA, 1258 bp, Homo sapiens
ctgtctataaagtgaaaatagattggagaaatacaggattggagcaacaatgctagttatgtggctgttaaaatagactaagtaagagatgagagtgatctgaactaaggttatgacagtgagatggaaattaatggatcgattccaagagatgccaagacttctggcttgaataagtggttggataaagggttggtagagacaacatatattttagacagagtgaacctgaaggtcctgcaagacatgaagtggcaacatttaaaacatagttaaagggctgttggacgtcatagactatccaagtttcaaaaccatgaattgagactggcataaatctgcaaatttgtgcaattatattcgtcattgttcaggattttatgcatagtcttggaggaaattgacagctaaattagacccacaacatgggtttgtcagcaattgtgatagaagaataatctatgttcttgagaaaagactcgaatatatattggtaagagagtctcattcataatggacaaaaaaatctaagctgaattaagacagaagtggacagagtaaagggctgaagagaagaaaataaaataccacattactggcagtccctgtgcgggggaggaggaactgcttttcttctcgtggatcacagggcttccttcatagaggctggccaatacagagttgggcagctggaattgtactttcagaatatctatgctatcagcctagcacagagttttaaatactgttgcaatacccaccacatcccacccagaggagccctggaatcttcatgagagatagcagtgctcttcttgtggagtttattaaggcttactgactgcttttaccctcagactattgggaaccaaaaatatttctgttgtctggaccatggaaaacaaagaccaggcaaaagagataggggtgaagtaagagatgagtgtaactttgacaggtatcactatcaatagtgacatctcaaatatttaggggaagcaccaccacatggttatcaacactattacatatgtgttattttgttatatttgaagactattatatgaagactaaatctgaaatactrgaatattaataatgaaaagtaatatcttgaccaagggtcctgatacagtatgatttgatttgcttcattaagggctggatggcaatatttttcttcaaatttccagtagagaaatttcataaagtttcatctactgtcaccttttaggaggtgacatcttttaatactttc

SEQ ID NO: 720341 - DNA, 1258 bp, Homo sapiens
ctgtctataaagtgaaaatagattggagaaatacaggattggagcaacaatgctagttatgtggctgttaaaatagactaagtaagagatgagagtgatctgaactaaggttatgacagtgagatggaaattaatggatcgattccaagagatgccaagacttctggcttgaataagtggttggataaagggttggtagagacaacatatattttagacagagtgaacctgaaggtcctgcaagacatgaagtggcaacatttaaaacatagttaaagggctgttggacgtcatagactatccaagtttcaaaaccatgaattgagactggcataaatctgcaaatttgtgcaattatattcgtcattgttcaggattttatgcatagtcttggaggaaattgacagctaaattagacccacaacatgggtttgtcagcaattgtgatagaagaataatctatgttcttgagaaaagactcgaatatatattggtaagagagtctcattcataatggacaaaaaaatctaagctgaattaagacagaagtggacagagtaaagggctgaagagaagaaaataaaataccacattactggcagtccctgtgcgggggaggaggaactgcttttcttctcgtggatcacagggcttccttcatagaggctggccaatacagagttgggcagctggaattgtactttcagaatatctatgctatcagcctagcacagagttttaaatactgttgcaatacccaccacatcccacccagaggagccctggaatcttcatgagagatagcagtgctcttcttgtggagtttattaaggcttactgactgcttttaccctcagactattgggaaccaaaaatatttctgttgtctggaccatggaaaacaaagaccaggcaaaagagataggggtgaagtaagagatgagtgtaactttgacaggtatcactatcaatagtgacatctcaaatatttaggggaagcaccaccacatggttatcaacactattacatatgtgttattttgttatatttgaagactattatatgaagactaaatctgaaatactggaatattaataatgaaaagtartatcttgaccaagggtcctgatacagtatgatttgatttgcttcattaagggctggatggcaatatttttcttcaaatttccagtagagaaatttcataaagtttcatctactgtcaccttttaggaggtgacatcttttaatactttc

SEQ ID NO: 720342 - DNA, 1323 bp, Homo sapiens
tagggaaattttttaaaggtataattaaaacatcaatcaaagacaaattggaaagcatctggagagaaactgtctgatttaattggtaatgttcaggttgaattaattaatgaaaacagagcttgtctaaaagcctagaactgtatgactgtgagaagtgtttaccttctaaatattttgtctgctataaaacaatgtttttaaggcataatgctttgctatatgtctgaataaacaaaggttaatttgttccctatacacattgtatttaacagaataaatgtaatactaaaatacgaaaaacttcttctgtaattatccttgtctctcacaagaattcaagtagattctcatggataaacagcattgactaaatttcacaagataattggcatgggataggcccaaactagtcagtatctcctggcctcttccaagtctcatttttcttatcaataaaatgaaaaatttaaacttaatgatatttacctttcttctaccttcagaattctaaaccataggagttaaatggagaagaaacagaatgaaacttttttattacaaataaatttgaattaaaaccctaaatgaacagataacaagatacaaccagtaattttactttctgattcatgtttgtatcaaatttattagtttatgtaactaacatctattgaacacttgctatatgccagtcactgtcttagatagtagaaatataatgaaaaccaaaataattatattcctatgcctcatgaagtttgtagtgtacagggatagatatatttgaaataaataaacacaggaatgcacatattatgtgttataatggaaaagtaaagggtttggagagacctgatttagactggatgagaagaaaaggtgggggaggtagatggccccaggactgagcacattccctgggacaagaaagaacagggagcttatcagaaactggaagaagtttgctgtggctggagctgcatgagaaggggagagcactgtgagatgaggctggggaagttggcagggaccacatcccacagacctgtgcatttgccctcctctatgcaatgagactttkctcaagagtattaagcaagggaattccatgatgatattttgcattaaaataatcacttagggtctggagtgaagaaagggttggtgaggggtaaagcagaaataagcagaatctttaaaagactcttccaagatttaggtgggagcttacagtgactagtcaggaaggttggcagtacggatgagggaaagcgggagccttgaaatcagtcatagcaaaagggatgctaagacaattgc

SEQ ID NO: 720343 - DNA, 1323 bp, Homo sapiens
tagggaaattttttaaaggtataattaaaacatcaatcaaagacaaattggaaagcatctggagagaaactgtctgatttaattggtaatgttcaggttgaattaattaatgaaaacagagcttgtctaaaagcctagaactgtatgactgtgagaagtgtttaccttctaaatattttgtctgctataaaacaatgtttttaaggcataatgctttgctatatgtctgaataaacaaaggttaatttgttccctatacacattgtatttaacagaataaatgtaatactaaaatacgaaaaacttcttctgtaattatccttgtctctcacaagaattcaagtagattctcatggataaacagcattgactaaatttcacaagataattggcatgggataggcccaaactagtcagtatctcctggcctcttccaagtctcatttttcttatcaataaaatgaaaaatttaaacttaatgatatttacctttcttctaccttcagaattctaaaccataggagttaaatggagaagaaacagaatgaaacttttttattacaaataaatttgaattaaaaccctaaatgaacagataacaagatacaaccagtaattttactttctgattcatgtttgtatcaaatttattagtttatgtaactaacatctattgaacacttgctatatgccagtcactgtcttagatagtagaaatataatgaaaaccaaaataattatattcctatgcctcatgaagtttgtagtgtacagggatagatatatttgaaataaataaacacaggaatgcacatattatgtgttataatggaaaagtaaagggtttggagagacctgatttagactggatgagaagaaaaggtgggggaggtagatggccccaggactgagcacattccctgggacaagaaagaacagggagcttatcagaaactggaagaagtttgctgtggctggagctgcatgagaaggggagagcactgtgagatgaggctggggaagttggcagggaccacatcccacagacctgtgcatttgccctcctctatgcaatgagactttgctcaagagtattwagcaagggaattccatgatgatattttgcattaaaataatcacttagggtctggagtgaagaaagggttggtgaggggtaaagcagaaataagcagaatctttaaaagactcttccaagatttaggtgggagcttacagtgactagtcaggaaggttggcagtacggatgagggaaagcgggagccttgaaatcagtcatagcaaaagggatgctaagacaattgc

SEQ ID NO: 720344 - DNA, 1323 bp, Homo sapiens
tagggaaattttttaaaggtataattaaaacatcaatcaaagacaaattggaaagcatctggagagaaactgtctgatttaattggtaatgttcaggttgaattaattaatgaaaacagagcttgtctaaaagcctagaactgtatgactgtgagaagtgtttaccttctaaatattttgtctgctataaaacaatgtttttaaggcataatgctttgctatatgtctgaataaacaaaggttaatttgttccctatacacattgtatttaacagaataaatgtaatactaaaatacgaaaaacttcttctgtaattatccttgtctctcacaagaattcaagtagattctcatggataaacagcattgactaaatttcacaagataattggcatgggataggcccaaactagtcagtatctcctggcctcttccaagtctcatttttcttatcaataaaatgaaaaatttaaacttaatgatatttacctttcttctaccttcagaattctaaaccataggagttaaatggagaagaaacagaatgaaacttttttattacaaataaatttgaattaaaaccctaaatgaacagataacaagatacaaccagtaattttactttctgattcatgtttgtatcaaatttattagtttatgtaactaacatctattgaacacttgctatatgccagtcactgtcttagatagtagaaatataatgaaaaccaaaataattatattcctatgcctcatgaagtttgtagtgtacagggatagatatatttgaaataaataaacacaggaatgcacatattatgtgttataatggaaaagtaaagggtttggagagacctgatttagactggatgagaagaaaaggtgggggaggtagatggccccaggactgagcacattccctgggacaagaaagaacagggagcttatcagaaactggaagaagtttgctgtggctggagctgcatgagaaggggagagcactgtgagatgaggctggggaagttggcagggaccacatcccacagacctgtgcatttgccctcctctatgcaatgagactttgctcaagagtattaagcaagggaattccatgatgatattttgcattaaaataatcacttagggtctggagtgaagaaagggttggtgaggggtaaagcagaaataagcagaatctttaaaagactcttccaagatttaggtgggagcttacagtgackagtcaggaaggttggcagtacggatgagggaaagcgggagccttgaaatcagtcatagcaaaagggatgctaagacaattgc

SEQ ID NO: 720345 - DNA, 1315 bp, Homo sapiens
tgcctcagcctcccaaagtgctgggattataggcgtgagccaacatgcctggcctgtatcagcaccctttatacgtggaggtcagtcttgctggacataaaatttttggctctttccttgaaaagtcttaattaatccatttccttctggcagaaagctcagtcctcaaaaaacctgattcccaggatgccccaaggattttttaagtccagaacttttcctaaaatactcttggtgttggtccttctcagaccctcactctttcagtggcactcatgtgtttgcttattttcaacagcatcacttttgaaggctttccatccttttcgatttataaaatcagccaggcgcggtggctcacgcctgtaatctcakcactttgggaggtcgaggccggtggatcacgaggtcaagatatcgagaccatcctagccaacatggtgaaaccccgtctctactaaaaatacaaaaaattagccatgcgtggtagcgggcgcctgtagtcccagttactcgggaggctgaggcaggagaatggcgtgagcctgggaggcagagcttgcagtgagccaagatcacgccactgcactccagcctgggtgacagagtgagactccatctcaaaaaaaaaaaaaaaaaaaccatcctcattttcacttggcattgttttttcactttgcattccctctactttgtctcaatttctgaaaggattcctgcatttctaatctttcttgagttctgtcacttcatttctgagtttttctaactctgattatgcttttcacgtttcatatcattttctttaagtttttttagttcatttttaaaattgtttttagactgggcgtgtgggatcacgcctttaatcccagcactttgggaggctgaggagggtgattacatgaggccaggagttcgagacaagcctggccaacatggtgaaaccccatctgtactaaaaatacaaaaattagccaggcgtggtggtgcacacctatagtcccagcgactagggaggctgaggcagaagaattgcttgaacccaggaggcagcggttgtagtgagcagagatcatgccactgcactccagcctggacgacacagcaagactccgtctcaaaaaataaaaaacaaaataaaatacaaaataaaaataaaacaaaaatagtttttaaatgtgttttctttggtctgttttgcaggcatgcctttctggcttgctttcattgttggtgggagtattattctgctccctactctgagccttctataggtttgactttgctacttttctgatgctcatttttatgg

SEQ ID NO: 720346 - DNA, 910 bp, Homo sapiens
ccctgttccacacatccccacgcacacaccatcagtgcactactgggacattctgctgtccggggctgagagtgaaccagaactctgcccataaatctagcacaccccactgtggaaacaatggggggtaaggaggggccgcccagcaaagaacaggacacacgttcctgaggatggagtcacttctggctgagacatctctgcaggggatgccggcgacaaaggctgccctatcctcctccctgggccagatggacaccacccctgccttctgccccctagcaccaggcaaaaggaaaatagaagaggttccatccaggttaaataccccagggcctcttatccgtaggaaacatgctggcccactctctccaaacccagcatgggggtggagaaacggtggggaaaacagcatctgtctcagatttcttgggtggagtttttgttttatttacactgtttatttttctgatttcctaaaatgggcatytggtgcctggcagcccttggcacagagaagacgcaaagcaaaccgttcataagaagggggcgagcgcagcctgagcatcccctgctcttgaacaaattgccaggctcagcgcagcgctgccgccactgctgttcccaggaagggacctctggccacgagcggctccagttcagctccttggacctaattattcaggcctgtgtctgagtccagcaaagaggtagctagaaaagtctccaagacatctaacgattccgtggctccagttgagaagtgagttatctttatgtgattttaaaataaaacatactcagaaggagagaagacaattgaaatctagctgtctggagtcatcccagatgaaagtatttgagtttttgggaggcaaaggaggcaggaaagcctggagtcagatgatca

SEQ ID NO: 720347 - DNA, 1212 bp, Homo sapiens
ctccttaattttaaaggctggaataaaatggaccctgaatgacatgtgctagagtgtttacagcagcactatttgtaagagccaaaactagaaatgacacaaatgcccacaaacaataaatttgagcaattaaaatgtgatatatgcatatattagaatgcaacatagcaataaagatgaatgactataaccacacatgaaaatgtgagtgcatcagacaagtcagataaaacagtacacacagtataatccaattgtttttgaaggacaaaatcagataatgctggtagaggtcaaaataatgggtgcctttgaattatttactggaaaggggcaagagggatgctggtgacattgtttcttaaactgggtgctagttaccagagggtgttaattttcaacaatttttcccgttgtacattatgaaatgtgtacttttctctgtgtatattttagctcaattaaaaaaaaagggagaaaaaagtccaacttgctgaagctttaacttttagaagttccctaagatgagaagatagagtggataaagggaagtttttgttcttcttcaaatggttatcttttaaaatattttgtctgtgactatttctataaaagcaaagtcatgactcaaaaagaaaatactgctagtaagaagccatcaggggccaagtcttgtcttagagaatgactcttcaggaatccccactatgtttgtatcttcacttcaccacttgcttaggggacaaccacctctcactctccactcagtaatttaaagaagctgatagcattggtctccatagatgattttttttctttctgtatcaaatgctttatttgttctttttattattcttgtgttcttagtctcggaggcatagcttgatttctcttccccttttcttcctttctcaatctaagatgtcaaacactaaagtacccacctctgatttccttctctaaatctggctaccttttctggtctagatgttgaggaaggaaaaaggtaggcagatctccctagaactggaagagctggagkgtggattaggagaactgtcttctgatgtatattgtccctcaatgggatcatcacagccatcccatgcaatagtgattttcagacaaggaacctctttgatttttaaaaaagatattggtatatatatacatattggtatatgtatatctgtgatgtctgattcatcagtg

SEQ ID NO: 720348 - DNA, 1212 bp, Homo sapiens
ctccttaattttaaaggctggaataaaatggaccctgaatgacatgtgctagagtgtttacagcagcactatttgtaagagccaaaactagaaatgacacaaatgcccacaaacaataaatttgagcaattaaaatgtgatatatgcatatattagaatgcaacatagcaataaagatgaatgactataaccacacatgaaaatgtgagtgcatcagacaagtcagataaaacagtacacacagtataatccaattgtttttgaaggacaaaatcagataatgctggtagaggtcaaaataatgggtgcctttgaattatttactggaaaggggcaagagggatgctggtgacattgtttcttaaactgggtgctagttaccagagggtgttaattttcaacaatttttcccgttgtacattatgaaatgtgtacttttctctgtgtatattttagctcaattaaaaaaaaagggagaaaaaagtccaacttgctgaagctttaacttttagaagttccctaagatgagaagatagagtggataaagggaagtttttgttcttcttcaaatggttatcttttaaaatattttgtctgtgactatttctataaaagcaaagtcatgactcaaaaagaaaatactgctagtaagaagccatcaggggccaagtcttgtcttagagaatgactcttcaggaatccccactatgtttgtatcttcacttcaccacttgcttaggggacaaccacctctcactctccactcagtaatttaaagaagctgatagcattggtctccatagatgattttttttctttctgtatcaaatgctttatttgttctttttattattcttgtgttcttagtctcggaggcatagcttgatttctcttccccttttcttcctttctcaatctaagatgtcaaacactaaagtacccacctctgatttccttctctaaatctggctaccttttctggtctagatgttgaggaaggaaaaaggtaggcagatctccctagaactggaagagctggagtgtggattaggagaactgtcttctgatgtayattgtccctcaatgggatcatcacagccatcccatgcaatagtgattttcagacaaggaacctctttgatttttaaaaaagatattggtatatatatacatattggtatatgtatatctgtgatgtctgattcatcagtg

SEQ ID NO: 720349 - DNA, 1084 bp, Homo sapiens
ttttcatccctggattccctaattccccacacagttttatttttaaagcctttgtacaagatgaaatgaccagagaagagctgttttttaaaaagggtttgaagtttgtttgcttaacaaagtgtttgcagtcataattaggttgcatattaaagttcaaaaccaactcaagttggaagtgactgaaaattgttaccatctgatggctttgtgggcggagctttcacaaacgacactgcacgcaccagggaataaaggccctattctgagcattgccccaggagacttcacgggtctgggcgacactcagactgcagatttcccgtagtggcatcatggatctaaatctaactgtcataatagcatggccttgatctgctggagttgtcccagtttggtttgctcttgttgttattttcacctccttagggttctcatgtcttatctctagtccacacatctatctgtggaactgcagaagccatgatgagttgtagctcccgggctcagttctgcaactctcaccatggaaaatccatctcaaagccaggttttctgagagagagagagagagagagagagaaagagacactgattagggtgtttgggatgagtcagctcctcatctgttgtgttgaaaggcaaaactgtctttaattttaacagtgctccatttccatcttcactggcatatgaagcctatttgggaacagaaagaggagttttatgtggtacatttcaaacatcttgcctcaggcaagaacctcactgtttcttagagggaaatctccttattggcctccacacctgagtcttttatttctacttaggaggagacagaatgatggaagcttgtctcttctaatgataagcacgaggtaagaattaagacctaatacaccccatgatggggcataattatgcaagagttagtacaaatgaccttgatgcttggagccatcacaggcattgtacttgctgaatgtatctgatktgtaggttcagtgtcaatctgaaaacccaggtttatatcagatgagaatggatttgtttctttaataaataaaaatataatatgattgta

SEQ ID NO: 720350 - DNA, 1820 bp, Homo sapiens
ttaaaaggctaaatgtttagctagcaaatacagagcacactttcctgaaaataacaagtttagtgttgagatgtttacagtttttctaaaattgcattttgattttgtaaaaacttgattaaaacaaggtcactagatgtcataaaaatgacatctagattttttttaaatctcacaaaataattatttgaaacaaacgtgttaggcatttcaaagtaattttttctactaagcgagcacctctactttataagttatataaagaatactattttgtatgaattatttatataagaattatatgagaataatattttcctaagacatacactacagtttccatctccacacaaagttttacagaagtcttcattttgaagattcaaaatattttaaactggtcaaatatttaaaactgtataaataattctatagaacagtcaagtttgctttcagcatgtttctaatacattgctagttggccaaaaacaaagcaaaaaacagaaagcagaaaaggctaacaaactccgtggagtagatttgaaagttaaagaggcagagcatgatctcaatttgagaaaggaggaggtaggatgaacataccactcctagtggcagccattatccaagcaactaatcttgctaatctgtctagtatgttctatttgttttgtgtttgttttgataaagtaacaacaacaagaaatgaggatggagttgtttaggtgaaatatgaagccttatggaaatagatgcagatttgctaccagtagctgaataatagaattgtgaacttgtgaattttctttagcatattttatacatagaaaatagtcattacatatttaacaattaaggaaaacatttcctgcatagcatcatacgttatagacattttcttataaacaactaatcaaaacactattttgttagaggccctgaatccataaagaaaaataagcttataaagtcttttgtcctataatcccctcaatgtaatggaatcttttctctaagttttcatggagtgcttctttttaattttaagtaaccatacatattttataagcaaacatatgctatttttccaaatcaaaagactttgcaagtttttcctagattaaaacaacaactctgcctctctgcactggcatccatctgtgttggtatgtgttgtacacacacgtgcacacacacacacacacacacacacaccatgacacacaggcagcagagggaggctggaaagatctgtggaaggagaatcagaaacctcaggaacctgttatgattctgtttacctaattgtgagayatgagcaaagtcacttaaattttcctgaaccccaattttctttttcataaattgtttataataataacatctctgcctgcctcagcagatcagggcgatactctaaaaagatgacatataggaaaatactttgtatgaagacatgattttcacaaatatttaagtacatttcttatgctgtaaaggctcagtttcaataacagctatctttgttaagcaaaagttgagttatgaaactaaaagtacaactttccaaatgatgtgggatttcctgttctgtgttttacagggccttgtccagatgggcaactatttattaccatatgaccaagccaagctttgattacagttattagggcatgaaaatattggctaagccaaggtccctgttgtgaaagataaggagcatgaaaatctaagaagtcatgggcatgatccttcactcatgggttctaatagttaagaaggctgagggtaatttaaaaaaaaatgaatagagctaaaaa

SEQ ID NO: 720351 - DNA, 1820 bp, Homo sapiens
ttaaaaggctaaatgtttagctagcaaatacagagcacactttcctgaaaataacaagtttagtgttgagatgtttacagtttttctaaaattgcattttgattttgtaaaaacttgattaaaacaaggtcactagatgtcataaaaatgacatctagattttttttaaatctcacaaaataattatttgaaacaaacgtgttaggcatttcaaagtaattttttctactaagcgagcacctctactttataagttatataaagaatactattttgtatgaattatttatataagaattatatgagaataatattttcctaagacatacactacagtttccatctccacacaaagttttacagaagtcttcattttgaagattcaaaatattttaaactggtcaaatatttaaaactgtataaataattctatagaacagtcaagtttgctttcagcatgtttctaatacattgctagttggccaaaaacaaagcaaaaaacagaaagcagaaaaggctaacaaactccgtggagtagatttgaaagttaaagaggcagagcatgatctcaatttgagaaaggaggaggtaggatgaacataccactcctagtggcagccattatccaagcaactaatcttgctaatctgtctagtatgttctatttgttttgtgtttgttttgataaagtaacaacaacaagaaatgaggatggagttgtttaggtgaaatatgaagccttatggaaatagatgcagatttgctaccagtagctgaataatagaattgtgaacttgtgaattttctttagcatattttatacatagaaaatagtcattacatatttaacaattaaggaaaacatttcctgcatagcatcatacgttatagacattttcttataaacaactaatcaaaacactattttgttagaggccctgaatccataaagaaaaataagcttataaagtcttttgtcctataatcccctcaatgtaatggaatcttttctctaagttttcatggagtgcttctttttaattttaagtaaccatacatattttataagcaaacatatgctatttttccaaatcaaaagactttgcaagtttttcctagattaaaacaacaactctgcctctctgcactggcatccatctgtgttggtatgtgttgtacacacacgtgcacacacacacacacacacacacacaccatgacacacaggcagcagagggaggctggaaagatctgtggaaggagaatcagaaacctcaggaacctgttatgattctgtttacctaattgtgagacatgagcaaagtcacttaaattttcctgaaccccaattttctttttcataaattgtttataataataacatctctgcctgcctcagcagatcagggcgatactctaaaaagatgacatataggaaaatactttgtatgaagacatgattttcacaaatatttaagtacatttcttatgctgtaaaggctcagtttcaataacagctatctttgttaagcaaaagttgagttatgaaactaaaagtacaactttccaaatgatgtgggatttcctgttctgtgttttacagggccttgtccagatgggcaactatttattaccatatgaccaagccaagctttgattacagttattagggcawgaaaatattggctaagccaaggtccctgttgtgaaagataaggagcatgaaaatctaagaagtcatgggcatgatccttcactcatgggttctaatagttaagaaggctgagggtaatttaaaaaaaaatgaatagagctaaaaa

SEQ ID NO: 720352 - DNA, 1555 bp, Homo sapiens
tggattactttcactttctttccctcttgccttcctttttcttttcttccttcacatctgtcttgcattttcctctctttcttcatggaaaccctattgatgtcagttgcttttctctctggtaccctcaacaatattttacacacagttcccttttgcttaggttgtatttttgttttatttaaagtttgatttggtacagaaaaaaatattcacatttaacaagctaaaacagccaaataaaatttactgcaacttttgtagaatttaatttgtgctacaagacgttacatttttttttctttttctttcttttttcttttttttcttttttttttttaagatggagtctcgctctgtcacccagctggtgtgcagtggcgcaatctcggctcactgcaagctccgcctccsgggttcaagctgttctcctgcctcagcctcttgagtagctgggattacaggcgcccgccaccaagccccactaattttttttatttttagtagagatggggtttcactatgttgaccaggttgttcttgaactcctgaccttgtgatctgcccgccttggcctcccaaagtgctgggattacaggcgtgagccaccgctcccggccaagacatgttatgttttttcttactgaagatttaattattaaatgtgtgtccctccaaacttcaaactacttcaagaggacaacgttgccttattcttctgtctgtcccttttctggtccatggttcagtgctgaataactgtttgacaaatgattgctggatggatatgaaaatgaatgaaagtatttcttcaaatctcagctatgagcatcacactacgcaccattttacaagagggctgaagcagtttatctttattgtccattccaattaagacatgttgtctgtggttaaaaacaaacaagcaacaaaactataaataaccttcagatgaattcattcagtaacctggctttatttccttgtaaaagtcaatctaacagatttttttctttttaatatttaaaaataaagcttgatttgtaggctgagtctggggctctggtgagttcctttcattgttagaaacctgtgaaaacaaggggtttagatgaggacaactgacagatccttcactatgaaatcacaaatgggcaccatcataataatcaggcgtatttataaatcagaaacaactttcccagcaagactgctttacctcacctcccactgcatgactgctcctttccagggctgtcaacttgcactcctattgctaattaactcaccactcaaagcaggtgaacagctaaaggaaagagccctcaatttttccttcctgtgttcattcccccttcaggtccctggactttgggactcattctgctcgacttgatccccgctctgcccattgatcacatacacacgtttacacctggcagaagaggaagaggaggcatgaaggaatggcctcttcagaatggagaaaaggtaggaatcatctgggatttttaccagagagaaccccttaggctgactcaggagttgaactgaa

SEQ ID NO: 720353 - DNA, 1200 bp, Homo sapiens
gaattcttgttattgttgttgatgttgttgtcatctgtatgggctcagattttcccacggatcaacttagaaactgcaaggtacagtgactctgcagtgcccaacatggagatgcagagatgtaaaccagtgcccagagcatgcagtgcagagcatggctcctgcctctgaccctgtcattgcagacctgggcaggctgctttccctccttgtccacccacttcctcactgggagacagtggggttggactggatcacccagtatctttccagacctagagctgagtatctactcaagtgtcagtgatatacataaaatcaaaggtcttctgcctctcatcaccccaagaacagatgaccatctgatttttccagttcatgacttctttgttgtgtaagtcagctttaacactacttagtttttttggcacctagcctcatcttgggtaatatcagtgaaaagctgagtttgatcgactagttatgcrttttaacatgttcacaattataaaaccattaaaaataaaagttgatcacccatggaccacctaatgtcaactttatgccatacattggaaaactccatagcatagatgagtaaaatcctcagagggtgacaaccagggcctcattcccaatctcaattactgatgcttctctgctttttcttcttctgcctcttttccacccttgccgggtgaccctttccagcccacagcgtctcctgcctcttcagccgacatggcccccatcagctcggggtcttctacctggacgtcctctggcatcccattctcatttgtttccatggcaactgggatgggcccctcctccagtggcagccaggccacagtggcctcggtggtcaccagcacgctgctcgccggcctggggttcggcggtggtggcatctcctctttccccagcactgtgtggcccacgcgcctcccgacggccgcctcagccagcaagcaggcggctaggccagtcctagccaccacagaggccttggcttctccagggcccgatggtgattcgtcaccaaccaaggacggcgagggcaccgaggaaggagagaaggatgagaaaagcgagagtgaggatggggagcgggagcacgaggaggatggagagaaggactccgaaaagaaggagaagagtggggtgacccacgctgccgaggagcggaatcagacggag

SEQ ID NO: 720354 - DNA, 765 bp, Homo sapiens
tttttttttattttattttgtgtttccagctattggaacattcaacctcaagactgtgatctytctgtggcatgcttggactcatagcacgcggaaaggaagcctgtcttgtgcattgttctaggacaaagtccattaagtgaaggtcttaataaaatattgaaggtcttaatgaaatactctcaaccctcaccagctccccaccagtgctaagcagggttttgccttctcctcccacatgtctaactagaattcttctaaaggaataaactaagagcaaaataaaagttatccatctccagcgcctgggattccggtctcacggtttttaaacctttttcctgtttccatagtctgagatgtgcctagaaaggccagccctagaaaggaatacataattatcttctagtttgctccatctccttggttcccatgaagaaatttcaagcctatgatgccttctcctacagatagatcctcttttcattctgatgtcattttgtgacagttggtgaataaaagcagcaagcccaggccaggtggcagagtatctgtgtctgcattttgatgacacctgtcatcagagaatctaggcacacaggctggggcagcatccatggacgaggcagaggaagtgggtagcctagaaactccaccagctgaggagttgtttcgtggtctcaacagcttgtagagtgttgatgtaattttgcaggtagacccaaacctttaagcaacttgcattttaccaagagttgctcatca

SEQ ID NO: 720355 - DNA, 1272 bp, Homo sapiens
tgaactggatagacccatcattccaatggtatgggcctaaaggaaaagttgtttcaggtaggattttgtttcaattattgtaattaaataaatgtatctgaattgtgtgcaacacaaaagaatgtttgtatctcatacatatttatgttatttcctcaattctttttcttgtgatttccttttggagttagagctaacaatgtagatagtgttcccatttttacatattttattttgatacagggacatactctaagaatgaactgtttggggggttctcaaagcatctataatcccccaaagttactttttctcacttaaaaaatactgtttgtatgactgatttgatcagtatttcctctagtcaacttcttgttttttaatcctgaaatacagattttactttttacttttattctaattttttgattggataaaagctgatttttaacactgtagttttaaaaaactacagttaacttagctggctttgtttcttgccttgcaaaaaatatagattaatgaattttcattttgaagatctgttcagtcatttttgcataccctcagagaaagttttcctttattgctctatttaccatgttttctttcctttctttttaaaaatcttattgctattttgagatcgtgcctgtggatagaaacttacaggcttattttattttcttggatgaaggagagcaatatatttatacaaagacttgctaaagaaacataggaaatactaatttttaatatgttttaattcatatttatatagctaagagatctcagctgtatgtttctgtggtatttatgttgatacaaaaataggtaattttaaagaattaatctcctctttgggtcagtctgtgtttttcttaggacaaattattcatcattcatttagtgaatgactacttggtggaagccgctgtgctaggttttatgggggatagaaagatcagacataacctctgcctcactacactagcaaagtaggaacgattgtgcaatttgttcatgggatcagcagggctcaacaacagaaatyctaataagttttgcagcttatataatcagagaagtgatccaggcgtaaaagcacccagtagtggaaatacaatcaaattttatttttatcactctctaatagtagcacataatgtaatagaaacatgtgttttaaatatgttttacattttatattgaaactctgcaagttgaaatatagaaacatttaagcattgaattttttattgtcattttttg

SEQ ID NO: 720356 - DNA, 1534 bp, Homo sapiens
taaggagccagcaccatactctcttctctcacaggatcattgttccatctctggtaggctgggtacatttgactgagtttattgcaactgcttctgccaattctttgaactaccaatcaatggggtgaggtttctaagcacaccagctactacacagaaacacatgataaagggagcagtactggaaagscatgtatttgcttgtgtgtgcatgcttgtcaatgtctgtgtggttatgcagatccatgagggggtttcttaatgcagtttaatggaatccatttggggtgaaaggtgttattttgtctaaagaaatctccccctcgcagtccagctctcagacagactctgcaacatggtcaccatctggggatgtctgatagatctgggacatgcgatcgaaaggactctcctcctcctcatcgttgtccacctcccggtccccggggggaatggcgttgggcatcatgtggatgtaggcagctgcgatttccttgtggaagaccgtgtcttggttgtaggagatgagctcattgctgatgttcaccgtctccaccggcgtgcgggagcagacgtggctgcaccccagcagctgggcaaacaccttccggaagtcggcgttgaaggcatagtgactgggttgagtgaggagttggcccagcagaaccagatgaagacatcgaatgtggtctcactgacgcaggggaagccggccggagggcctttggggtgtccactgcagaaaggaaccatgcagttaaggatgaagaagggcagccagcaacacacgaagacccccatgatcaccgacagggtcttgagaacctcggtctccttcttgatggaaaaccgcaggctggtgtcgggcgtgcagcctgcgctgctccggcagctctgcacgtgctctgcggccctctccagggaggaaatcctgcggatctgcacctgggcgatgcggtagatgcgcgtgtaggtcacgatcatgatggccatggggatgtagaagctgatgagcgaggaagggatggcgtaggttcgattcaggctggagtcacagttctctgccctcacgtcgggctcccaaacggcctcctcccagggcgtccagttggccaggttgtttggcaggtccagcccacctcaagagaccgcctggtccctgtgccagttgagctggaccggaatgaaggagatgaggctggacaaggtccaggccgggcggaccatgaccaaggccatgcgctgggtcatcttgcgctcgtagcggaagggcctggagatggcccagtagcgggccacgctgatgacctgctgacgcacaggttcaggatggaggcggtggagcacatgatgtcgaaggccacccagacgtcgcagaacgcttcaaagggccagtaaccggccacctcggcgactgccttccaggacatgaccagcagcgccacgaagaggtctgacacaggtagagacacgatgaagacgttggtcatcttggcgcgcaggtggcggctccacacgatggctgcggacacca

SEQ ID NO: 720357 - DNA, 1534 bp, Homo sapiens
taaggagccagcaccatactctcttctctcacaggatcattgttccatctctggtaggctgggtacatttgactgagtttattgcaactgcttctgccaattctttgaactaccaatcaatggggtgaggtttctaagcacaccagctactacacagaaacacatgataaagggagcagtactggaaagccatgtatttgcttgtgtgtgcatgcttgtcaatgtctgtgtggttatgcagatccatgagggggtttcttaatgcagtttaatggaatccatttggggtgaaaggtgttattttgtctaaagaaatctccccctcgcagtccagctctcagacagactctgcaacatggtcaccatctggggatgtctgatagatctgggacatgcgatcgaaaggactctcctcctcctcatcrttgtccacctcccggtccccggggggaatggcgttgggcatcatgtggatgtaggcagctgcgatttccttgtggaagaccgtgtcttggttgtaggagatgagctcattgctgatgttcaccgtctccaccggcgtgcgggagcagacgtggctgcaccccagcagctgggcaaacaccttccggaagtcggcgttgaaggcatagtgactgggttgagtgaggagttggcccagcagaaccagatgaagacatcgaatgtggtctcactgacgcaggggaagccggccggagggcctttggggtgtccactgcagaaaggaaccatgcagttaaggatgaagaagggcagccagcaacacacgaagacccccatgatcaccgacagggtcttgagaacctcggtctccttcttgatggaaaaccgcaggctggtgtcgggcgtgcagcctgcgctgctccggcagctctgcacgtgctctgcggccctctccagggaggaaatcctgcggatctgcacctgggcgatgcggtagatgcgcgtgtaggtcacgatcatgatggccatggggatgtagaagctgatgagcgaggaagggatggcgtaggttcgattcaggctggagtcacagttctctgccctcacgtcgggctcccaaacggcctcctcccagggcgtccagttggccaggttgtttggcaggtccagcccacctcaagagaccgcctggtccctgtgccagttgagctggaccggaatgaaggagatgaggctggacaaggtccaggccgggcggaccatgaccaaggccatgcgctgggtcatcttgcgctcgtagcggaagggcctggagatggcccagtagcgggccacgctgatgacctgctgacgcacaggttcaggatggaggcggtggagcacatgatgtcgaaggccacccagacgtcgcagaacgcttcaaagggccagtaaccggccacctcggcgactgccttccaggacatgaccagcagcgccacgaagaggtctgacacaggtagagacacgatgaagacgttggtcatcttggcgcgcaggtggcggctccacacgatggctgcggacacca

SEQ ID NO: 720358 - DNA, 590 bp, Homo sapiens
cccaggaggcagagggtacagtgaactgagattgcgccactgcaatctcagcctaggagacagagagagacgtctcctgttctcctggagaacaacaagtcatgatrtcagacaagaacttggattttggagacacgggtttgaatttcagtcattcattcttttattcagtaaatatctagcaagtactgacatgtcccagatgttgttttactcactggttatacaatgggagggagacagagaaagagagagagagagagagagagagagagagagacacgctattctaaaagcttgaagtctaggctgtgcagagtggctcatgcctataatcgcagcactctgggaggctgagacgggtggatcatgaggtcaggagattgagatcatcccggctaacacagtgaaactccctctctacaaaaatacaaaaaattagctgagcatggtggcaggtgcctatagtcccagctacttgggaggctgaggcaggagaatggcgtgaacccaggaagcggagcttgcagtgagccaagatcacaccaccgcactccaggctgggcgacagagccagactccgtctcaaa

SEQ ID NO: 720359 - DNA, 590 bp, Homo sapiens
cccaggaggcagagggtacagtgaactgagattgcgccactgcaatctcagcctaggagacagagagagacgtctcctgttctcctggagaacaacaagtcatgatgtcagacaagaacttggattttggagacacgggtttgaatttcagtcattcattcttttattcagtaaatatctagcaagtactgacatgtcccagatgttgttttactcactggttatacratgggagggagacagagaaagagagagagagagagagagagagagagagagacacgctattctaaaagcttgaagtctaggctgtgcagagtggctcatgcctataatcgcagcactctgggaggctgagacgggtggatcatgaggtcaggagattgagatcatcccggctaacacagtgaaactccctctctacaaaaatacaaaaaattagctgagcatggtggcaggtgcctatagtcccagctacttgggaggctgaggcaggagaatggcgtgaacccaggaagcggagcttgcagtgagccaagatcacaccaccgcactccaggctgggcgacagagccagactccgtctcaaa

SEQ ID NO: 720360 - DNA, 590 bp, Homo sapiens
cccaggaggcagagggtacagtgaactgagattgcgccactgcaatctcagcctaggagacagagagagacgtctcctgttctcctggagaacaacaagtcatgatgtcagacaagaacttggattttggagacacgggtttgaatttcagtcattcattcttttattcagtaaatatctagcaagtactgacatgtcccagatgttgttttactcactggttatacaatgggagggagacagagaaagagagagagagagagagagagagagagagagasacgctattctaaaagcttgaagtctaggctgtgcagagtggctcatgcctataatcgcagcactctgggaggctgagacgggtggatcatgaggtcaggagattgagatcatcccggctaacacagtgaaactccctctctacaaaaatacaaaaaattagctgagcatggtggcaggtgcctatagtcccagctacttgggaggctgaggcaggagaatggcgtgaacccaggaagcggagcttgcagtgagccaagatcacaccaccgcactccaggctgggcgacagagccagactccgtctcaaa

SEQ ID NO: 720361 - DNA, 663 bp, Homo sapiens
taacttttaaaatagttaactgcagcctgcattatgaggatagcatgccagcataaggaagttagcatcatctagagtgaccacagaagctgcatctgtccgtgtgactggacactgtatatgtccagatctctgcaaggaagagtcatgtcatactttagagtatgactgagtcacactcagagggaagtgattcccacaagcagctcccagccagtaactgagcttggcakggatactgaggcaggccccttcctgggagaaatgggactccagaagtcctggaccctctctacttctttttatacctgcttacaatttagccaattcttttctgagctcatctctttcttacagtagtgaccaagggatgttactaacgttcagtttccccatcttttcaccttaagcttcaagttccttcagcacatcatccgcccttcaagttattcctacaacagctttaccaaatatttcaccactgcataacatagattaccatctttccaaccctcagtaacggttctcttgctgactgccatctggccctagagccacatattttagggtttgtgttttggctgctccccactcctggtaccataacaccatctatcaaatctacctgtagatcatgaaattacatagggcttcaccaaaact

SEQ ID NO: 720362 - DNA, 620 bp, Homo sapiens
attttttcactaagctatgccatacattcagactttgctttatttcagattaaagctggaattattttttaaatgctggttccctgcacayagccaaacaatcagatctataactaagcccagcctgttcagttttatagtccatttcgttttgttttcatggcgaagacttactgtctgactgaaatagattaggagccctaagagaaattcatactgtccagtgagtttgtaaattgggacgataattttcagttatacctcccaagaatttcttcctttcgtaaaaagtaggtcacgtttgtgttaggctacacacattctttctggccaatgtatctaaagcgactttcatgtacaatcctgacccaaggaaagagacccaaagaaagtgaccatcaacagctttcacctttctttcaaatgccagagatcttgggcctcatcagaagcactgctgtcttctctccttttcctctagttacacatgcagaaatacttgatactttgacattttagtggcaactgatttcttccccaagccttggttgttcctaagtgatcttctaggcaaagcaggcttattatatctctaccacaatgtgctgggataatgggtc

SEQ ID NO: 720363 - DNA, 1980 bp, Homo sapiens
aaaaatatatgatcgctctctaactcatcttccttcccccaaatttctcatgcctatcccttcatctacagttttattgccagatctttaaaatgcctatcccttcctctatgattttattgccagatctctaatatatattttataacacctctaaaacatagtaacctcttatatagcagtgtaggatagtgaagagcatgaactttgaagccagaaggacctggattcaaattttaacttaagcatgtatgaaatatatgtgtttgaggaagttgcttcaactctctgggcttaattttgttatgtgtaatatatgagcactaacacacacatcaaagtgtttttgcaaatagtagatgagataacaattgtgcaaatcttctgggatattatcaaggctaatttttatttcctaacttccaccagcattaaaaaaaaacgatgtaggctgggaacggtggttcacacctgtaatctcagcactttgggaggccgaggcgggtggatcacaaagtcaggagatcgagaccatcctggctaacatggtgaaaccccatctctattaaaaatacaaaaaaatgagccaggtgtggtggtgggtgcctgtagtcccagctactcaggaggctgaggcaggagaatggtgtgaactcaggaggtggagcttgcagtgaattgagatcgcgccactgtactccagtctgggcaacagagcgagactgtctcaaaaaaaaattataagcctattttatatattataaattaaaatactaatttcaatttgactccatcaagcacattgctgacactctccttaaatttgttttacacacaacgtgcctcaaaactgatcagctttcggtttcctttcttagataatttagctactctgcctaaccttcaaggtcaccaaaagctgcttacatcattcctatccaacattttcccattacttcccaaggcccactataaacttacaggcatgcacatctaggccttcatcactttgaaaacatgctcttttcatttatgcagatgcttcccgttattcttcaacacttggatcaactctcagttcaaagaaaaccttttctgattataaaaacctttattgagctctcttgtttcaactcctaaagcacctgtgcaacactcaactttttcatgcatttcagtattacaactatccctctgtttgtttgcaaactccttaaagacagcaatcttcttttatggactttataactacatatgatggattaagtaaagtgctttaatttttgatttataaataaaaaaattaaataagaaaataaagatcgaaagtcagccgttgttatgtagtgttgtggtttgaattatgtccaccccaagaaagaagatgactctccacaagccaagtagagaggcctagaacaggttcttttatcatagccctcagaaagaactaacctgctgacaccttgattttggayttccagcctccagaatggggagtttaagccacctagtctcaggcactttgcttttgcaccctagcaaactaatatgtatggcattttatcttccctaatgttcccataaaaacagacagagcacttggagtacgaccatcaaaaaccatggacaacctctacatcaatactgggtggtaagttatcctcacaaaccttaaaatactaataggtgaggatataaactgcaagaacaagacccacatagcctggctggctgtgcaggaggaagcagagggaaggcacaaggacttttgagagccacgggatctagagaacacccaagtcaccaagctttggaaagcgtggaaagcaaatgttggacaagtaactgatttagaaaaggacttaacaggcttcaatttgcaggtagcaatctaagaaaacatggtaaggtcagatggtgttggagtagtcagagccctctgaactcagtaaaaaaattaaaaaactaaaactaaac

SEQ ID NO: 720364 - DNA, 1132 bp, Homo sapiens
taaacaaatttaataatttaagatgaaataaaataaattcagttgtggtagctagtgaatttcaagagctaaatagacacacttggctagtagttgtcatattggacagtacagagatggatcatttctctttgcagaaagcttgaacagcactgctctagggattgtcctaaggagtcacagagcataggttagtgtgaatcaagrgtctctccaaaaggttgatatttaataaagtaaaaaatcagtactgttttattagggacattcttaagtgaaactggcatctttttcttctcctgtctccatccctcagtgtgtggcactgaggattacaagatcacaagtacaatttggtgcatgctatgtttgaatgtgtactctccaaaattcagatgctgctaatgtgatagtattaagaggtatgtcctgtaagaggtgattaggtcataaaatcacctcccttgtgaatgggattaagacttttataaaagaggctgcatatagcatttggctggcttgcccttctgctttctcccatgtgaggacaccacatcacccgccgcctgatgatgcagcaataaggtaccatcttagaagcagaaagtagccctcgccagacaagcaaaccgatcagtaccttgattttaaacttcccagtctccagagttgtaagaaaataaatttctgtcctttataaattacaccagtcatcaggtattttgttacagcagcacaaaatggactaagacagttccattgcaacaaggtgccattcattaccttgatatatgctaaaaccccaacagcttcatctatcattgtctttttgccattactgcaaatgtcaacgtggtgaaaaagtcaattaatatttcagtattatgaagtttttttttttttcttgaagtcacagcttcgctttgctggactctctttaatgaacactttgtggaccccatgaaaagatcttggagactcccaggggttcatggaccacaattttagaaccactgccatcaaaagtaacgtcacctttttttggaacacattttgaaggatttgttgatattttagggagtatgagaaaaatagaggaattgtagaggaatctaagagaactccaaggttg

SEQ ID NO: 720365 - DNA, 1132 bp, Homo sapiens
taaacaaatttaataatttaagatgaaataaaataaattcagttgtggtagctagtgaatttcaagagctaaatagacacacttggctagtagttgtcatattggacagtacagagatggatcatttctctttgcagaaagcttgaacagcactgctctagggattgtcctaaggagtcacagagcataggttagtgtgaatcaagggtctctccaaaaggttgatatttaataaagtaaaaaatcagtactgttttattagggacattcttaagtgaaactggcrtctttttcttctcctgtctccatccctcagtgtgtggcactgaggattacaagatcacaagtacaatttggtgcatgctatgtttgaatgtgtactctccaaaattcagatgctgctaatgtgatagtattaagaggtatgtcctgtaagaggtgattaggtcataaaatcacctcccttgtgaatgggattaagacttttataaaagaggctgcatatagcatttggctggcttgcccttctgctttctcccatgtgaggacaccacatcacccgccgcctgatgatgcagcaataaggtaccatcttagaagcagaaagtagccctcgccagacaagcaaaccgatcagtaccttgattttaaacttcccagtctccagagttgtaagaaaataaatttctgtcctttataaattacaccagtcatcaggtattttgttacagcagcacaaaatggactaagacagttccattgcaacaaggtgccattcattaccttgatatatgctaaaaccccaacagcttcatctatcattgtctttttgccattactgcaaatgtcaacgtggtgaaaaagtcaattaatatttcagtattatgaagtttttttttttttcttgaagtcacagcttcgctttgctggactctctttaatgaacactttgtggaccccatgaaaagatcttggagactcccaggggttcatggaccacaattttagaaccactgccatcaaaagtaacgtcacctttttttggaacacattttgaaggatttgttgatattttagggagtatgagaaaaatagaggaattgtagaggaatctaagagaactccaaggttg

SEQ ID NO: 720366 - DNA, 1132 bp, Homo sapiens
taaacaaatttaataatttaagatgaaataaaataaattcagttgtggtagctagtgaatttcaagagctaaatagacacacttggctagtagttgtcatattggacagtacagagatggatcatttctctttgcagaaagcttgaacagcactgctctagggattgtcctaaggagtcacagagcataggttagtgtgaatcaagggtctctccaaaaggttgatatttaataaagtaaaaaatcagtactgttttattagggacattcttaagtgaaactggcatctttttcttctcctgtctccatccctcagtgtgtggcactgaggattacaagatcacaagtacaatttggtgcatgctatgtttgaatgtgtactctccaaaattcagatgctgctaatgtgatagtattaagaggtatgtcctgtaagaggtgattaggtcataaaatcacctcccttgtgaatgggattaagacttttataaaagaggctgcatatagcatttggctggcttgcccttctgctttctcccatgtgaggacaccacatcacccgccgcctgatgatgcagcaataaggtaccatcttagaagcagaaagtagccctcgccagacaagcaaaccgatcagtaccttgattttaaacttcccagtctccagagttgtaagaaaataaatttctgtcctttataaattacaccagtcatcaggtattttgttacagcagcacaaaatggactaagacagttccattgcaacaaggtgccattcattaccttgatatatgctaaaaccccaacagcttcatctatcattgtctttttgccattactgcaaatgtcaacgtggtgaaaaagtcaattaatatttcagtattatgaagtttttttttttttcttgaagtcacagcttcgctttgctggactctctttaatgaacactttgtggaccccatgaaaagatcttggagactcccaggggttcatggaccacaattttagaaccactgccatcaaaagtaacgtcacctttttttggaacacrttttgaaggatttgttgatattttagggagtatgagaaaaatagaggaattgtagaggaatctaagagaactccaaggttg

SEQ ID NO: 720367 - DNA, 2057 bp, Homo sapiens
catggactcttataaggaatcataatgacataaatcaaagaaaaatagaaagtaaagtgaaatgtaatgctaagcaacacatcgttattaaatcattttaagtttaagaaattgattaattgatgcaagtgattcaaatataagaaatatttctagaactgtttctattattactattttcttaaatgacagaattgagttttaaagatactctaaacatgacattatgagaatatactcatataatartatatacctcatagttctctaccagtcctaacatttttaaaagtttaatcataagtattaatacttttttatttttatttttattttttattttgtagatggaatctcactctgtcacccagactggagtgcagtggcgcaatctcggtttactaaaacctccgcctcccaggttcgagtgattttcctgcttcagcctcccaagtagctgggattccaggcacccaacaccatgctcggctaatttttgtatttttagtagagacaaggtttcaccatgttggccaggctggtctcaaactcttgacctcaggtaatccgtcccccgcagcctcccaatgtgctgacatacaggcgtgagccaccgcgcccgggcaatattttattaatactttggtattttttccttgtattgtacttccaagtgatgaaacttactttgaagttttcccagaaaggttttctttctctctgatgacattagaattattgaaagattgaatcttgactgtaaaattaacagattgttaaaaggcatctaaatcttttcagatagaattaataattcatgttcatttccattctttggttgtggaagtgattctggttgttaacagttcattcaaggaagaaataagagaaacaaaagttactataaaatttttgcagctatgcgaaagtaagttcctgattacctcgaccaattctccactcccaccataatagctcacttgggctgataaagaaaataatgtcattgttctttgtttgcttaaattgcaaaaagccggatttaattttattgtttctcattatgaaattatgagcttctccaaaatgcagaatatacacacacaatatgtcaacaataatcttaaaaaatctaagaaaaaatgaccaaattatttttgtcatttctatataaaatattcacatttgctaaatattatatctaaatctttcaaggctaagcaaaagtttcgtgataagacttgtatattaattaaagtaatagcattattgaatttcacttacaaaatattgcctgtaaagcaagataaatataaaagagataactatgagaaaaataattattatcaaaatgtacctgcacattaccattgttggcagaagaaaataatgttgagtgaagttttttcttttagtaatatataattaaaatataaatgtacataaaatgtatgtgctcattaatatgacagtatatgctaatccaagttcaaggggaaaaactgatctggccatttgagatatgagtaagagaacagaaaaacattgcaattcaacacaagcgtcatattgtcccaatgtaaaatatagaccttttgtatttaataatacatttcttttcagtctgggctcattttttcctccttgatatgtatgaaaaaaatacagtatttaatgtttctataataactactattttattgaattataaatcaaataggcatttgtaaaatcacctgctcactcagtttgattttgaaaatgattgtttataaaataaatattatatttattttatatatatatgtatatctgatgagagagatatatattgcaatacaataataggaggggattcaataccctgctttcaatattggacaaatcatccgtacaaattaataaggaagcattaaatttgaacactttaaaccacattaacctaacagacatatacaggacattccattcaacagcaacagaatacagcaacatcaagtgcacatgaaacattctccaggccaggtcacatgttgggacacagaacaaatcttcac

SEQ ID NO: 720368 - DNA, 2057 bp, Homo sapiens
catggactcttataaggaatcataatgacataaatcaaagaaaaatagaaagtaaagtgaaatgtaatgctaagcaacacatcgttattaaatcattttaagtttaagaaattgattaattgatgcaagtgattcaaatataagaaatatttctagaactgtttctattattactattttcttaaatgacagaattgagttttaaagatactctaaacatgacattatgagaatatactcatataataatatatacctcatagttctctaccagtcctaacatttttaaaagtttaatcataagtattaatacttttttatttttatttttattttttattttgtagatggaatctcactctgtcacccagactggagtgcagtggcgcaatctcggtttactaaaacctccgcctcccaggttcgagtgattttcctgcttcagcctcccaagtagctgggattccaggcacccaacaccatgctcggctaatttttgtatttttagtagagacaaggtttcaccatgttggccaggctggtctcaaactcttgacctcaggtaatccgtcccccgcagcctcccaatgtgctgacatacaggcgtgagccaccgcgcccgggcaatattttattaatactttggtattttttccttgtattgtacttccaagtgatgaaacttactttgaagttttcccagaaaggttttctttctctctgatgacattagaattattgaaagattgaatcttgactgtaaaattaacagattgttaaaaggcatctaaatcttttcagatagaattaataattcatgttcatttccattctttggttgtggaagtgattctggttgttaacagttcattcaaggaagaaataagagaaacaaaagttactataaaatttttgcagctatgcgaaagtaagttcctgattacctcgaccaattctccactcccaccataatagctcacttgggctkataaagaaaataatgtcattgttctttgtttgcttaaattgcaaaaagccggatttaattttattgtttctcattatgaaattatgagcttctccaaaatgcagaatatacacacacaatatgtcaacaataatcttaaaaaatctaagaaaaaatgaccaaattatttttgtcatttctatataaaatattcacatttgctaaatattatatctaaatctttcaaggctaagcaaaagtttcgtgataagacttgtatattaattaaagtaatagcattattgaatttcacttacaaaatattgcctgtaaagcaagataaatataaaagagataactatgagaaaaataattattatcaaaatgtacctgcacattaccattgttggcagaagaaaataatgttgagtgaagttttttcttttagtaatatataattaaaatataaatgtacataaaatgtatgtgctcattaatatgacagtatatgctaatccaagttcaaggggaaaaactgatctggccatttgagatatgagtaagagaacagaaaaacattgcaattcaacacaagcgtcatattgtcccaatgtaaaatatagaccttttgtatttaataatacatttcttttcagtctgggctcattttttcctccttgatatgtatgaaaaaaatacagtatttaatgtttctataataactactattttattgaattataaatcaaataggcatttgtaaaatcacctgctcactcagtttgattttgaaaatgattgtttataaaataaatattatatttattttatatatatatgtatatctgatgagagagatatatattgcaatacaataataggaggggattcaataccctgctttcaatattggacaaatcatccgtacaaattaataaggaagcattaaatttgaacactttaaaccacattaacctaacagacatatacaggacattccattcaacagcaacagaatacagcaacatcaagtgcacatgaaacattctccaggccaggtcacatgttgggacacagaacaaatcttcac

SEQ ID NO: 720369 - DNA, 1037 bp, Homo sapiens
accatgttggccaggctggtcttgaactcctgacctcgtgatccacccacctcggcttcccaatgtgctgggattacaggcgtgagccaccatgtctggccaggattaattcttaacaatctaaaagtagtatgcccctttccttggtctttaagccactctcgcttttgctgcttttactctgctatagcattccctgaagagagtatttatgctaaggcccattttggtcccagagcagtaggcatttccctatgctttcacactgttggggctaaactctctcatggccttcaactttgcctgcatttctgaacacaactgtcccatactcttctgagatagaaatgatgtcccagacctggattcatgaagcataatctttgctagttccctctaaatcttcacttgtgtgtacattctacatcattcagaatagtctacttaattttgcggtagcaggtaattctcaaatcttcatagtttaaatttacaagcatctatttcttccttgtaaaatgtattatcacctacaaccgtgcttattattgtagttacttaggtttccagggagaagaacctgagtgaatatttcaaatattaccgggtgaggaaaaaagagagcaaggaaggatattgcatttacaattgtctagcctggaagtgaaaaatgtaatttctacttcaagttcattggacaaaccaagtcacaaggttccattcaaccacatgaagcctagaaagtgcattgttgccatgatatagaataaaagtggaaacatttggtgaacagaacagaactaccacactcmctgtcatctttacccatttaagagaatttaacacacctccaactttctctaccacccacccacaccgcaagacgaatgggattctgctatttttttttaatttatgagattcctctccaatgagaccactagaaactattaaattacttatttataattgttgttcttgttttagtatcaacagtagaggtttgctaattagcactatgaacttaacactgggta

SEQ ID NO: 720370 - DNA, 617 bp, Homo sapiens
tcttattcattctatccatagtttaacaaaacaggtatctttaaatattttttgtttttctccttattgattgatatggtttggatttgtgttgccacccaaatctcatgtcaaatttgaggaggggccttgttggaggtgattggatcatgggggcagattttccccttgctgttctcatgatagtgagtgagttctcataatatctgaaggtttaaaagtgtgtgctgcttccaccttcactgtctctctctcctgccaccatgtgaagaaggttcttgcttcaccttccccttctgccatggttgtaagtttcctgaggcctcccagtcatgcttcctattgagcctgtggaactgtaaatcatttaaatgtcttgttaaataaattacccagtctcagctagttctttatagcagtgtaraaacagaccaataaagaaaattggtacctggagtggggtactgctgtgaagatatgtggaaacaactttggaactgggtaacacggagaagttggaaccatttggagggctcagaagaaaatagaaagatgacggaaagtttggaatttcatagagacttgttgaatggcttttaccaacattctggtagtga

SEQ ID NO: 720371 - DNA, 726 bp, Homo sapiens
cactccactgaaaatgacttggcaatactgagstcacactccaattatactaggatccacctgtaaggctgtgtaggctagtagttaaactcatggattctggcatcagactgcctaattaaaatcctagttctatagcccacaaactgcatgactaggcaagtaatttaattgctttgaacccatttctcatccataaaatggtgttagtaaccacatccacttcaaggaattgttttgggggttaaatgaactgatgtgtgtaaacgagttggcacagtatcttctttgcagcagatactaagtaaatgttagctgttgtcattatttttatttttgttgccatctttacaatgggacagcttgtgagtaacctagaaaaggcaccgcctggcaaggaactttatttactctctctcctaaagtctttccttatcacattttcaactcttaacatgtctacaggcttgtataacatttgcttaggtataatattttgcagatttccaagtcttttcacagccattatctccctgaaccctgagagtacccctgtaaagtaggtataattttttattcattttttacaagggaaacatctaagtcttggcaaagttgagcatttcctcaggtcacagccagtcctgctgatctgagtccagtgctttttccactatatcatattgctttccttgaggcaaagctttgcatgctatccagttctct

SEQ ID NO: 720372 - DNA, 1152 bp, Homo sapiens
tttctttcccccttctccacgagtactgtcatcaacctgaaatggcaccattaagcacctaatctttgagcctccggggaactgtcatcaaaatgctcaggaaccgagatgtacatttacaggcaatgtaactgggtagaggcaagcactaaacaagttcctcagcttgcactggtgaatgatgaaggcagagaatttcttagcttttastagagaggtgaattaagtacataattggggtggaaattgggataatagcacctcagggagctgtctgcacattttaagggcttttaggtatttagtaagttactgctttgacgcacttacctaatagtccatagcaaaacagttttcaagttcactgggccagaggtgccctgccccactctaaacatacaaagtgtataaattcctttttttcctatatatcctaacaattttggaatacatagtcacttgtaagtaacagtcagtatactcagaaaaataggcaaaatggtggttaatggtgttgtctatgttggagtcccacctcattttcttggatcagcttgaatagataaattcataaatatgtattcttagctgcaaaattctttaagtagttgcctttttacttccaaaagcatgaaggactttatttatctgtttattttatttctcagtgctcttatcaagtctttaaatttcttcatggagaaaacagcaattaggcaatagatgttcctatgtcatctcaatcagcagtagcaaaagttgttaagttgggcagtgcgctgggcaccgactgcatgattccatgccttccatccctgctaaagtcccccttgagaaaggagatgtgcgctgtggatgcagagctgaagccatgccactaactgcagccactaagcaattttgggctgggatagaaataccctagggaaaaagagatgaatgacttcagctcttcacaaggtgggtcttcaaatactccaatccagagttttctacatcaatgaactcagcacttattaaacatattatatacattatcacatttaatccttacaacaacccattatcctgctttcacaaatgagagtccaggatttcaaggttcatcaattgctcaaatcacagctggccaatgaaagagatttgaattct

SEQ ID NO: 720373 - DNA, 1261 bp, Homo sapiens
cttgatatggcaccaaagagactagagaatatgatagccttcctaaatgggactggggaattggcttcctgaattagttgccttgcatatgcttacccattatagaagtaccaaaaaacctattatgagttcaggaattaaacatgtatctttgcatctcaactgaaacccttagagaatgaagtgggtgatatcttattctcatgaaaagtcttcttatttttagacggtatcttgtgaaatttgtgaacatcttagttgttccacttttaaacatttttttacagtagtacccctttgattttactttctgtggtttcagtattggtggtcagccacatttcaaaaataggtgagtagaatataataagatattttgatacagagagaaagagagagaccacattcacaaaacttttattacagtatattacaattgttctattttattattagctattattgttaatatctttctgtgaataatttataaattaaactttaacataagtatgtatgtataggaagaaacatagtatatgtagggttcaatactacccatggttttaggcatctgctgggggtcttggagcacattcacygtggataagtggggactattatagttatctccttaggatcatctcttcatccttttacctgtatttaaaatgtatttaaaaatgtagctaatggttgattgccaggtgacaagtgagctttataattatctttgaaatcttgtcatttaaaggaccattgactgcctaaatgacattcaaacttgagttgcatttcaaggagaacattgcctggtgtattagtctgttttcacactgctgataaagacatacctgaaactgggaacaaaaagaggtttaattggacttacagttccacatggctgaggagacctcataatcatggctggaggtgaaaggcacttcttacacggtggcagcaagagaaaaatgaggaagaagcaaaagtggaaacccctgataaacccatcagatcacatgacactgattcactatcacgagaagtgcacgggaaagaccagcccccatgattcaattatatccccctgggtccctcccacaacatgtggggattatgggagatacaattcaagttgagatttgggtggggacacagtcaaaccgtatcatctagcataggactactaccattatcctctctctttttaaaactcctggatggaaatcttactttaattcattctcctttgaaatttcaa

SEQ ID NO: 720374 - DNA, 595 bp, Homo sapiens
tttcttgcgtatattaggagggcaatccattagctttggagcaatattgtaagctaaaattgaaagagacaggcaactctggagtgaaaaatggctgtgaccattttgacagctagaaagttaaatgcaactgtttkttgaggtggaaaataatatccataaaagtctttttatgccagcatcagttcaggacattggagcttcatagataaattgttttactggttttattcatgactgatagtttgaattcattctattctaaattctctctactcacaaagaactacaacctgatttttataccagcaatacttctccatcatacctcaactccaaggcaagtgagtaaggggtgatttctgctattatttgtgtttaagaaaaggtaatattgtttctataactgaaactgcagactccattattaggagaaaaaagggtcatactttcaggtggaattgaagttggtgagttggtttgatttttgcaagtgagagatgttgaatacattcaattctttgttcagtaagaggaaacattttcatatacctagtatggttatatgtactggagaggagaaaaagcagacaaa

SEQ ID NO: 720375 - DNA, 579 bp, Homo sapiens
tggttgacattttacatttagatctgcaatccatcaagaatagactctttattgttgttattgtatatggtgagaggcaggaagcagattttcctgacaatatgcaggtgtctttggattacaggtccaaagctctcatacggatgtttgattgtctcagcaccatgtgttgaaaagactattctttccccccataccgattgatgctcttgtcacagaaaagccggccgtattttcacacatctccttatttatcctattttgttctgttggtcaaactttctatcctcacatcactagtatactgaataagccagtactgtgttataacacacctgggtatctgcagtagcaagttacttagcagtgtttttgtcaacattactttggttattcttgggttttgtatttccatctagattttagaaatagcttatcacttttacaggcacacacacacgcacacattatgagactcccggttaaagcaggctctgtggtattccagtcactgaaaagaaagtgggtatgtttgttttcctytgaaaacaagaattaccattttgggcactggtcaac

SEQ ID NO: 720376 - DNA, 522 bp, Homo sapiens
attcctgtgatgatacagctaagtaagctgttcagctatgttatttaccctttaaaagatgagtaatttactcattggtaatcatgcagctgataacctttgttttgataaattgcttttgaattatatttctcaagccagaagctttattatatttggttgctaagacaagcaaattttaagagtagctttaaataacatgcttattagcctccttcaacaaggagtacaacattcttctctaccaaaacctrgtaaaattttagggttaaaagacagcatttaaatgaaacaaagctatgtatgtagactcacgacatgtaaatatttgcataattttggagatttactaaatagacattccatatagtttttaatgaatggagaaataaatatgtccttattttttgcatattgctgtactctaacatcagcatcgtgttccaagtaagtttatttagtggaattaactttcaggttttcaattttttaagggaaagacatgctgatttatttatataa

SEQ ID NO: 720377 - DNA, 665 bp, Homo sapiens
ctgtccactttttgttttaaaaattgtaaaaaataattactgtgactttctcttatgccaaaaataaacattttaatatcaaatgctggaaaatgccttcttttctacagttctataggcactcaaacaattaaattgctggtgctattttctggagaagtacatttaaataacttcttcttagaaactgtggtggcatccattatgtagattataatatgaattttaggaaaatagaaattggcttttgatgctcatctgaaactgattgacttgcacatccttctaacaaatgctgggtttcaaggaaacaaattctaatatttaatataccaaatatccctggactataacactaattataggagtgaattggccaggggcacctggggaattgaacaactcatctcgcctctaaattattgtgaacatctgggaacaggtataatggccttcatctggtattgggagtaaactggtgattcgttatcaaaagaactgtgaggcttagatctgcttcggacatgcactgctcctttagyaagtatgctgtaaatggatttaaagcatcattaggtaaatatcttagcacagttaggaaaactgactgtactgaaacaatgtactcaaatgcagttgtaatgatgtgcaaatgtgtccaaata

SEQ ID NO: 720378 - DNA, 621 bp, Homo sapiens
gcagaactgtgagtcaattaaacctcctttgtttataaattacccagtctcaggtagcatttttgtcacagtgtgagaacggactaatacaccgggcatgaaggctcatgcctgtaatcccagctactcaggaggctgaggagggaggatccctggagtccaggagtttgaggctgcagtgagctatgatgacaccactgcactccagcttgggtgacagagagagactccatctgtctgttattcttatctgttattcttaaaaataatrataattttttaaaaacgtacttcatataagtgaaatcatacagtattactcttcctgtgactggattatttcacttagcgtaatgttctcagggtttgtttacattgtagcatatttcagaatttccttcctttttaaagctggaataataatccatagcatgttgtccatacatttataccacattttgtttatccattcatccacggacgggcactttggctgttgtgaataatgctgctgtgaacatgggtgtgcaaataactctttctgtccctgctttcaattctgattattgaatttgagtattctttatttttctgagtattctttatacattctggacacaa

SEQ ID NO: 720379 - DNA, 621 bp, Homo sapiens
gcagaactgtgagtcaattaaacctcctttgtttataaattacccagtctcaggtagcatttttgtcacagtgtgagaacggactaatacaccgggcatgaaggctcatgcctgtaatcccagctactcaggaggctgaggagggaggatccctggagtccaggagtttgaggctgcagtgagctatgatgacaccactgcactccagcttgggtgacagagagagactccatctgtctgttattcttatctgttattcttaaaaataataataattttttaaaaacgtacttcatataagtgaaatcatacagtattactcttcctgtgactggattatttcacttagcgtaatgttctcagggttygtttacattgtagcatatttcagaatttccttcctttttaaagctggaataataatccatagcatgttgtccatacatttataccacattttgtttatccattcatccacggacgggcactttggctgttgtgaataatgctgctgtgaacatgggtgtgcaaataactctttctgtccctgctttcaattctgattattgaatttgagtattctttatttttctgagtattctttatacattctggacacaa

SEQ ID NO: 720380 - DNA, 1410 bp, Homo sapiens
cacaaatacaaatttagagctatgtgggattttagaatttatgaaaagtacaaactctcgttttgcagctgaagaaagtgaagcctcgagaaggccttgaagatataaatctgaagtgctatctaaatggttcctggcagggtccccagtggccccagtcccagttatccacagaagtatctagctcaataagtcacttcccgattggctgttcatccttccttatttcagcctttccagatccccaaaataaattatctgcatgcaagccctgcgtcagacttttgttttttgtggaacccaacttaagaygtatatatttcaaaatattgctaatataaggtttcatctgtggtaataagcaaaatgaatttgaaaaggaaaaaatacctcataaattttttgtctttttcaccacatcgtgaaagtaattttttttttttttttttttttgagacagagtttcactcttgttgcccaggctggagtccagtggcacgatctcggctcaccgcaacctccgcctcccaggttcaagtgattctcctgcctcagcctccctagtagctgggattacaggcatgtgccaccatgcccgcctaatttcgtatttttagtagagacggggtttctccatgttggtcaggctggtcttgaactcccgacctcaggtgatccacccgcctcagcctcccaaagtgctgggattacaggcatgagccactgcgcccagcctcatgaaagtaattttggcttgcattttagaaaaaacaattcttcaagttttagaatttatatttgtaatatgaattatgttacctgatgtatgaatctaagaaatttgtcttaatttaattcaatcttatttccaatgaaaagaaacaatgaagaaaatataacaaatagaatttattctccattctgcccttgcagttccttaatctgggaaatcttctctgaggctgtgtgcatgtaacaccaaaatatcccatcaatttttgttaaattgtcatgccactgttttagagctgtgttgattaaccagccatgatggttaaaacttttctggctataagtgcagaagatacaacaaaaactgattaaaacaattaggatgtttattctctcacataaccagaagtatggaggtgacatttttccaagccttggagatttaatgtttgtggcatggttttccttagactctctcagtcttcccttcatggaggcaggatagttgttgcagttctgaattacctgacttcatttgcataagtatgtatgtagcatatagcatttgcagatgtatataatgcatatataggtgcaatttacaatatttcatagacagctttccatatcaatgtatatatgtatacctcattctttttagtggtggtacaatattcc

SEQ ID NO: 720381 - DNA, 1410 bp, Homo sapiens
cacaaatacaaatttagagctatgtgggattttagaatttatgaaaagtacaaactctcgttttgcagctgaagaaagtgaagcctcgagaaggccttgaagatataaatctgaagtgctatctaaatggttcctggcagggtccccagtggccccagtcccagttatccacagaagtatctagctcaataagtcacttcccgattggctgttcatccttccttatttcagcctttccagatccccaaaataaattatctgcatgcaagccctgcgtcagacttttgttttttgtggaacccaacttaagacgtatatatttcaaaatattgctaatataaggtttcatctgtggtaataagcaaaatgaatttgaaaaggaaaaaatacctcataaattttttgtctttttcaccacatcgtgaaagtaattttttttttttttttttttttgagacagagtttcactcttgttgcccaggctggagtccagtggcacgatctcggctcaccgcaacctccgcctcccaggttcaagtgattctcctgcctcagcctccctagtagctgggattacaggcatgtgccaccatgcccgcctaatttcgtatttttagtagagacggggtttctccatgttggtcaggctggtcttgaactcccgacctcaggtgatccacccgcctcagcctcccaaagtgctgggattacaggcatgagccactgcgcccagcctcatgaaagtaattttggcttgcattttagaaaaaacaattcttcaagttttagaatttatatttgtaatatgaattatgttacctgatgtatgaatctaagaaatttgtcttaatttaattcaatcttatttccaatgaaaagaaacaatgaagaaaatataacaaatagaatttattctccattctgcccttgcagttccttaatctgggaaatcttctctgaggctgtgtgcatgtaacaccaaaatatcccatcaatttttgttaaattgtcatgccactgttttagagctgtgttrattaaccagccatgatggttaaaacttttctggctataagtgcagaagatacaacaaaaactgattaaaacaattaggatgtttattctctcacataaccagaagtatggaggtgacatttttccaagccttggagatttaatgtttgtggcatggttttccttagactctctcagtcttcccttcatggaggcaggatagttgttgcagttctgaattacctgacttcatttgcataagtatgtatgtagcatatagcatttgcagatgtatataatgcatatataggtgcaatttacaatatttcatagacagctttccatatcaatgtatatatgtatacctcattctttttagtggtggtacaatattcc

SEQ ID NO: 720382 - DNA, 598 bp, Homo sapiens
tgcttgagtgacatttagaaacatcagtgttcttaaatccttgggaacaaatgagacagaactccagggcactgaaatagtgtaatgctatgaaagttattgactttcaaaaatattttcacctgaggaatgactaatctagtgacataaatcttcaaaaatcatatgaacaaaatttccctaattatagatgagggctttaataaatatattttaaggcacaggcactgacatccgaggtaaaacaaaaaaataatttgttacgatttgattatttgcctgtacccaaatcagcagcagtactattcttaatctaagaaatctccctggtgtgaatgataaaatcaaatacaagtcttattcactgtaactttctcttacaatgcagctctgaaaatctctcctattttgttttatttttgtactccttttcaacaatcacaaaaagaaaacgatgactcttttctaayacaaggttaaggcagctaaaactgtcattctgcctctgcatatcactgtttctgtgataagaaataatgaaaatgactataaggttatgtgtctggcttgctgtaattttccaagcaactcacaccac

SEQ ID NO: 720383 - DNA, 632 bp, Homo sapiens
tgactgataaacagagtaattaaaaatattactgttgcttccaaggtagtgggaacctgtctaaaaattaatctccataaataaaagtaggaacctgaagatagaaagtcactcttttagaactcaggatagatttcaacaaattacttcttcttcattattatataggtatatgcccccatgaatttcttcctttccattaataacatatgtccaagtttagttccttaacatgatttttcataagattttacactagtttcctctgagcttcctgcctcactcaacaaatgccatcaattcttgcctgtagattccttcttgtcctgctgtcagagaaaacagcaacatcagcagcagaagcatcaagagcaacgacaaaacaaaagaaaactgtagaacaatgagatttaacacwaatagttctatctcaagatatttaataatcgaactcaatatggtcaaagacaaaggaaggatcttaaaagcagaaagagcaagagcaaggcaaaaaataacatacaaagaaattcccatacagcgggcagcagcagtgttctcattggaaaccttattagccagaaaaaagtggcatgacatatttaaagtgctaaaggaaaatacatatatat

SEQ ID NO: 720384 - DNA, 620 bp, Homo sapiens
ggatgaagaagtgggcattgaaatgctttcgtaagtgttcccttaaccgtactaaaaamtcacatatggaaaagattaaaggtggtaaatattaggcctcagtgcaacttctgtttactatgaccaacagtgtatataaatcatccattctattatttaacaagcagtacatattcattaaaatatttattggggtcctattagtttccacttaagagaaagtaaacagaaaaaattcaaaaatgcctacgtacatcagtgaaattaaacctgccccaaatactataaatcaaccaacagtacacttctatcctatttacacctctatcctgtttacactcgtttcaggttttaatgtttcctgtggtttttacatgttgagcttcatattttgtaatacactatttgtataatagaaaactcatcaaaagaagtgaattatctaaattaactttcaaaagcatcggttatgccaaaaagtaatactgttttaccatttttattcatgtgtataaatatctcaagctcctttctaaaattggttggtgatgcatgtgtaattttaattcatgcattaatctctacttatttgttcttgaataagatacaataattttcct

SEQ ID NO: 720385 - DNA, 620 bp, Homo sapiens
ggatgaagaagtgggcattgaaatgctttcgtaagtgttcccttaaccgtactaaaaaatcacatatggaaaagattaaaggtggtaaatattaggcctcagtgcaacttctgtttactatgaccaacagtgtatataaatcatccattctattatttaacaagcagtacatattcattaaaatatttattggggtcctattagtttccacttaagagaaagtaaacagaaaaaattmaaaaatgcctacgtacatcagtgaaattaaacctgccccaaatactataaatcaaccaacagtacacttctatcctatttacacctctatcctgtttacactcgtttcaggttttaatgtttcctgtggtttttacatgttgagcttcatattttgtaatacactatttgtataatagaaaactcatcaaaagaagtgaattatctaaattaactttcaaaagcatcggttatgccaaaaagtaatactgttttaccatttttattcatgtgtataaatatctcaagctcctttctaaaattggttggtgatgcatgtgtaattttaattcatgcattaatctctacttatttgttcttgaataagatacaataattttcct

SEQ ID NO: 720386 - DNA, 620 bp, Homo sapiens
ggatgaagaagtgggcattgaaatgctttcgtaagtgttcccttaaccgtactaaaaaatcacatatggaaaagattaaaggtggtaaatattaggcctcagtgcaacttctgtttactatgaccaacagtgtatataaatcatccattctattatttaacaagcagtacatattcattaaaatatttattggggtcctattagtttccacttaagagaaagtaaacagaaaaaattcaaaaatgcctacgtacatcagtgaaattaaacctgccccaaatactataaatcaaccaacagtacacttctatcctatttacacctctatcctgtttacactcgtttcaggttttaatgtttcctgtggtttttacatgttgagcttcatattttrtaatacactatttgtataatagaaaactcatcaaaagaagtgaattatctaaattaactttcaaaagcatcggttatgccaaaaagtaatactgttttaccatttttattcatgtgtataaatatctcaagctcctttctaaaattggttggtgatgcatgtgtaattttaattcatgcattaatctctacttatttgttcttgaataagatacaataattttcct

SEQ ID NO: 720387 - DNA, 892 bp, Homo sapiens
cacagggaagatgatatgaagacatataggaagaagaatgccatgtgatgattgaggcagagaacagagtgacgcttctataagacaagtaatctcaagaattgatagcaaaaccaggagctagaaaaaaaaagcatggaacacgttctcctcccatgtccttcacaaagacatggcactgctggcaatttgaaatcagactctggcctccagaactgtggagaatacatgtctgtcttcaagcaatccagtttgtggttccttgttttatggcagctaatataactgcattggcctcctcctcagcatctccaaccacaacacacagagcccttcaaaaataatgacaagtgaaagtgaagataatttcaccacaactttagtagggcattctggacactcagctatcattctctttatctttgaccaaaggcatttctctcctttatttctctacttcagcagctctctatcctcaaatccaattactttttgctaaaagcaaaacagcagtgtttctcaatctcagaaattgaaccatcaagtgaaaacttactgtctctcaatttacccacattcattgtcatgtcccggtcttacagctaacagacataaaaaataagataaaaacacctctcctttactgccaatagcgaatgccttcatccatgttctgaatatcattcttacattgcatcagcatccaaattcttacctttgcaaatggttcattactgacccaggtgtgctcrgccgaggaggccacttaaagcttcagagagtttctgagtcaaagagctcacaaaattggacatgatgacatgacagaggagaggctaggaaggaaattacgggaaagaggtcaaaactctgaggtgaatcagagtaagca

SEQ ID NO: 720388 - DNA, 1023 bp, Homo sapiens
ttggaaagtatggtctaagtagcttttaatcttaactgtgctatgatacagattttcagaagggagtaatatatacctaatgtagcaagagctaatgttaacatgatttttgctttgtaagcccttaagcagaaagggacagtgtgatgctgagatgttgtgattattattgtccttgttttaatggaggaccatgttgattgatggctagctgaagaaagactaccacaatttgtggaaagagaagcaagcagtagcatataaaattatggaaaatgttatctacagattcataaggtgttgctaaatacaaaagtagtaggaccaaacaactacttactrcacagtttgtctttgagttaattatataatgtatcaaattaaatacacagaaattaagtcagaaaatatgtacagaggccatgctattcttttataaaaccaccttataaaaatcctctctcagttgcacaaactttattctagtgactattcattatttttgtatatcaatgatggcttactgtaattagtaaaccagttacaaacacagctgtgttttccaaatgatccatatttcagtatgatttgtgtctatccctttgttgttgtttttatttattcgaaactcttttaaatagcagatctgttgagaatttaatcaaaggtataaaactcttggcaggaaaaaattcataaagaagcaacattttgaacatgctttgaaggtatttgaaataggatttcttctattttacttgagagaaaaatgcaggaagtaaaaatgcaagcaagatgataatgtattaataattaagaagaaaccaatggctttgattaccagatcacctcaaccatgatgcatttatgggtgaataaaactatatacatcccacattcatgatggttaagagcaaggaatcagttccagaagaactcacaattaatcaagttagtttcctcatccataaaacaaacatgatacctgtttaactggattattctaaatattaaatgaaagtg

SEQ ID NO: 720389 - DNA, 1023 bp, Homo sapiens
ttggaaagtatggtctaagtagcttttaatcttaactgtgctatgatacagattttcagaagggagtaatatatacctaatgtagcaagagctaatgttaacatgatttttgctttgtaagcccttaagcagaaagggacagtgtgatgctgagatgttgtgattattattgtccttgttttaatggaggaccatgttgattgatggctagctgaagaaagactaccacaatttgtggaaagagaagcaagcagtagcatataaaattatggaaaatgttatctacagattcataaggtgttgctaaatacaaaagtagtaggaccaaacaactacttactgcacagtttgtctttgagttaattatataaygtatcaaattaaatacacagaaattaagtcagaaaatatgtacagaggccatgctattcttttataaaaccaccttataaaaatcctctctcagttgcacaaactttattctagtgactattcattatttttgtatatcaatgatggcttactgtaattagtaaaccagttacaaacacagctgtgttttccaaatgatccatatttcagtatgatttgtgtctatccctttgttgttgtttttatttattcgaaactcttttaaatagcagatctgttgagaatttaatcaaaggtataaaactcttggcaggaaaaaattcataaagaagcaacattttgaacatgctttgaaggtatttgaaataggatttcttctattttacttgagagaaaaatgcaggaagtaaaaatgcaagcaagatgataatgtattaataattaagaagaaaccaatggctttgattaccagatcacctcaaccatgatgcatttatgggtgaataaaactatatacatcccacattcatgatggttaagagcaaggaatcagttccagaagaactcacaattaatcaagttagtttcctcatccataaaacaaacatgatacctgtttaactggattattctaaatattaaatgaaagtg

SEQ ID NO: 720390 - DNA, 1094 bp, Homo sapiens
  misc_feature 330, 331, 332, 333, 334, 335, 336, 337, 338, 339, 340, 341,342, 343, 344, 345, 346, 347, 348, 349, 350, 351, 352, 353,354, 355, 356, 357, 358, 359, 360, 361, 362, 363, 364, 365,366, 367, 368, 369, 370, 371, 372, 373, 374, 375, 376: n = A,T,C or G
  misc_feature 377, 378, 379, 380, 381, 382, 383, 384, 385, 386, 387, 388,389, 390, 391, 392, 393, 394, 395, 396, 397, 398, 399, 400,401, 402, 403, 404, 405, 406, 407, 408, 409, 410, 411, 412,413, 414, 415, 416, 417, 418, 419, 420, 421, 422, 423: n = A,T,C or G
  misc_feature 424, 425, 426, 427, 428, 429: n = A,T,C or G
tagaagcctacttaaagagaaaatttaaattatttatcttagggacttcaattcattgaatcattaattatctatggtataatatatacaacgaatttttctaatttttagtacattaaaggtcagaatgaatacaaatgtgtatttcttatcctacaatgaaaaatacataactgtttttagattaatttacttattgtgatttcatatttaatatatatccaaattggctatttaataaaatctaaatactataacctgtacaattacagtcatgcatcatttaatgacagagacacattctgaaaaacgaatctttaggtgattttnnnnnnnnnnnnnnnnnnnnnnnnnnnnnnnnnnnnnnnnnnnnnnnnnnnnnnnnnnnnnnnnnnnnnnnnnnnnnnnnnnnnnnnnnnnnnnnnnnnntgatgctgctgataaggttgtgctgacaatcacccatttaaaatcttgcgatattaatgcagaaaatatttttttaatattaatgcagttggattgataagaaatgaacaaaacaaaggccacaatataaatggctggtagctttaaaagccagacataaacgacattattatcaaatartttcctaatatgatcacagacatttaaaaccatcttccaaaacatcatgtaaagaggatcagagcaaattgataaaagtactttctgaagtatctttctatttccaagaagttattttgaaacataactttaaaatattttaaaatctgccctctgccaacaaagtaccactttatttgaaagacagaaagctttttggcaatgaagtaattcctgattccataaagtaagacgacatctttagagtttacaatgagattccctcacaacagtcagatgagtcaggcaaggggtttccatttgactgctggggagatgggtgggaaagcctgatgaggaaacccaggctccctgacctgtgggagtgttgctcacatacagccatttacacttctggtaagtactgaggagtgtggggtcagaagcaactcatcactcaaccagaggactcagctttgcctgctctcagtctttctggtgtaaag

SEQ ID NO: 720391 - DNA, 653 bp, Homo sapiens
tgagctcccaggggtagagattgcggtggtcaattgtatttcatgtgacgatcccaacactgtgccttgcccatcactggggcataacaagcttactctaaagatgctcttaaagattcccaaagcatttaaggagaacaaatcaaaggaaatgttttattattattattattataatttaagttttagggtacatttgcacaatgtgcaggtttgttacatatgtatacatgtgccatgttggtgtgctgcacccattaactygtcatttaacattaggcatatctcctaatgctacccctccccctgccccccaccccacaacaggccccggtgtgtgatgttccccttcctgtgtccatgtgttctcattgttcaattcccacctatgagtgagaacatgcggtatttggttttttgtccttgtgatagttttgtcctttgtagggacatggatgaagctggaaaccatcattctcagcaaactattgcaaggaaatgttaaattcttatttttttctctttaaggcaaaattttaaaaataagatctctctgttataatcaagaattgtatttggcttttcaaaataggctctttccaaaaaggatcttcctttaaagtgcttgatgatcatttttgtctctttacaaa

SEQ ID NO: 720392 - DNA, 653 bp, Homo sapiens
tgagctcccaggggtagagattgcggtggtcaattgtatttcatgtgacgatcccaacactgtgccttgcccatcactggggcataacaagcttactctaaagatgctcttaaagattcccaaagcatttaaggagaacaaatcaaaggaaatgttttattattattattattataatttaagttttagggtacatttgcacaatgtgcaggtttgttacatatgtatacatgtgccatgttggtgtgctgcacccattaactcgtcatttaacattaggcatatctcctaatgctacccctccccctgccccccaccccacaacaggccccggtgtgtgatgttccccttcctgtgtccatgtgttctcattgttcaattcccacctatgagtgagaacatgcggtrtttggttttttgtccttgtgatagttttgtcctttgtagggacatggatgaagctggaaaccatcattctcagcaaactattgcaaggaaatgttaaattcttatttttttctctttaaggcaaaattttaaaaataagatctctctgttataatcaagaattgtatttggcttttcaaaataggctctttccaaaaaggatcttcctttaaagtgcttgatgatcatttttgtctctttacaaa

SEQ ID NO: 720393 - DNA, 1402 bp, Homo sapiens
tggcttgcttcgtgggaaaaggggcaagggaaatccagtttctaaggcctgcctcaggagaggatggggggaaggtcaaagagacctactcttctgtggttttctcagtttccttcagcttaaaatcctcagcatgccaaggtgccatattttgggatagtaggttctatgtcctggcagtagctactggttatatgtggctattgagcaattagaatgaggcttgcttgaattgagatgtggtaaagtgtaaaatactggactttgatatcttactatgagaaaaaaagaatgtaaaaatacctcaagttaattacatgttaaaatgataatgttttggataggttgggtaaaatgaaacatattattaaagttaattttacctgtttcattttactttctaaagccttaaagttttaacagctgtatcacatttcaggayttcaagagtcttaattgattgaagatagaagaaattggcatttgcatcactctccccagctgtaccttcacagacctggacatatatggtcactgtaattaagtgacaactcataaatgtcccttaagggtgggaagtgttgatctggctgacaggacagactcacatttagttaggagatgggttattgaaatttaacatagttaggagatgggttattgaaatttaacacagttaggagatgggttattgaaatttaacatagttaggagatgggttattgaaatttaacatagttaggagataggttattgagatttaacatagctaggagacaggttattgaaatttaacataggagataggttattgagatttaacacagttaggagatgggttattgaaatttaacagggctacagcagtccctccattaggaccttccttcctcatcttacaagatgagaagaatagatacttattacagatatcatcattactagttacacacaatgcaggaaaggaggatcagatactcctggaggctgttcttcatcacacatgcttttctcaatgcatgtatatgtgtgttatatgagttatctcaaacagttccacctctgacttggtttgttctttgagctgtaatgtatttaaaagtcactgtcactatttgtgggggggatgtgtgtgtgtgtttgaaacattctgagaaaaatctgtatagtgatgatatgtgcctttatgggcatcttgtaatgttgactggtgactttttgtttttctgatgctttttatctctgagatttttactttttttaataaaattatctcctgggtttcctcttacatttacattctgcagaagtcttagtccctttttgatcaatttctttattgaacagtcttttaccattcctcaacgcatccagagtcacacttgataactcatgtgaggcc

SEQ ID NO: 720394 - DNA, 1402 bp, Homo sapiens
tggcttgcttcgtgggaaaaggggcaagggaaatccagtttctaaggcctgcctcaggagaggatggggggaaggtcaaagagacctactcttctgtggttttctcagtttccttcagcttaaaatcctcagcatgccaaggtgccatattttgggatagtaggttctatgtcctggcagtagctactggttatatgtggctattgagcaattagaatgaggcttgcttgaattgagatgtggtaaagtgtaaaatactggactttgatatcttactatgagaaaaaaagaatgtaaaaatacctcaagttaattacatgttaaaatgataatgttttggataggttgggtaaaatgaaacatattattaaagttaattttacctgtttcattttactttctaaagccttaaagttttaacagctgtatcacatttcaggacttcaagagtcttaattgattgaagatagaagaaattggcatttgcatcactctccccagctgtaccttcacagacctggacatatatggtcactgtaattaagtgacaactcataaatgtcccttaagggtgggaagtgttgatctggctgacaggacagactcacatttagttaggagatgggttattgaaatttaacatagttaggagatgggttattgaaatttaacacagttaggagatgggttattgaaatttaacatagttaggagatgggttattgaaatttaacatagttaggagataggttattgagatttaacatagctaggagacaggttattgaaatttaacataggagataggttattgagattyaacacagttaggagatgggttattgaaatttaacagggctacagcagtccctccattaggaccttccttcctcatcttacaagatgagaagaatagatacttattacagatatcatcattactagttacacacaatgcaggaaaggaggatcagatactcctggaggctgttcttcatcacacatgcttttctcaatgcatgtatatgtgtgttatatgagttatctcaaacagttccacctctgacttggtttgttctttgagctgtaatgtatttaaaagtcactgtcactatttgtgggggggatgtgtgtgtgtgtttgaaacattctgagaaaaatctgtatagtgatgatatgtgcctttatgggcatcttgtaatgttgactggtgactttttgtttttctgatgctttttatctctgagatttttactttttttaataaaattatctcctgggtttcctcttacatttacattctgcagaagtcttagtccctttttgatcaatttctttattgaacagtcttttaccattcctcaacgcatccagagtcacacttgataactcatgtgaggcc

SEQ ID NO: 720395 - DNA, 641 bp, Homo sapiens
taaagcaacctttgtttgccaagcctctagttttataaaacatgackagagggactccatcttgaagtaaatagctaggcactctcaagacacctataaagttaatgcttatgatcttaaaacagccacattctaagctgaccaccaattataattacaaaatatttatggcgataaagaacatttcccaccaagcctacagatgcccagatgtcctaagtgtgcagcccactttacttaaaaataaaattaatgagcaggcttaggttaaagattaatggtcattatagcaccaatggcccctacctttagtgagcacatctgcacattccatgtttaattaactcctaaaagcgttttaaaagtagagatactaacaaaggatggagcatttttcttcctgctttctgaaaacgccctactctgtaatggagtagttttcaataaacttgctgctttcactgtgctctgtgactcctctcaaattattttctgtgcaagatccaagaaccgtttttggggtctggatcgggatgctctttttccagcaacaaaaaagacatacacaaggatgttaacagcagctttattcataattttcccaaacttaaaacaatataaatgtttattttcaggaaaga

SEQ ID NO: 720396 - DNA, 641 bp, Homo sapiens
taaagcaacctttgtttgccaagcctctagttttataaaacatgactagagggactccatcttgaagtaaatagctaggcactctcaagacacctataaagttaatgcttatgatcttaaaacagccacattctaagctgaccaccaattataattacaaaatatttatggcgataaagaacatttcccaccaagcctacagatgcccagatgtcctaagtgtgcagcccactttacttaaaaataaaatyaatgagcaggcttaggttaaagattaatggtcattatagcaccaatggcccctacctttagtgagcacatctgcacattccatgtttaattaactcctaaaagcgttttaaaagtagagatactaacaaaggatggagcatttttcttcctgctttctgaaaacgccctactctgtaatggagtagttttcaataaacttgctgctttcactgtgctctgtgactcctctcaaattattttctgtgcaagatccaagaaccgtttttggggtctggatcgggatgctctttttccagcaacaaaaaagacatacacaaggatgttaacagcagctttattcataattttcccaaacttaaaacaatataaatgtttattttcaggaaaga

SEQ ID NO: 720397 - DNA, 641 bp, Homo sapiens
taaagcaacctttgtttgccaagcctctagttttataaaacatgactagagggactccatcttgaagtaaatagctaggcactctcaagacacctataaagttaatgcttatgatcttaaaacagccacattctaagctgaccaccaattataattacaaaatatttatggcgataaagaacatttcccaccaagcctacagatgcccagatgtcctaagtgtgcagcccactttacttaaaaataaaattaatgagcaggcttaggttaaagattaatggtcattatagcascaatggcccctacctttagtgagcacatctgcacattccatgtttaattaactcctaaaagcgttttaaaagtagagatactaacaaaggatggagcatttttcttcctgctttctgaaaacgccctactctgtaatggagtagttttcaataaacttgctgctttcactgtgctctgtgactcctctcaaattattttctgtgcaagatccaagaaccgtttttggggtctggatcgggatgctctttttccagcaacaaaaaagacatacacaaggatgttaacagcagctttattcataattttcccaaacttaaaacaatataaatgtttattttcaggaaaga

SEQ ID NO: 720398 - DNA, 641 bp, Homo sapiens
taaagcaacctttgtttgccaagcctctagttttataaaacatgactagagggactccatcttgaagtaaatagctaggcactctcaagacacctataaagttaatgcttatgatcttaaaacagccacattctaagctgaccaccaattataattacaaaatatttatggcgataaagaacatttcccaccaagcctacagatgcccagatgtcctaagtgtgcagcccactttacttaaaaataaaattaatgagcaggcttaggttaaagattaatggtcattatagcaccaatggcccctacctttagtgagcacatctgcacattccatgtttaattaactcctaaaagcgttttaaaagtagagatactaacaaaggatgkagcatttttcttcctgctttctgaaaacgccctactctgtaatggagtagttttcaataaacttgctgctttcactgtgctctgtgactcctctcaaattattttctgtgcaagatccaagaaccgtttttggggtctggatcgggatgctctttttccagcaacaaaaaagacatacacaaggatgttaacagcagctttattcataattttcccaaacttaaaacaatataaatgtttattttcaggaaaga

SEQ ID NO: 720399 - DNA, 641 bp, Homo sapiens
taaagcaacctttgtttgccaagcctctagttttataaaacatgactagagggactccatcttgaagtaaatagctaggcactctcaagacacctataaagttaatgcttatgatcttaaaacagccacattctaagctgaccaccaattataattacaaaatatttatggcgataaagaacatttcccaccaagcctacagatgcccagatgtcctaagtgtgcagcccactttacttaaaaataaaattaatgagcaggcttaggttaaagattaatggtcattatagcaccaatggcccctacctttagtgagcacatctgcacattccatgtttaattaactcctaaaagcgttttaaaagtagagatactaacaaaggatggagcatttttcttcctgctttctgaaaaygccctactctgtaatggagtagttttcaataaacttgctgctttcactgtgctctgtgactcctctcaaattattttctgtgcaagatccaagaaccgtttttggggtctggatcgggatgctctttttccagcaacaaaaaagacatacacaaggatgttaacagcagctttattcataattttcccaaacttaaaacaatataaatgtttattttcaggaaaga

SEQ ID NO: 720400 - DNA, 775 bp, Homo sapiens
tggaatcagcaaaccatggtatgcaacaaatgctgcttggaaggctgaggaaaatattccatatatctactcatgcctgccagttcccaaggtaattgtggcaacacaaacaaatttatcaaaagcaccattaaatgtattgcagttttttgctatttgtattggttcctgyggatacaaattaaaattatggcatttatggtggaaaggtctctgaaatttttcaatgttttaaatgggaatgtcttgctcaaaaaagtttgaattatcttttcaaattctccaagccctactctttttctcctctccttctggctctctgattatacaagtgttagatctattgagatagttctacaggtccctgaggttcatttctttttcgtctaatttatcctgtttttcaaattgggtcatttctgttggcccacattcaagttaactggttctttcctctgttgtatttattattctattgagtccatccagtgaatcttttatatctgttattacattttttcagttctaaaatttttattttgttctcctcatatcttctatttctttgctgagactttttgttttacctcttgtttgaaatgcagtcataattgcttgtttcgtggtggctggggtaaaatccttgttagataatgccaacatctatgccatcacagtgctggcatctgctgattgtcatttcttattcaaattgcgattcttgaggctcttgaaatggcaagtgatgtctttattgtatcctatacagtttgat

SEQ ID NO: 720401 - DNA, 775 bp, Homo sapiens
tggaatcagcaaaccatggtatgcaacaaatgctgcttggaaggctgaggaaaatattccatatatctactcatgcctgccagttcccaaggtaattgtggcaacacaaacaaatttatcaaaagcaccattaaatgtattgcagttttttgctatttgtattggttcctgtggatacaaattaaaattatggcatttatggtggaaaggtctctgaaatttttcaatgttttaaatgggaatgtcttgctcaaaaaagtttgaattatcttttcaaatwctccaagccctactctttttctcctctccttctggctctctgattatacaagtgttagatctattgagatagttctacaggtccctgaggttcatttctttttcgtctaatttatcctgtttttcaaattgggtcatttctgttggcccacattcaagttaactggttctttcctctgttgtatttattattctattgagtccatccagtgaatcttttatatctgttattacattttttcagttctaaaatttttattttgttctcctcatatcttctatttctttgctgagactttttgttttacctcttgtttgaaatgcagtcataattgcttgtttcgtggtggctggggtaaaatccttgttagataatgccaacatctatgccatcacagtgctggcatctgctgattgtcatttcttattcaaattgcgattcttgaggctcttgaaatggcaagtgatgtctttattgtatcctatacagtttgat

SEQ ID NO: 720402 - DNA, 1352 bp, Homo sapiens
ctcctgtaattattctgacacagtaaatatatattaaactaagtcatagttttctttatgggatggttatctattaagcttcatttaccttttcaaaactgtgttgttatctgatcaactatacctggccatataagcaatacaaaataatcagttattatagctggttcttattatgttattattaaccagtgaagtctctatgtaatgcatatgttagtaacctaaaagattacagaatacattatataattaaaagagcaaggcatcttggttcaaattccaattctaacttatatcaagtttgattcatttgttaagctaatttatttaaatcacaatcccttaatttgttaattcagggactttatagctcataggcttattgtaagacaaactgagataatgagatggtgaataatccaattattttagagagtaaacataattaatggaaagaagatgagatctatgagtagacgacagtaatatttcaaatcttgcatttcaaattcttgcattgttattagtcaactgtcaccacattaatgctgcaaaacaaaccatccccttactagctggaatacaacaataagtatttctttctttctgaaagtaaactgattgtcattagccaccagtttggagctagctgggcttggtccaggtgttaagctgagctctggtctgctggcatgtgttcctatcctgggtatgagtttttcatgataatggcaaaagcacaagatactaagctaactctacttgcgacacattcattaatatcctattgatgatagaaggtctcatgagccaaaaaaagaaaaaaatatctaggaggaggacttaactctgccaaccataaagccaacgtaaattatatgaagtgggaggtatatcctcccgcacagagttgtgatgagaaagaaattgaatgccacatgaatatgttgttagaaatgtcatacttatttgttaagtgtttgtgtatatgtttgactctcaagaaaatcagatcataaaaagaggagtggctcatctcacaaaatctttgtttggaaatcgatctgcctttattaagcactagaggctaaagagttgatttcaatgccatttgatatatgaatacactagcataaattgtattcatctaagatcaatgattaaaaggagggcatttatcattctcccctatcaggcacagaggagaagtggtgtgccgccctagtggtattgccataagatgtctatctgatttgctttctttactcacttcaacattctgtattaaagcacattcccaattaataaaatgtcagtaaktggtaaacaagtgcgatgcatcaatgaat

SEQ ID NO: 720403 - DNA, 673 bp, Homo sapiens
tactcagagcaatctttaaataatgcaaacaaagattatgccacttttctacttaaaaaacttcaattactttcctttgctctttatatctttaaccacatacttaacatcctcgacaaaaatctgtgatatagtctacaagtcctgccatttgtgattcagcaaatacaatcttccttgtgtccacacagtgttgtgtagtcttctaagcatagggacttcacacaagttgctccctttgcatgtttctatacaacccataaatcccagctcagactttacttcctcagcgacgtttctcagatcttcaaaattgggccaaatctatcatatgtcttcttaccactttctacctttcctttataaaataaaattgcagaaattcagtcaaaacttcaggctctacttctaattctagttgtttttctatttccaccacatctgcagtttctttctccactaaagtctcgaaatccacccacagtaatccctgaggactggaaycaacttcttccaaactcctgtgaatgttgatatgtcgaacttctatgaatcacaagtgttcttaatggcatctagaatgcagaacactttccagaagttttcaattgagtttgccaagatccatcagagaaataattatctatggcaggtatagccttatgagatgcat

SEQ ID NO: 720404 - DNA, 1229 bp, Homo sapiens
taaaacatctcaactgttcttgtggagatggccttaaaacaagataaaagaaagcatggaaatggttttcatttctaatttagtccctatgctatggtttatggattaaatcaaattagcaaatttttactgagctactactaggagtaggagtcaggtgaccctacaatttaccttagcatttctgtatccgcagtttggtgtaacaaactgacctaacacttgtatttctcagatgcaagtatagataaggcatgaatctccttgcaagctaaaactagcaaaaattcatataaagaaaataagacttcaaagtgtgggatatttaaacattagttaagtacaatctttgatagggagcattagaaaaggattgcaatttagtagctaaaacaattagttcattcaacttatcattaaggttgcaggcactcttctatacgctggatatgaacttctcataaaaaaaagagagactctgtgtgttcttggagcttcacacattctactactctgtccagaaaaccactttgagagaagagtcataatggcttaaaggatagttttcaaacttaaaggtccatcattatcaattatgagcttttagaaaaactaatgccccagtccaagtaaaatctcataggtgattctaatgcagccaaagttgagggtcactgcatatttgtacaactctaattcttagtactgatattaaaaatgttgttggactcttgtttcacaaagttttaaggtatatttgcctcactgtaaacaagcaaaccataacaaaacataaataattatccttctcaggctctgggacaaattgaattcttagtacaataagagtatcacaaaggccagactacaaaggaggttagaacccaaggttaaaatattcaagtattgctgcaacatgcagaagataagatttgttcccagaatattaggrgaaaaaatgtcttaaatatgagccaccaaaggcaaaaaacccaacagaaaaaaaaatgaattaataatatagccaggaaattcagagaaaagacaaataaccataaagatctgaaaagatactcaatctcatgagttaataccaattaagattaaagtgaaacaaatgtaagttaaataaagtgcaaaactaaagagatagacttcacagatactgttctagaacaggtagactcatacattgttggggaaatataaattgtacagttgtgaaaatg

SEQ ID NO: 720405 - DNA, 1229 bp, Homo sapiens
taaaacatctcaactgttcttgtggagatggccttaaaacaagataaaagaaagcatggaaatggttttcatttctaatttagtccctatgctatggtttatggattaaatcaaattagcaaatttttactgagctactactaggagtaggagtcaggtgaccctacaatttaccttagcatttctgtatccgcagtttggtgtaacaaactgacctaacacttgtatttctcagatgcaagtatagataaggcatgaatctccttgcaagctaaaactagcaaaaattcatataaagaaaataagacttcaaagtgtgggatatttaaacattagttaagtacaatctttgatagggagcattagaaaaggattgcaatttagtagctaaaacaattagttcattcaacttatcattaaggttgcaggcactcttctatacgctggatatgaacttctcataaaaaaaagagagactctgtgtgttcttggagcttcacacattctactactctgtccagaaaaccactttgagagaagagtcataatggcttaaaggatagttttcaaacttaaaggtccatcattatcaattatgagcttttagaaaaactaatgccccagtccaagtaaaatctcataggtgattctaatgcagccaaagttgagggtcactgcatatttgtacaactctaattcttagtactgatattaaaaatgttgttggactcttgtttcacaaagttttaaggtatatttgcctcactgtaaacaagcaaaccataacaaaacataaataattatccttctcaggctctgggacaaattgaattcttagtacaataagagtatcacaaaggccagactacaaaggaggttagaacccaaggttaaaatattcaagtattgctgcaacatgcagaagataagatttgttcccagaatattaggagaaaaaatktcttaaatatgagccaccaaaggcaaaaaacccaacagaaaaaaaaatgaattaataatatagccaggaaattcagagaaaagacaaataaccataaagatctgaaaagatactcaatctcatgagttaataccaattaagattaaagtgaaacaaatgtaagttaaataaagtgcaaaactaaagagatagacttcacagatactgttctagaacaggtagactcatacattgttggggaaatataaattgtacagttgtgaaaatg

SEQ ID NO: 720406 - DNA, 1737 bp, Homo sapiens
tgttgaagaactggacttggtgggtatgaagtgggtattgtagggtttagtgtggtttatagccgtggtccccaacctttttggccggtttcatggaagacaatttttccatggactgggtggtgatagttgccagatgaaactgttccaccttaaatcatcaggcattagattcgcataaggagcacacaacctagatccctcgcatgtgcagttcacaatagggttccagctcctgtgagaatctaatgctgctccttatctgacaggaggcagaactcaggtggtaatgcctgctcaccgctcacctcctgctgtgtggctcagttcctaacaggccatggagcaggaccggttcgtggcccaggatttggagaccgcaggtttacagcatagaaccctggatttataatcaaaggacatagcttttgagtcctaattcttctacccattgggtggtgagattctcagtaacaacctagcctttctgaattctacctgcttttttgtaaaacacgaattcacaaagtttacaaacatcatgatgttttagaaagggctacttgagataatacatgtaagacactctgtaaaatgtttaataaacattcataattagcgttgccactaataaaccattttctccacatcacatcccaaactgagatataataatagaacagaatgttttctgggcactgctgtccttactggatgccgggacttcatctgggaggaataaagtgatgtaacaggtgtttaaattcattaggcaattatacacagccttctttcctcataatatctggtctctcacagaaaaatataacggaacttaatatatcatttggatgacctgcatttgtttagattgttgaaggagcaagacacatgggttgatttgggatatggttcagaatagaacaaaactggatttattaagaaatatgatccttactgtaaaatttctggtgtgtttcatttaggagttattacagaaacctattcaagagtggaatttcctgatattacttaaaaggtaatgtttgagttagaagctaaataaagcgtctagtacctcctgtaatttttattactatctggtaatcaacatttatagcacaatgttaagactttttatcctttacttttattaaggtttgactggcccatggcatgaagttgcatgtgttttctgcacttctgaatgttgctggagttcactgttgcactgaatgtgcctagcaggrcaccatacaaggggacaaagacagccagtgcatttgaacgagggcatgtttaagtagggagtaagaagccagagattccagtcagttaaccggtcccttccacttcttattcccctttgcttaatccgaatttactgagtgccagacatgcacctggcaaaaactttttgcttgtctccctgcagggttccaagggccctgagccagtcaaaaaatgatcgacagttcagttagggagagttcactaaactacaactgttaaagcagacagaattcccattagaagaatgctttttggacctaatccaatgaaaataatctattaaaacaagttgtctaatcttatgagttaacatgaaaagagaagtggatgcagggtgaattgcaaaatgtttgcacgtgtaagttcagtttatttaattttaaataattagggcatggcaatgattagtgctaattggagctatgtcaggctgaaagaattatc

SEQ ID NO: 720407 - DNA, 1304 bp, Homo sapiens
  misc_feature 472, 487, 601, 602, 603, 604, 605, 606, 607, 608, 609, 610,611, 612, 613, 614, 615, 616, 617, 618, 619, 620, 621, 622,623, 624, 625, 626, 627, 628, 629, 630, 631, 632, 633, 634,635, 636, 637, 638, 639, 640, 641, 642, 643, 644, 645: n = A,T,C or G
  misc_feature 646, 647, 648, 649, 650, 651, 652, 653, 654, 655, 656, 657,658, 659, 660, 661, 662, 663, 664, 665, 666, 667, 668, 669,670, 671, 672, 673, 674, 675, 676, 677, 678, 679, 680, 681,682, 683, 684, 685, 686, 687, 688, 689, 690, 691, 692: n = A,T,C or G
  misc_feature 693, 694, 695, 696, 697, 698, 699, 700: n = A,T,C or G
aaaatggggattttaacttgggctttgagagtataaaaaaacagagtgcacctcctaattcaaggcttcttaggcccatctaatgtaaaaagagtttttcatttcggtcttaatctagaaaactggggatttaacactgagatttgtagaaaggcctggacattaataaagcacaattttattctggtttatcatcttgtacatgtatctgccttgcaaattatgcgggagatataaattaaggaattgatatgtcctagcaaagacacccawaatgccattttaacttcactttaatcacatctgttcaattaaaactttttcctggcctcttaataagctgtcatactaggcacatcaaagtagtctcagattaagcccgttcttccattttcacttccaagcccaaatcacagtcttgaattttactactttagttcaatggagaatcacacttgtcttcttcataganaaaaaggatatgggngagtacatgggattagcaaaactttacccttacggtgatgaacagtagccttgaatctgacctgagaaatagataaaggtggaggtaaactgggaaagaaagggtttccatggnnnnnnnnnnnnnnnnnnnnnnnnnnnnnnnnnnnnnnnnnnnnnnnnnnnnnnnnnnnnnnnnnnnnnnnnnnnnnnnnnnnnnnnnnnnnnnnnnnnnctttcccttggatctcactgagttttcttaaaatccatattttgaatttttttaatctgccatttcatacatttcaccctgcgttaggatccattgctagagagctagcacaatttttgtgaagtgtcaaaacaccttggctttttgcactgccagagttattaaactagttctttctcatcctagggagctatcatgtcttatttttgaaattgctaaagttgtgacgaggcttttctaaattcttttttgagggtattactgtagtttatgttgtggatgatcatttggctttgtttctgggtgctttcaggggacaaaggctctgtatggattctttggttgtggataggtcctatgtggtagctttctcagatgctgcttgtcgtagtgatgtatttttgttggtggtgcagttcaggctgaagtccagtagatggtgcttaagagtaagagcttgcaggtagactgctgcctagaggacacacccaccctgacaggccttgcaggaagagattataatgtgttaagctttagtctctggggaaaggggctaagtgtgggtaccagttcctcatccttccccaacagaaacataatccgc

SEQ ID NO: 720408 - DNA, 1304 bp, Homo sapiens
  misc_feature 472, 487, 601, 602, 603, 604, 605, 606, 607, 608, 609, 610,611, 612, 613, 614, 615, 616, 617, 618, 619, 620, 621, 622,623, 624, 625, 626, 627, 628, 629, 630, 631, 632, 633, 634,635, 636, 637, 638, 639, 640, 641, 642, 643, 644, 645: n = A,T,C or G
  misc_feature 646, 647, 648, 649, 650, 651, 652, 653, 654, 655, 656, 657,658, 659, 660, 661, 662, 663, 664, 665, 666, 667, 668, 669,670, 671, 672, 673, 674, 675, 676, 677, 678, 679, 680, 681,682, 683, 684, 685, 686, 687, 688, 689, 690, 691, 692: n = A,T,C or G
  misc_feature 693, 694, 695, 696, 697, 698, 699, 700: n = A,T,C or G
aaaatggggattttaacttgggctttgagagtataaaaaaacagagtgcacctcctaattcaaggcttcttaggcccatctaatgtaaaaagagtttttcatttcggtcttaatctagaaaactggggatttaacactgagatttgtagaaaggcctggacattaataaagcacaattttattctggtttatcatcttgtacatgtatctgccttgcaaattatgcgggagatataaattaaggaattgatatgtcctagcaaagacacccaaaatgccattttaacttcactttaatcacatctgttcaattaaaactttttcctggcctcttaataagctgtcatactaggcacatcaaagtagtctcagattaagcccgttcttccattttcacttccaagccyaaatcacagtcttgaattttactactttagttcaatggagaatcacacttgtcttcttcataganaaaaaggatatgggngagtacatgggattagcaaaactttacccttacggtgatgaacagtagccttgaatctgacctgagaaatagataaaggtggaggtaaactgggaaagaaagggtttccatggnnnnnnnnnnnnnnnnnnnnnnnnnnnnnnnnnnnnnnnnnnnnnnnnnnnnnnnnnnnnnnnnnnnnnnnnnnnnnnnnnnnnnnnnnnnnnnnnnnnnctttcccttggatctcactgagttttcttaaaatccatattttgaatttttttaatctgccatttcatacatttcaccctgcgttaggatccattgctagagagctagcacaatttttgtgaagtgtcaaaacaccttggctttttgcactgccagagttattaaactagttctttctcatcctagggagctatcatgtcttatttttgaaattgctaaagttgtgacgaggcttttctaaattcttttttgagggtattactgtagtttatgttgtggatgatcatttggctttgtttctgggtgctttcaggggacaaaggctctgtatggattctttggttgtggataggtcctatgtggtagctttctcagatgctgcttgtcgtagtgatgtatttttgttggtggtgcagttcaggctgaagtccagtagatggtgcttaagagtaagagcttgcaggtagactgctgcctagaggacacacccaccctgacaggccttgcaggaagagattataatgtgttaagctttagtctctggggaaaggggctaagtgtgggtaccagttcctcatccttccccaacagaaacataatccgc

SEQ ID NO: 720409 - DNA, 593 bp, Homo sapiens
cctctgggcggatgtagctttgcacaatggtgcggcttggcaagtggaattctagcagagttgtagtcctgattaactcccttggccagccatctttgtctaacagccaaactgcatgatcatacaaggtagccgtgggactgggatccatgaagattatttccttaagattttttttagtaactgacaaggcaagtagacacagtcacttcacagtttgtaattacttatttgcaagatttaatatctgctcccagtttaatgagttccatgaaagtagggactctgtctttactcactccatatgccagtgcccactatagtgcctggcacatcataagcactcattacttgttcaattctcttaatagctgtggctgcaatactttgggaagagcaaaaagattatctcataactcttagttcataactctcagacatgaccgctgtccagaagtttatggcaaacacaaraacccacatgtagagaagagtgaagaagacaggcagagactgctagctagaaatgttacaaattctagaccatggcctactactgcttctgcataatgtcctatttaaatagagtagca

SEQ ID NO: 720410 - DNA, 591 bp, Homo sapiens
ggatggaaaggatgatgagttgcttccagaaatatacatatacatatatatatattcttcttggatgatttttaagaacctttaaattagtttaattttagaaacagcactgtaacaatccactctatgctccttgaaaaaaaaattttcaaaaactatatggaaaggaatgtttgacattagattcggagtgtgtctttaagattaaaagaggccaacttttagggcaggtccctggtctttgacagtggcccctctataatctttcttgagaaactggmaagatatttagaaatcgtagtattttacatagtgttccatttaccaataatcctaattttctaaaaatatacttaggaagtttacatgaacgtaagcaaaatacagccacaagaatattcattacattattattcatgattacaaaaaattggaaacaaaattgatggaaactaaatgtccaccaataggagattggctataaatatatattgaaatatctcattgtcattacaaatgagggtgcagaggactgtttaatgacttgcatatatgttcatggtatatttttaagaattaaaaaaatttaca

SEQ ID NO: 720411 - DNA, 677 bp, Homo sapiens
aaggggttatcattgaaggtccatgcataagataaatctgaaaaacaagaaacaaaacaaaacaaaacaaaaccatactgtccttactgcattcattcatatctgaaaattctttgtcttacttccccataattaggagaaaattgtgcctctatttgcycagttgatagctgtcatctggtgtaattgtaatattcccttatattgaaatatagctcagattggacgataaattatgtgggcactttccccatcattgactttttgggattaaggatataacaataggatgttatggaaataagtggatgagtttattaagaaataccataagacgtataaaataataactgttccaaatgtacactgaattccttaggaaaaacttatgctgcttcaaagcagtgtttctcagtgcattatcagaagaattaaacatacttacaggtacttgttaaaaatttaacttaaaaatttcagttcaagaagtctaccacagaccttgaagttcactcatttgatcattacataatttcttttttatttttaaagagatggggtctcactatgttgccccagctggtctccaactcctgagctcaagtcattctcctgccttagcctcccaaagtgctaggattacaggcatgagccactgcactggcctgattattaca

SEQ ID NO: 720412 - DNA, 916 bp, Homo sapiens
tgcatgcatgtaccagaatctcacatggaccccataaatgtgtacaattattctctatcaaaaacgtttttaagaaacatgcaggaatacactgtacctcttccttgctgtctctggatattgtcacaggaggacttgacatgcggattgtggcagcctctgtgaccaagagcagaagacaatagcagcatagaaacctcaaatgaaaaacctaacatctcaagctactaatttagccaaccttggcatcagctatctctggtcttagtacatgaggtgataagcccccactgttcaagttgggtggccatcaattgctgcagaatagaagttaatgaggcttcctcctcctggatcccctactagaccctgacatacccattcagtcacaggyagaaagggaagcagagggtaaggagacctggctggctgtgccagacgcagatcttacctgtcctgcttagaacactcaaagctcaattggttaacaaaaaaaaggaaaaacacagtaaggagtataacactccccagatgcaacttaatctaacactctatactttaaattttctgaacatacatagaaatcagaccactacttctgcagaacattttactggtaaaaagaacagcccacatgagggaaaactgatttggtggaaagacaacagaaacaaaatatgggaaataggtaaggtgataacatgggggagaggtttttcttgtgtttcaccaggagaaaatcagcttcctgtctggatactcactagacatttgaagttctacaatgaacccatcagagatgcaaatgaaagtgcctccgcagagacagaaaacccgtaatcgagcatcatcgactcgcagggtgaacaaaatggtgatatcagaagaacagatgaagttaccatccaccaaggaa

SEQ ID NO: 720413 - DNA, 1123 bp, Homo sapiens
tagattcattccattctatgctaaataacacatttaatgtacacatactatgtgccagggattggttgcttaatactgaatgaggtagtccttgccattagaaaaattacagtttggtggaagaggtagtcaagaacaccatcacagagcagagtgccatggtaggagagttayaggaacacagtgggagaccttaggggagaagtagcttatttcatctggttattggccacaggaggcttctgtttttttttttttggttgagatggagtctcgctctgttgcccaggctggaatgcagtggctcacttggctcaccgaaagctctgcctcccgggcccacgccattcttggccacaggaggattcgaaaagaagctgttttagctgagatttagaggctaaaagtgatttctccaggaagtaagcaagtgatcagaatgtaggtcaaaaaatgagaatgtgctaagacagtctttttcaaactgatatctgtcctgcctatcttccagggatcctctgaagcactatacaaggttatggtgtaattattattgtgatccagactattcggtttatatgtacatgcataattatcatagctaatactttacgtagtacttacaatacaatgtgccaggtacacattaagtcatatacgaattcatagttataatgtcttataactgtcagagtaattttatgagttacataatagtattatcccccctttatagttgagaacactgagaactgaaaccaggtggcactgaacaggattgaagttcaggctatggctgcacttaatctcaatgtttactgtattccaggagactctttgggattcttgggtcatgtagatttctttgtccctacctattttagacatcttttaaatacaataaagagatcacaaactattggattttgggatgtttttaatatccttcccatatcacttctgtgatgggtcacttctctctgatgtatgtatgcctgcctctaagaatcggtcttcttattcatattattgtttcttctgattactcagggcccaagattaattaactagactattagaattatgtctaaaataatagaagtgatcatggaaaaagcccaag

SEQ ID NO: 720414 - DNA, 971 bp, Homo sapiens
gtttagtcatggcctaaaaatattaatatagtcaattattttcgatttaaccacagagtcatcttttaagtgcttagaaattttggaatttaattttaaaaagtaaatattcctgaattaaatacaaacaaaatcatgtttaatcaaaaggacttcccattttctcagcataaaattaaatggatttttcttcttgacagcatttaaaggtcccaaagaggagtttcagcaacactgtactgtgaaaagtgtcaaaattgatgacatgtttccaacagtttgtcaattaaataattcgaactaataaattaacttccatgagaaataatcatcctacatcttcttaaattaaaatgagttatattatactcctatgggagaaaaaatatttgaggtataaaggtgttttgggtaccagccagtctgagcataaaagtgaatactgcttgacatacatttagatttggggtccagtttatataatctctagtgtatttactacataacacagaatgagtgtttactatacttaatcagaatatacaaccttggttatctcttttataattctctcttcaaaaccaggcaaaccaattggtatttcaatgtcatgtgtttattttttcctctttttcttcaagtaggacctaaagggaaggtacagtacaatcatcataataaaaaaatgtatacatgtaaatgcctgctgccctgattcacagagcaacttggggtcactgggcatctgtaaaaaacagagtcacatactactggaactgcaaaataccttaaagactagcaattccaaccccattatttcatcawtgaagacaattagccagagggaaaaaagattacttaatgtactaaataaatactttttggttagcttttaggtatcaaaaattatccaggcattgagtatatagaaatgaataaaatggacttaaagcttgccttcatagaattcc

SEQ ID NO: 720415 - DNA, 971 bp, Homo sapiens
gtttagtcatggcctaaaaatattaatatagtcaattattttcgatttaaccacagagtcatcttttaagtgcttagaaattttggaatttaattttaaaaagtaaatattcctgaattaaatacaaacaaaatcatgtttaatcaaaaggacttcccattttctcagcataaaattaaatggatttttcttcttgacagcatttaaaggtcccaaagaggagtttcagcaacactgtactgtgaaaagtgtcaaaattgatgacatgtttccaacagtttgtcaattaaataattcgaactaataaattaacttccatgagaaataatcatcctacatcttcttaaattaaaatgagttatattatactcctatgggagaaaaaatatttgaggtataaaggtgttttgggtaccagccagtctgagcataaaagtgaatactgcttgacatacatttagatttggggtccagtttatataatctctagtgtatttactacataacacagaatgagtgtttactatacttaatcagaatatacaaccttggttatctcttttataattctctcttcaaaaccaggcaaaccaattggtatttcaatgtcatgtgtttattttttcctctttttcttcaagtaggacctaaagggaaggtacagtacaatcatcataataaaaaaatgtatacatgtaaatgcctgctgccctgattcacagagcaacttggggtcactgggcatctgtaaaaaacagagtcacatactactggaactgcaaaataccttaaagactagcaattccaaccccattatttcatcaatgaagacaattagccagagggaaaaaagattacttaatgtactaaataaatactttttggttagcttttaggtatcaaaaattatccaggcattgagtatatagaaatgaataaaayggacttaaagcttgccttcatagaattcc

SEQ ID NO: 720416 - DNA, 644 bp, Homo sapiens
tagcctgctcccccttccttctacttcctcccctgactgcagggatctccatatattttctcgaagcctctgacttctgttgactgtttttctgccacttaggaaagagcaggaaggcttcaagatgctggagtggaatgaacgtcagttccccagttgaaatacagccctggccagtttttttcctctggggaataagtagtatttggatttgctttcaaatgcctcacatattgtcagaaaatctcaaagggctgttgctctaaatctcccaaaattattggagtaaaagcaatgcaatcctggagaacaccaaggactcttacacaaagaggagaggggcaccctattcttgctttggtagcccacagtacatcctcaatgctaagagggctctggagcataaacagactgaggagccagggagaccatggtgcaggtagaawtgttgatgccacctagcagaagtgtattcattcttgagcctttctattggttcatttaaaacactgtaaatgagttagttatacacaaggggctggaggcttttataaaataaatgggataagaagtcagaaaccaattgtgtcaactggctggtgacagctagaatagctggggttgactatgatgaaaataactga

SEQ ID NO: 720417 - DNA, 574 bp, Homo sapiens
taatatctgccttgaatttccttttgtctgataatagtattgccaaatttattctattttggttagcattttccttttatatatttttccattcctttcatttcaacctctgtatggcttcagcctacttggagacagcaggacatgctgttcggggcagtgtgacccctagcctgtctactgtgatttgggtgaggaacagaatgtgctattcctcaaagcaggcattcagtcagtctcctgatgttgggctcattgtttcacctggtgtcacagccaccaaggccccatctagcctctgctcactgactgytcctgcctaaaagcagacacattggttgctgattgctgggcaagaaagaaatagaggagagggagggtgcagatggtcagtgaacctagattcttctactgcagaacaccaactaatcactcagtcagttgctccaggggacttcttgccagacctctgggagccacagatctctgaactagaagcatccttagagccctgcccacttttgtagatgttctgtcctgtatgagtattgggttgtgatttccttcttcaatc

SEQ ID NO: 720418 - DNA, 3130 bp, Homo sapiens
atgttgaaaatcggtaaacctgtaggccagctgcagtggctcacgcctgtagtcccaacactttgagaggctgaggtgggcagatggcttgagctcatgagttcaggaccagcccgggcaacatggtaaaaccccatctctacaaaattaggaggttgaggtgggaggatgatttgagtctaggaggcggaggttgcattgagccaagatcacaccaatgcagtccagcctgggcgataaatcttgtctcaaaaaaaaaaaaattatttgaacctgggtataggtatacaggagttctttgttctgttattgcaacttttctggaagtttgaaattatcccaaaatagcaagttaaaagaagaaagtagaaaaaaattatttttaggatgtgaaggtggtgaaggtggtaatatatttttaggatctgcagataagtttttaagtagttgttaatttgctgatgtaattaaaatatcaatacttctagcaaataataaaaactctttattggtagattgataataaaatggtacaacggtggtataagttaggctatcaagaaattcattatcagtatattatggatacatttttaaaaattatgaaatatttcatgatatttccagttggtagaattgtgcatattttttcatagtctaactataccacatttcattgactgtagatcttgattttaggatgcaccattgctattgagaaacaaaaaaattgctaattataattctaagacaattagtgttgtgtgatgtgtcctgatttcagagatgttaaaaatgtgcaaaaatgtggctgggcgcagtggctcacgcctgtcatcccagcactttgggaggccgaggtgggcagattgcttgagcccaggagtttgagaccagcctgggcaacataacaagacccctctctcttaaaaaatggtggaaaaataatgtcttaaatatatgagactaggtatattgaagtgttgaagtgcgttatttaaaactgcttcttattaaaattactgccacatcctgattttatttagaaaactataaatctatgatagacatctgctaaaaatggcatattttataattaatactagaaggtgttcttacaactgctgtcagtgtatcttctgtatttcaatggattgtttgtttatgtgtttgtgtcccagagtgctctttttaacaagtagtaatttttgctcaggtattttcagggactcttaaaaacaggaaattttgggatcatttcctctgactcactgctcactaaaataatagctgttactctccacagatgctgcagttggagaagaaacttgaacgtgaacttgaggatgatgcacgagttattgcttgccggttccctttcccacattggactccagaccacgtcacgggggaggggatagacacagtgtgggcatatgatgcaagcacttttagaggccgtgaaaagaggccctgtacatcgatgcatttccagctgcccattcaagcataaacttgactgggagtgtttttctgaaatattgtagtcttccctgatcttgtagagacttacagctgtgtccttagcaaaggagcataattgtctttggtttggaatgagaaattactattactttccttaactgttggagaaaacaaacgaagaaaaacaggtagatttaaaatctgcttttgatgctattttcttaaaaattgtacttactgcctttccatgcacctggatgcatgaaaagatgaataagtgatggtcatggttatgggtaggaaaataagatgccaatagctcttcacattataaacaatatggcttaatgcctcgataaggagaaatgatttttaaagacagtatatattaccaactgtttgtagtatcctataactttgttcatacttaagttgtatctctttcctttttgtacttcatggcaaaattaattttctaaaggattcagagaggcgtttatattttataacatttattagaaataatttgttccaccactagattactgtattttatggaatctaagctgtatatgtgtacatttgtatacatgtatgtgtaaatgtaagcctgacgtgggttcagattccagttttgtcatcagcaagaggcctcggacccatgacttactgcctctgagccttggctttctgtgtatctctgccactgggataatggtacacataacagtggagtggggaccaatttctaaaactcatggcacctagtctttggtccataaatggtgtttgttattttagacactgagaaaaatcttattcacagaagttgcagattatttctgctagtcacttttttatttcttgagagctgccactcatttaatatttctcatttatgagaagagacttgactgatttagataaaagacgaattaaggaaaacctttgaacgtgagtagacaagcttcatatatctgtaaagtgaatattgaatggtagcttgagtcattcgtacttatcacagaaaagaattgaactcccagtcatacacctgtaactgaaataccaaactgtcttaatggagatgtaatgaagtaagatggtcacatctttaactaaacttataaaaattggtcagtttgatcattttcatttaaatgagaaacatctggggacacattcattcattcaacaaatatgtattcagtatctactgtagaagaagctctgagattctgcggtaaatagacatgcaaagcccctggcctcatggaattcctattctggaaaggagagacaaacaaataagcaagggaatcttagtgtgtgtggagttctctgaagtaaacagtgtgatggtgtagagagcacctgtgtgagtctgagatgaggggatgtgatgttgtggacttcagccaggtttttggcagctagtgtctgtccctttttcagtagctccagtcttcttatgaagaatgagttctttctgtggtgtgtgactttagtgggagggcagctcttgctctatgcctctcagttgccttccactgtarccagtcctgtaactggtctgggcacactcggagggggatccatggtagctccttgccatgaagatgtgggtagaggagggttctgtggg

SEQ ID NO: 720419 - DNA, 3130 bp, Homo sapiens
atgttgaaaatcggtaaacctgtaggccagctgcagtggctcacgcctgtagtcccaacactttgagaggctgaggtgggcagatggcttgagctcatgagttcaggaccagcccgggcaacatggtaaaaccccatctctacaaaattaggaggttgaggtgggaggatgatttgagtctaggaggcggaggttgcattgagccaagatcacaccaatgcagtccagcctgggcgataaatcttgtctcaaaaaaaaaaaaattatttgaacctgggtataggtatacaggagttctttgttctgttattgcaacttttctggaagtttgaaattatcccaaaatagcaagttaaaagaagaaagtagaaaaaaattatttttaggatgtgaaggtggtgaaggtggtaatatatttttaggatctgcagataagtttttaagtagttgttaatttgctgatgtaattaaaatatcaatacttctagcaaataataaaaactctttattggtagattgataataaaatggtacaacggtggtataagttaggctatcaagaaattcattatcagtatattatggatacatttttaaaaattatgaaatatttcatgatatttccagttggtagaattgtgcatattttttcatagtctaactataccacatttcattgactgtagatcttgattttaggatgcaccattgctattgagaaacaaaaaaattgctaattataattctaagacaattagtgttgtgtgatgtgtcctgatttcagagatgttaaaaatgtgcaaaaatgtggctgggcgcagtggctcacgcctgtcatcccagcactttgggaggccgaggtgggcagattgcttgagcccaggagtttgagaccagcctgggcaacataacaagacccctctctcttaaaaaatggtggaaaaataatgtcttaaatatatgagactaggtatattgaagtgttgaagtgcgttatttaaaactgcttcttattaaaattactgccacatcctgattttatttagaaaactataaatctatgatagacatctgctaaaaatggcatattttataattaatactagaaggtgttcttacaactgctgtcagtgtatcttctgtatttcaatggattgtttgtttatgtgtttgtgtcccagagtgctctttttaacaagtagtaatttttgctcaggtattttcagggactcttaaaaacaggaaattttgggatcatttcctctgactcactgctcactaaaataatagctgttactctccacagatgctgcagttggagaagaaacttgaacgtgaacttgaggatgatgcacgagttattgcttgccggttccctttcccacattggactccagaccacgtcacgggggaggggatagacacagtgtgggcatatgatgcaagcacttttagaggccgtgaaaagaggccctgtacatcgatgcatttccagctgcccattcaagcataaacttgactgggagtgtttttctgaaatattgtagtcttccctgatcttgtagagacttacagctgtgtccttagcaaaggagcataattgtctttggtttggaatgagaaattactattactttccttaactgttggagaaaacaaacgaagaaaaacaggtagatttaaaatctgcttttgatgctattttcttaaaaattgtacttactgcctttccatgcacctggatgcatgaaaagatgaataagtgatggtcatggttatgggtaggaaaataagatgccaatagctcttcacattataaacaatatggcttaatgcctcgataaggagaaatgatttttaaagacagtatatattaccaactgtttgtagtatcctataactttgttcatacttaagttgtatctctttcctttttgtacttcatggcaaaattaattttctaaaggattcagagaggcgtttatattttataacatttattagaaataatttgttccaccactagattactgtattttatggaatctaagctgtatatgtgtacatttgtatacatgtatgtgtaaatgtaagcctgacgtgggttcagattccagttttgtcatcagcaagaggcctcggacccatgacttactgcctctgagccttggctttctgtgtatctctgccactgggataatggtacacataacagtggagtggggaccaatttctaaaactcatggcacctagtctttggtccataaatggtgtttgttattttagacactgagaaaaatcttattcacagaagttgcagattatttctgctagtcacttttttatttcttgagagctgccactcatttaatatttctcatttatgagaagagacttgactgatttagataaaagacgaattaaggaaaacctttgaacgtgagtagacaagcttcatatatctgtaaagtgaatattgaatggtagcttgagtcattcgtacttatcacagaaaagaattgaactcccagtcatacacctgtaactgaaataccaaactgtcttaatggagatgtaatgaagtaagatggtcacatctttaactaaacttataaaaattggtcagtttgatcattttcatttaaatgagaaacatctggggacacattcattcattcaacaaatatgtattcagtatctactgtagaagaagctctgagattctgcggtaaatagacatgcaaagcccctggcctcatggaattcctattctggaaaggagagacaaacaaataagcaagggaatcttagtgtgtgtggagttctctgaagtaaacagtgtgatggtgtagagagcacctgtgtgagtctgagatgaggggatgtgatgttgtggacttcagccaggtttttggcagctagtgtctgtccctttttcagtagctccagtcttcttatgaagaatgagttctttctgtggtgtgtgactttagtgggagggcagctcttgctctatgcctctcagttgccttccactgtaaccagtcctgtaactggtctgggcacactcggwgggggatccatggtagctccttgccatgaagatgtgggtagaggagggttctgtggg

SEQ ID NO: 720420 - DNA, 657 bp, Homo sapiens
attaaatgttttaatgcccaaagtattcactgtttctctactcagccctttaggcccaaaccctctgataaactcygactgtgttttcgaataaaccctttctcagcactacagctcagtgccaattgtgagccttttcacccaccacagtggaccacaggtgggtggagttgataaattgggcagcaaacctctttctcagtgggttccccgacaagaggcctgtatccaggatggtgataagtgagggcaaaatgactcccaaagagcaggttaacaggttgacatgctgctttcctggtccaggggttcaaaattacaaggaaagggcatacgataatcatagctgaagttgcgtttagagaattctgaaactaccaattgagataggtttggagtgtggcgttgtgtactgcatttatctcatctgaagggcttgacagctcctaaggagataaacacgttggaagatgtactagaagaagcgtggagctgaatacaaagcagcactgcctgttctgcagtgactaggagaaaaggcaagttcgtattcaggcccaatatgcttggtagacagctaatactgtccagctgggcatagtgtgcccccagaactaaggaatggcaatcctgggttatttggaagattcgatgtct

SEQ ID NO: 720421 - DNA, 643 bp, Homo sapiens
ttgagtccattctacaagccaggcatcatactaggctgctttgggagcacatgttactaaccccccagagaatccctatgaaggagatattatcaccattttcattttacagatggagaaggtaggtaacggagggattaatgaacacgcccagtgttacatagctagcaagtggctgagctggaatttaaatttagtgacctaactcccttaccaatgtgctcatagttactaggtgggcctagtaacacagctctgcaatatccttgaatagcctggcttcctcaggcttttgatttcatttacaagattgagattattgagtgatgagttataggactggtaaaaagctgaattccaacagtckcacatatggaatgtcttagctttagaagaagtaggaatatgggaagatagggtgatggtaacttctacaaagtgctttcagctgaaagcctgaataggtctcctactccctctgcttctgcctacttccagagaaacctcttagcttaagaactacagggatcagtaaaaagataaaactcttccgaattggccacaagtgtgggtctgtttcaggaccaagatctggtctgtattccgttgcttatcagtaatcctctaaagtggatttacccta

SEQ ID NO: 720422 - DNA, 1164 bp, Homo sapiens
atgtatcagcacttcattccttttaattgctaaataatattctattgtatggatataccacagtttattcatttatcagtcaatgaatacttgggttatttccattttttattttttggctattataaataaagttgccatgaacattcaggtattcattttgtgtagacatatgttttcatttatcttagatatacacctagaagtggaattgctgagtcatacagtaattctatgtttaacttgttgaggaactgacaaastgttttccaaagcagctgtaataatttacatccccactagcaatatatgagggagtccttcatacacaccacatcctcaccttcactcattatctacttttttttttgcttgtaggtgtgaagtggtatcacattataacttggtttgcatttgcctgatgattaataatgatgagcatattttcatgtccttatttgccgtttgcgtattgtctttggagaaatatctgttcaattcctttgcccagtttttaattaagttacttatgtttttaacgaatgagttataaaaattctttacatatgtcccacatgttatatgatttgcctatgaatttccatgtaaactttttaaaaaagtttttcattaaaatataacatttatacatttttatgggacacatggcatttagttacacgcacagaatgtgtaatgatcaagtcagggcatttagggtatccctcacatcttgactatcatttctatgtggtaaaaatatttcaagtcctctcttctagttattttgaaatataaaataccttgttgttaactatagtcaccctactcttgttatgaaacactggaacttattccttctgtctaactgtatgtttgtacacattaagtaacttctcttcatcctccactatggccaaacatccttcccagcctttggtaactcttattctactctctcactccatgagatcaatttttatacacatatgagtgagaccatgaaatatttgcctttatcttctgaactcatttcacttaacataaataccctccagttccacccacgttgctgcaattgacagtattttattcttttttataaccaagtagtatttcattgtgtatatatatcacatttttttaatccagtcatccagtgac

SEQ ID NO: 720423 - DNA, 588 bp, Homo sapiens
gaagctgtaaccagttcgataacatgccaccctgtatttgctttctccttacctttccttagtttcccttttgcctgcattcctactcccttgcaattatagttcctgatgaaggatgtataataactaggcttgttttctagaaaagtcaggctaatacagaatgtaataaaaagtggacttcataaaagtttgcaatggatattttacttggctggcaagatggccgaataagaacagctccagcatgcagctcccagccagaccaaygcagaaagcgggtggtttctgcacttccaactgaggtacccggttcatctcattgggactggatagacagtgggtgcagcccacagaaggtgagcagaagcagggtgggacattgtctcacccgggaagtgcaaggggtcagggaactcccttccctagccaagtgaagccttgagggaaggtgccatccggcccagatactacgcttttcccagggtcttcacaacccgcagactaggagattccctcaggtgcctacaccaccagggccctgggtttcaagcacaaaactgggaggccgtttggaccgtgctagct

SEQ ID NO: 720424 - DNA, 653 bp, Homo sapiens
tttcagttttctcagtaccattagttgaaaaggctttttcccatggtgtatccttggtgcccttgtcaaagactggttgaaagacacttctttttatctcttattgtttagatttaataaatgagagggccaattgaaaaaaaaacttgacattaatagctttttgcagaatatgattgaagggattttaaaatttcatctcatctcactttaatacgtctgttttttgccatttatttatttttctttgtataaattcatggtgtacaactgaaattttgttacatgcatagatttcataatggtgaattcaggacttttaggtaatttctcattatccaccctcgcagcacctcctctcccttctgagtctccattgtctgtcattccactttttacatccatgtgtacacattatttagctcccacttatgagtaagaatatgcagtatttgtctttctgtgtctgacttgtttcacttaagataatggcctccagtttcatccaagttgctgcaaaagatatgattctgttcttttttatggctsaatagtgttccatgtctatatatacacaccatattttctttatccagtcatccaatgatggacacttaggttgatcccatattgttgttattatgaatactgtg

SEQ ID NO: 720425 - DNA, 653 bp, Homo sapiens
tttcagttttctcagtaccattagttgaaaaggctttttcccatggtgtatccttggtgcccttgtcaaagactggttgaaagacacttctttttatctcttattgtttagatttaataaatgagagggccaattgaaaaaaaaacttgacattaatagctttttgcagaatatgattgaagggattttaaaatttcatctcatctcactttaatacgtctgttttttgccatttatttatttttctttgtataaattcatggtgtacaactgaaattttgttacatgcatagatttcataatggtgaattcaggacttttaggtaatttctcattatccaccctcgcagcacctcctctcccttctgagtctccattgtctgtcattccactttttacatccatgtgtacacattatttagctcccacttatgagtaagaatatgcagtatttgtctttctgtgtctgacttgtttcacttaagataatggcctccagtttcatccaagttgctgcaaaagatatgattctgttcttttttatggctcaatagtgttccatgtctrtatatacacaccatattttctttatccagtcatccaatgatggacacttaggttgatcccatattgttgttattatgaatactgtg

SEQ ID NO: 720426 - DNA, 1662 bp, Homo sapiens
tgatatctctcttcattagttatgttaagtgcctaatggagagggataggatcaattaaataaggtaaatgcaacattttacaggtctatataaatacctagaaagtgcttttcaattaagayggcatgtatgccagtgcttttttatatatgagaatggttatgacatttattcctattttattggagagtctattgcatgggacttgataatagtggcaggctggtatcagagactatgcttgctgtaatcagtgttaaagatcagtatgtaaagaatccttacttaacatgtaccatgaaattgattttttattagttattatagagatattatagattatatctctacaacatcttccttctttttacccataacctctaaaaggcttagtgccagaaggaacagaactgtatctttattttctcatcacatcctctctcaaatagataatacttccattgctgtctttccaacttggctttgagtcactgctgtgattctagctgttgaacagtctttcaaattaagtgattagtattctagtcaaggaaaaattgtgagcctgccattcttacccagtattgctaaggtagttttactaaatctattattagggtcatgttctcagaggcatatgacaattgcatttcacaaaacttccctaaatattgatacttgagatttacaggaaattaaatctaaaaccttacacttctgaagctggaggcaccatagagctgtgaagttcagtataaagtcacatctgtgctcaatactttataagaaaagttactctgccttagtcttcctttactatttttgtcttacttgattaaaattttgctgttgtattaactaataaattcaaaggaaatgttctgattagtttctgtcataactgggaacgatagtaagagtaccttggaaagtatgatagtctgttgcgtaacacttgctgggtagtagatatcaattctctgcctgtttcaatctcattgtgtctaaaggtgtgaacctcttaccatctggatactttagtttccctctaaattaaaaagaaaaaaagcaaatcttacctgtatagtacctacgcaaagattttggaagatagtgggaagtcattaaagtgcttttcaccaatttatgcaatttactagttgaaatttgtaactatttaaaaatcattagttttaaaaaatactattttaaaatagtaatttactatttaatatttaaaaaccattggctcttttaatatatttcattgcttggtattagaattttttatttttagaatagagtatatttaaagatgacttttgctgttaaatttgacaggcgtggcaggaggccaatctaataagcccaaagggagaattcgcagagtatgcaggttaaaagagccctggaactgactttctgtgaagcctaggctatccatatacattcctgctgagtggagatttgcttaaagttgactgttttcttccttctgtaccatctgattccaatctgcacctgtcttttatagctagagaccgttggatggcagcttaaccttcagatggctcactctgctcaagcaaaactaaaatctcctcaagctgtgttacaactcggagtgaacaatgaagattcaaaggtaagaaatggtatcc

SEQ ID NO: 720427 - DNA, 1292 bp, Homo sapiens
gcgatctcggctcactgcaggctccgccccctggggttcacgccattctcctgcctcagcctcccgagtagctgggactacaggcgcctgccaccttgtccggctaattttttgtatttttagtagagatggggtttcaccgtgttagccaggatggtctcgatcccctgaccttgtgatccacccccctcagcctcccaaagtgctgggattacaggcgtgagccaccgcgcccggcctacaattttttttataccacaggattttactttattattaatttcagaacaacttgaacgtgattattaaagatcaaagcattgctatgaaatactttttgttactgcggcatatagggaaatatatctttcagatatgataagagctttttatcatattttatactgtaatggattatcttttaagrtagaaaagggggagtgactttttcctcctaagtagataagactatctcatcttaagacaaaatagaattgagaatgaggtattagagaagatctgaggcaggagattacagtgactgaatgataatagaataatggaagaaatgttattatttataacaggaattgaaggatgggaatattattacttttttgttaaaactttcgctattcattctattatgcaggtttctggcttctttaagaagtatctagcccagattatatgactataaaattctgtggaattgacttgagtcttacatataatgtattagtttattacagtgtttcaaaagtatcattttatttcacacattttcactggaacgtaatatgaacttagtggttagagtcaagctattagagtatgtctggtggtttccctttatgtgcagtttcactttccatagtttcagttacccgcggtcaactgccgtttgaaataggtgagtacagtacagtaagatgagagaaagagaccacgtccacataactttattacactatgttgttgtagttgttctattttattattattgttgttaatctcttacagtgcctaatttataaattaaactttatcataggtttgtatatatgggaaaaaacagtatatattgggtttagtactatccatggtttcaggcctccactgggagttttggaatgcatccccccacagtgggcagggggactactgtgtgctctgcagtttagtgtagtgtaacctcaggcaaattacttaatctttgattctcagtttctttatctgtaaaatataggtaatagtatctatctacacaatttttatgaagactaaatacc

SEQ ID NO: 720428 - DNA, 825 bp, Homo sapiens
gtctgcgtagctaaaagcattttgtatgttggaagtgtactattttgaccacatacattggatatgctttaagcatcatgagttcagcaatgcttgtctttgggattctcaagtccttctagcttctttgttacatcttcaaagtatgcctatgtgtctgttatatttttaggcagtaggaataaaagagtaatgcttctagtaagacagccatgttaataagacattcagattattcaggaagatgtgaatatctagatgtgaaatctaactcatttgaaatatgagcttgagtacatttatgtttttctgtgtttgtattttgagattttggatagatgcatatatgcacattgattaatcttataacttgcagagctagagcaccattttcattaacaaatatgctgaggaagaagaggakaagcacacatacataaaagatatttctctttcatcttgtatgtagacttaagtgacttctttgtattgtctttctcttctatggcattgtacacattttgtgcctgtgtcttatatctcctaaacaatagacagacacataatgaggtatagagctaccatcacctaggcagaagcatgccatctccaagtgttatggtgtgccctagctgtaaaggaacagttaactactatacctcttttcctcaatgaactgctgcctggaattactgctctttctcttgtttaccttctccttgattttatgatttggtattctattctttgtactcttcatcttattccttatgttaatttttatgtgactcctgttattaaggaccacaaactacttttctttca

SEQ ID NO: 720429 - DNA, 825 bp, Homo sapiens
gtctgcgtagctaaaagcattttgtatgttggaagtgtactattttgaccacatacattggatatgctttaagcatcatgagttcagcaatgcttgtctttgggattctcaagtccttctagcttctttgttacatcttcaaagtatgcctatgtgtctgttatatttttaggcagtaggaataaaagagtaatgcttctagtaagacagccatgttaataagacattcagattattcaggaagatgtgaatatctagatgtgaaatctaactcatttgaaatatgagcttgagtacatttatgtttttctgtgtttgtattttgagattttggatagatgcatatatgcacattgattaatcttataacttgcagagctagagcaccattttcattaacaaatatgctgaggaagaagaggagaagcacacatacataaaagatatttctctttcatcttgtatgtagacttaagtgacttctttgtattgtctttctcttctatggcattgtacacattttgtgcctgtgtcttatatctcctaaacaatagacagacacataatgaggtatagagctaccatcacctaggcagaagcatgccatctccaagtgttatggtgtgccctagctgtaaaggaacagttaactactatacctcttttcctcaatgaactgctgcctggaattactgctctttctcttgtttaccttctccttgattttatgatttggtattctattctttgtactcttcatcttattccttatgttaatttttatgtgactcctgttattaaggaccacaaactacttttctytca

SEQ ID NO: 720430 - DNA, 879 bp, Homo sapiens
ttttgtcactgggaatgatgctcattagagtctatatacacacacagaagctactggagtgcactttgcagtttagccatgtcagagcctagacaacccctgacacccccactagagccctctgaaatctgtagacttctcctaccttcaactcttgctcacagcagctccattcacttagaatgtccttctccctccctctttacctgagtttttccccgtgcatttttcaggattcactaattggcaccttttctagtcagtcttttttaaaacaaatttttttttgagacagggtttcactctgtcatgcaagctggaatgcactgactcaatcacggctcactgcagcctcaacttcccaggctcaagcaatcctcctgccttggcctcctgagtagctgggattacaggcatgagccactatgctcggctaatttttttattttttgtaaagacagggggtctcaccatgttgtctaggctggtctcgaatgtctgggtgcaggcaatcctcccaccttggcctcccaatgtgctgtgattacaggtgtgagccacaatgtctgaccaggagtctttcttgacatcttgattcccagggacagcacactagtccctccgcccgctctgcccctctcagctgcacagtgccttgagtacttgtgatgcacatcttgtgcttatttgattacatatcttcttcttttagacctttgagcactttgaagaaaggaactgtgtcttatttgcccttttatcattggcacattgtctggctcattaagaagtatttatctgaagggcagtgtggatagatacccttgagtacatccagtgaaggagcyactggtcctggctcaggtctgtagtattcta

SEQ ID NO: 720431 - DNA, 1834 bp, Homo sapiens
ttatgttctcaaatgatggctgaaagatcattccctgaaaaaggtagaaccgtttgataaatggttctgtttttatggtgtcaccagttggtttttctagaagcagatgacgagacatgcctaggtagaatctggggtgtaagatatttatgagagatcaacactggagggaaggggaaacagggagggctgtaggatgagaatgtgccataccatgctacaatgtctgggcctttgtacttcatctcacatagtcactggatgtggactatgtgactatggaagggcatgacatcaggaggtgactctatagctgagacagaccctgaaagaacaaacagctggagtgcccacscacagctgggcagcaagtcctcctttgaaggagatctggcctgtgtatcctatttcaacatcatgcagcttgcagccatggccacatatggtgtaagccacatgaagctgaaatgtcagagcctcatccagctatgattactgcttgttgaagtagccaactattagttctttgctcctgtatcagcattataaagctatttctctgtcattacatatatgaaacaattttccaaggcaagaaaacattgaattacggtcccatcacattggttatgtgggtgtaaaaacctggactagacaagaatgttgtaattacatttacttttggaattaagtgctggatgtattttataactaaggcaaaagaagaaaataaatttaagtataaggcaataaagcagttgaactgttccaataatatctaaaacaaagttttggttacatagcttgagaggactgtcaattaataacacttttccaaaaagtgctctataattgcagagccctgagaaaatagaatgaagcaatcatatttggttatatgttgcatttataccatttgatatctcctcctttgcaaaataaatttccccttgccagctgtaattaggcactgagataaaactgccttaatattctgcatattttattagggctgccagcagctgtcggatcactggctctgttctcatgtacaatgaaaacatcaaagacatctgtggtttgccctaaaattagtgccagaattggccttctctccattgtgtaaccagctttgctatttgcataactaacaagggaacctccagacattgctgctcggttcatgagggaaaactacgaaaggcagactttggaaagtggccggtacggcttgtccccataaggcttaagtgcatggggtttggaatcacacagacctggatccaggcttcagtttttaccatttatctgtgactttgggcaagttatttctcagccatattgccttttttgttataatgagaaatagtatttattgttttgaagaagagttaagacaatgtatgtaaagcattagcatgtgcccaggcctcctgggaagcactcattaagagttagcaatcttcagcctggtgccgtggctcatgcctgtaatcccaacactttgggaggccaaggcaggtggatcacaatgtcgggagttcaagaccagcctggccaagatggtgaaaccccatctctactaaaaacacaaaaaattaggtggatgtggtggtgggcacctgtaatcccagctactcaggaggctgaggaagagaattgcttgaacccaggaggcagaggctgcagtgagccaagatcgcaccactgcactgcagcctgggtgacagagtgagactctgtctccaaaaaaaaaaaaaagagttagcaatcttccttctttcatctagtgcccttttctaagaagtcataactacagtggctttaaaacaca

SEQ ID NO: 720432 - DNA, 1002 bp, Homo sapiens
tttttttgagatggagtttcgctcgttgcccaggctggagtgcaatggcgtgatcttggctcacggcaacctccacctcacgggttcaagcgattatcctgcctcagcctgctgagtagctgggattacaggcatgcgccaccatgcctggctaattttgaatttttagcagagatgaggtttctccatgttggtcaggctggtcttgaactcccgacctcatgtgatctgtccacctcggcctcccaaagtgctgggattacaggcatgagtcactgcgcccggctttctcagatgttttaataaagctgatttttttttttttttactaaattgaatcacattccactaatctattttaaagtaacattaaaaatatgatcatkaaaaaaaaaaacccaaaaaccataaaacaatctttaccatatttaccatttaaatgctatttcccatgcatctcttaatgcctggttttgtgctgtgtttactatggtctctgtaaatattgatacattataccatatatgcatatatgtgtgtaggtacacagataaaaggcaaccgtttcccacccttcaactctggtaacaaagagatgactttgagactagagttgcaaggtatttcaaggccttattcatcctttaccaaagacttgcagcatatttgctgtcaaatgcttaatttgttttctatgttaaaaggtcaagaactagtgttaagatcaaggaagaacataaacattttaggtaatatagtccatggaaaggcctacataagtagtaggacataaaggtaggtctcatcttggattagacaatggtttcttagatataacaaaagcaaaagcaacaaaagaaaaaatagataactggacttaatcaaaattaaaaatttttgtgcttcaaaggatactatcaataaagggaaaagacaaccctcagaatgagaaaaaatatctataaagcatgtatcagatatggcagtagtatccagaagttt

SEQ ID NO: 720433 - DNA, 586 bp, Homo sapiens
agtacaaaaaattggctgagcatggtggcacgtgcctataatcccacctactcaggaggctgaggcaagagagaatcacttgaacccaagaagtggaggttgcagtgagctgagatcacgccactgcactccagcctgggcaacaagagcaaaactctgtctcaaaaraagaaaattttgttttcatatattttgtatagaaaaagcatgcattaccttcttttttaaaatacttctaatcagtctacattaacttctgtgaaaatactgcctgcattttggggtaaaaaaattctaaaaacaatttcagtaatataagaaatatccaacttaaataacaaagaactacatccaaattactgctgcactagttatttccacgttttccatgtttttaaaataaccatcttacttggtactatacactcaaagagtaattgtgaaaagtcagacaattcaatgtgcctctaaaatctcattgaaaatgtattggcactggctcaattataggtgcacttgcagtaacagaatgtgaataaacttcttttataccatgtgagaaagtaaaacttatgatttattaaaa

SEQ ID NO: 720434 - DNA, 586 bp, Homo sapiens
agtacaaaaaattggctgagcatggtggcacgtgcctataatcccacctactcaggaggctgaggcaagagagaatcacttgaacccaagaagtggaggttgcagtgagctgagatcacgccactgcactccagcctgggcaacaagagcaaaactctgtctcaaaagaagaaaattttgttttcayatattttgtatagaaaaagcatgcattaccttcttttttaaaatacttctaatcagtctacattaacttctgtgaaaatactgcctgcattttggggtaaaaaaattctaaaaacaatttcagtaatataagaaatatccaacttaaataacaaagaactacatccaaattactgctgcactagttatttccacgttttccatgtttttaaaataaccatcttacttggtactatacactcaaagagtaattgtgaaaagtcagacaattcaatgtgcctctaaaatctcattgaaaatgtattggcactggctcaattataggtgcacttgcagtaacagaatgtgaataaacttcttttataccatgtgagaaagtaaaacttatgatttattaaaa

SEQ ID NO: 720435 - DNA, 586 bp, Homo sapiens
agtacaaaaaattggctgagcatggtggcacgtgcctataatcccacctactcaggaggctgaggcaagagagaatcacttgaacccaagaagtggaggttgcagtgagctgagatcacgccactgcactccagcctgggcaacaagagcaaaactctgtctcaaaagaagaaaattttgttttcatatattttgtatagaaaaagcatgcattaccttcttttttwaaatacttctaatcagtctacattaacttctgtgaaaatactgcctgcattttggggtaaaaaaattctaaaaacaatttcagtaatataagaaatatccaacttaaataacaaagaactacatccaaattactgctgcactagttatttccacgttttccatgtttttaaaataaccatcttacttggtactatacactcaaagagtaattgtgaaaagtcagacaattcaatgtgcctctaaaatctcattgaaaatgtattggcactggctcaattataggtgcacttgcagtaacagaatgtgaataaacttcttttataccatgtgagaaagtaaaacttatgatttattaaaa

SEQ ID NO: 720436 - DNA, 586 bp, Homo sapiens
agtacaaaaaattggctgagcatggtggcacgtgcctataatcccacctactcaggaggctgaggcaagagagaatcacttgaacccaagaagtggaggttgcagtgagctgagatcacgccactgcactccagcctgggcaacaagagcaaaactctgtctcaaaagaagaaaattttgttttcatatattttgtatagaaaaagcatgcattaccttcttttttaaaatacttctaatcagtctacattaacttctgtgaaaatactgcctgcattttggggtaaaaaaattctaaaaacaatttcagtaatataagaaatatccaacttaaataacaaagaactacatccaaattactgctgcactagttatttccacgttttccatgtttttaaaataaccatcttacttggtactatacactcaaagagtaattgtgaaaagtcagacaattcaatgtgcctctaaaatctcattgaaaatgtattggcactggctcaattataggtgcacytgcagtaacagaatgtgaataaacttcttttataccatgtgagaaagtaaaacttatgatttattaaaa

SEQ ID NO: 720437 - DNA, 586 bp, Homo sapiens
agtacaaaaaattggctgagcatggtggcacgtgcctataatcccacctactcaggaggctgaggcaagagagaatcacttgaacccaagaagtggaggttgcagtgagctgagatcacgccactgcactccagcctgggcaacaagagcaaaactctgtctcaaaagaagaaaattttgttttcatatattttgtatagaaaaagcatgcattaccttcttttttaaaatacttctaatcagtctacattaacttctgtgaaaatactgcctgcattttggggtaaaaaaattctaaaaacaatttcagtaatataagaaatatccaacttaaataacaaagaactacatccaaattactgctgcactagttatttccacgttttccatgtttttaaaataaccatcttacttggtactatacactcaaagagtaattgtgaaaagtcagacaattcaatgtgcctctaaaatctcattgaaaatgtattggcactggctcaattataggtgcacttscagtaacagaatgtgaataaacttcttttataccatgtgagaaagtaaaacttatgatttattaaaa

SEQ ID NO: 720438 - DNA, 485 bp, Homo sapiens
taagtcagacactttttaacacagacattatttatttgtatttatccacatgttttccagtktctctgctcacaagtttttcttgtatctcaaatcctcctttcatgtttttgaagtgcatttttttagaaatcccattggggaaggtctgccggtaataaatacttcttttgtatgtccaaatatatttttgtttaacccttacttatgaataatgtttagctgggtatataattctagttatagtctatcttcactttaccacatcattccattgtcttcaggctttagttgataccattgaaaagtctgctgtaaatctaattattgttccattttaatcactatctttattgtgataaagacctcatgacttccatcaccatccatactaccattcacctcttgttcaaaaccatgctatgtcttcctattggctaggaaataaagtccaagtttcttaggctcttttccatttgtcccca

SEQ ID NO: 720439 - DNA, 670 bp, Homo sapiens
ctcaaatccactgtagaatgtaaagtgttcattttcttcctattacatgaagtgaaggaaacagtcgttctgaaatgcaggcagtatcaaggtaaatgtggtggccatttgctcagtgaaaaatacatggattctttttttcttccagaagagagacaatatttgattttaattactggtacagygttggagatgttggttccaggtcaaggaagccaagtagctaaaatgaaatatgctgaagcgtcacaggtcaaagagaagtaaacacacataaaaatgggaatggaaatacaataaatgaccacacataacctatcctactcactcattgcagaactgacgttgcttctctcataaacctcaaagcctgctttcaggtttcatcaaatatctagggctccaatatcccaggaatggtttcctcaggcaggccatagattgcaaaccatcccagcctcaaggggagaaacgagaagggcgtggctgctagccaaaaggaagccccggaccactgtgtgccgttatctttcatggtccttgggtttaagtttgcacctggctgcccaggacctgctgagagatgaatgggtaagctcacatttggaaatcacaggggaagatgtcacgagtctctctaaagggaggctacagaatgttaataggtggg

SEQ ID NO: 720440 - DNA, 641 bp, Homo sapiens
agtggtattttctttstctaaaagtattcttgttgctctaccattcttcctcctcagatcagtatcatcttttgctttggggagaaaaagtggatgtcgcataaaataataaaatgtaaaagtgttacaatatgtaaatgtcccaagacacagtagacacaattttctgtgaataaaacacttttaattggaaagaaacagatttcttatagaaaagtaattttgctctgaattccaaaagaactttccttggaaacatgtttacaaacattagccacagagcttaaggaagacattaaaaaccctactggctgggaggaaggcacttggacagagagaggaagcagacaataagggaactataaccaaaggcccacaaagggaattaaaaccttgggagataagaggcatgggtggtagacacattcaccatgaccaccattccacagatagatctgaggcagtgtttgcaataagaactgttggtatttaagtcttctagcatatcattctttgtgtaaaggacaaaatacccaggaatagttttgttttgaggtataattatgctatttcagatgactcagctggaatcaccagctttattccaatttcttagttctctcttatgtctgccctttatt

SEQ ID NO: 720441 - DNA, 476 bp, Homo sapiens
aaaaagcaaagtttgacaaaactagcattgcttataatccatctatttttagataagtaggcttatgatatcttttgtcaactaacattgtacaaaatatcaccttccttctaaaatatggctttaatcaatttgtctaatcacaaatatgtattatacacacgaagacagccaaggtagtaagccctagaggtacttgaagcttgtcacagtggtgacaagcaaataccaatagtccaggcccagcagactaggcaggtagctacttaaggacacatcacacccaagttagaggcagaaaacatcttcttgaaggaagtgagggctcaacatactcgaataawgagacagacacaggctaatgaagagggcgatgaaattcctctagatactggtgagaggcagagagaagtatctttcaggaacagggatagtaggagataaggctagggaggaggaccaggcccctatcagtg

SEQ ID NO: 720442 - DNA, 652 bp, Homo sapiens
tgaatgattttagttataacatattaaataaaaagaaagaaatgcaaaaactgaagggtgttatcggagacctgcacaccctacagttaggataactatacatccttgttgtctgaggatatggccatatgacgttgattgtcctggcataattattaatagcatagctttcattctcgaagttgtcacaatttggattgacatattgtgaatttggaagctatggtgcagtctttcaacttattagaggttcatcaacttatacagctactggaaagtcttgcttttgggcattatctacaacctttagagttgaagaaaggttgaagaaagacatggttgataaagggatttggacattataatacctgtagaactaggtgccttgtctttaagataaaattaggcaatgagaagttgcttatgtgatcatcttctttgataagatctattattttcacaagttttcaagtatttacwtgtttcttcgatacattataaggtgctgctgacagaaaagattcaaaaattgtattagtatagcaagatagatttgaaaattaacaaaaatttgcagtcaatgttgtaataggaatgtacttgaataaacataaattatgagagaaaataagaatggtttctcatgctggaa

SEQ ID NO: 720443 - DNA, 1346 bp, Homo sapiens
catagtcaaaccctggggtcgccactatgtattaaatataggatctgctgtcagagtagttgatctcaatagagaaatcctacagggttttgaggatacatgttatacaaaaattctatcccctgtacagtccatgttcacatatgaaggcaatgggaaaaataatttcaaatacatcaaaatttagcaagcctaacaagaaacaaataaataatgactaagagggatagggcattaaaagttccatatgattctgaaagaacatgttgcccaactttctgtgtcatttcatattgtccttaaaagtattttaacaaaatataattttatatagacattagtttcttttgcagtcaccctaagaacacactaatattttaaataatattactattaagaaagagaccctataaaaatattggtaggaaaggtgattaggtagctcaccaatattggtagatactagattaccatccagaaatcaacaacattgttatatgttagtaattattcattagtgattattacaaaaccacaataaaaaagagcttattcacaattgccaaaaattgcatagttaataataaattactcactgctgcctatttcctggggaaatataattaaaacaaaatcttctttcaacccagaaatactttctacaaaggtgacagagaaagaaaacactcaccatttaaaaaactttaatccagaatgtgacgtgcatcataaacagtctgccaataaattgtaaagacaaaaatctcacccttttgcatcaaacagacacaacccattacatacatgtcttcaagatacacactaactgcttttcaagtaagaggagttaatagcaccatttatcacatagagtttatcccagttttacctgataattggggtaaccacgtacgttagctagctctttccagaggaaaaacatccttctcatatcattatggcaggaggtggttttacaaattagagcygggaacctgctgaaattaggatcctatcctcccacagaacctgggagatgtgtggtgctacctctcttactgtttacattcaaaggaaatggctcccagatccttgagaaacacattcctaggtcacagagctgacaaaagttttatatagtcttcaaaagaagttatatatgtttcaaagagaggagatagtacttaaaattacaatttttcaaaataaatgctctaagaaaaagaaacagagaacaatctcttattttcaatagagaaaagtaagactcttattttcaatctgtatttgtccttacatacctcaggctttaaccacagaggcaatggaaagatttaaaaaataaa

SEQ ID NO: 720444 - DNA, 579 bp, Homo sapiens
gattaccaattaggaaagaccagctgctggctgggatagggtagggggaacggtggtggcctgcagagaaagggcggacaagggggggctgtctaacaaatgtggtcatctctaaatcaggagtggaaaaataaagcctcaagagaagagtaaagtatgtcggacgcttttgcccattctcgttctactttttttttcttgacaaatctttgggaggatggctgggtgggcaccctgtggttgcttattccaaatagaactgtttgtccatgtttcccatagaaaccgccccttccrtacacagcagtaccaagccccgaagtggaggccactccatgaggtctgcgtgggaccggggaggcagggctgcggtctcagggcaaaggcacgtgtatgaaacatcctctgtgctctggcccttacacacagtgcttcgagaagacgcagaggaaacagaagacgcagcctttacccttaagggtttgtattctagatgatgagtcctgtggatgctacagacgcatttacaaaattgaggtgatttcacattgaagcaacaagtttatgaagcgcctgttc

SEQ ID NO: 720445 - DNA, 604 bp, Homo sapiens
gcaagagattctactttttggactttatcctataartataccctatggcattgtttttaaagagaaaaaactgaaaatccagtaaccattttttaactactgtgtataatctaatgtagaacaatgtccaatatattgttaaatgagaaagcaagtactgtagaatatattgttacttgtgtataaaaaaaataagtggtagtggatatatacacatagtagatgcagagaatttctttggaaggatacagaaggaactgatggcattggttcactctaaggggaactgaggcactctgggtgtgaagagggggagggacattttcattgtatacattaactggatattcgttttctatgtgcatatattaccttttcaaaaaataattcacactaaaacgtaacttgcacactagaaaaactgagttgctgctctccattagaattggagctagaggcaacgtggtgataaaagtttgtggactttgaaactggacagattctaggttttaaagttaggcctggcacttaccaattatataatttactctctccagcctgtgatatcatttgaagaggaggagaatacctgtttcatggctta

SEQ ID NO: 720446 - DNA, 604 bp, Homo sapiens
gcaagagattctactttttggactttatcctataaatataccctatggcattgtttttaaagagaaaaaactgaaaatccagtaaccattttttaactactgtgtataatctaaygtagaacaatgtccaatatattgttaaatgagaaagcaagtactgtagaatatattgttacttgtgtataaaaaaaataagtggtagtggatatatacacatagtagatgcagagaatttctttggaaggatacagaaggaactgatggcattggttcactctaaggggaactgaggcactctgggtgtgaagagggggagggacattttcattgtatacattaactggatattcgttttctatgtgcatatattaccttttcaaaaaataattcacactaaaacgtaacttgcacactagaaaaactgagttgctgctctccattagaattggagctagaggcaacgtggtgataaaagtttgtggactttgaaactggacagattctaggttttaaagttaggcctggcacttaccaattatataatttactctctccagcctgtgatatcatttgaagaggaggagaatacctgtttcatggctta

SEQ ID NO: 720447 - DNA, 604 bp, Homo sapiens
gcaagagattctactttttggactttatcctataaatataccctatggcattgtttttaaagagaaaaaactgaaaatccagtaaccattttttaactactgtgtataatctaatgtagaacaatgtccaatatattgttaaatgagaaagcaagtactgtagaatatattgttacttgtgtataaaaaaaataagtggtagtggatatatacacatagtagatgcagagaatttcttyggaaggatacagaaggaactgatggcattggttcactctaaggggaactgaggcactctgggtgtgaagagggggagggacattttcattgtatacattaactggatattcgttttctatgtgcatatattaccttttcaaaaaataattcacactaaaacgtaacttgcacactagaaaaactgagttgctgctctccattagaattggagctagaggcaacgtggtgataaaagtttgtggactttgaaactggacagattctaggttttaaagttaggcctggcacttaccaattatataatttactctctccagcctgtgatatcatttgaagaggaggagaatacctgtttcatggctta

SEQ ID NO: 720448 - DNA, 592 bp, Homo sapiens
cccctcaacacctccacccctactttttaagactttttttttttttttgagacagagtcgctctgttgcccaggctggagggcaatggcacaacctcggctcactgcaacctccgcctcccggtttaagcatttctcttgcctcakcctcccacgtagctgggattacaggcatctgccaccatgcctgactaatttttgtatttttcagtagagaaggtgtttcaccatgttggccaggctggtctcaaactcctgacctcaagtgatccacccgcctcagcctcccaaagtgctggaattataggcatgagcgcctggctcaagactttcaaatctaacacattttattttttaatagaatgtattctttaaaagttttagattgtaagaaaaacagaagatagtacagagaattcccatataccctgcatctagtttatctctatcacccaggctggagttgagtggcacggtcacagctcactacagcctcaactcctgggctcaagcaatcctcccgcctcaggctgctgaggaccacaggtgcacaccaccatgccttgtattgtttgtagaaacggggttttgcc

SEQ ID NO: 720449 - DNA, 592 bp, Homo sapiens
cccctcaacacctccacccctactttttaagactttttttttttttttgagacagagtcgctctgttgcccaggctggagggcaatggcacaacctcggctcactgcaacctccgcctcccggtttaagcatttctcttgcctcagcctcccacgtagctgggattacaggcatctgccaccatgcctgactaatttttgtatttttcagtagagaaggtgtttcaccatgttggccaggctggtctcaaactcctgacctcaagtgatccacccgcctcagcctcccaaagtgctggaattataggcatgagcgcctggctcaagactttcaaatctaacacattttattttttaatagaatgtattctttaaaagttttagattgtaagaaaracagaagatagtacagagaattcccatataccctgcatctagtttatctctatcacccaggctggagttgagtggcacggtcacagctcactacagcctcaactcctgggctcaagcaatcctcccgcctcaggctgctgaggaccacaggtgcacaccaccatgccttgtattgtttgtagaaacggggttttgcc

SEQ ID NO: 720450 - DNA, 592 bp, Homo sapiens
cccctcaacacctccacccctactttttaagactttttttttttttttgagacagagtcgctctgttgcccaggctggagggcaatggcacaacctcggctcactgcaacctccgcctcccggtttaagcatttctcttgcctcagcctcccacgtagctgggattacaggcatctgccaccatgcctgactaatttttgtatttttcagtagagaaggtgtttcaccatgttggccaggctggtctcaaactcctgacctcaagtgatccacccgcctcagcctcccaaagtgctggaattataggcatgagcgcctggctcaagactttcaaatctaacacattttattttttaatagaatgtattctttaaaagttttagattgtaagaaaaacagaagatagtacagagaattcccatataccctgcatctagtttatctctatcacccaggctggagttgagtggcayggtcacagctcactacagcctcaactcctgggctcaagcaatcctcccgcctcaggctgctgaggaccacaggtgcacaccaccatgccttgtattgtttgtagaaacggggttttgcc

SEQ ID NO: 720451 - DNA, 614 bp, Homo sapiens
caagactacagccttcagaggtgggtactggtgtgttatatttccaattaacttaagaaaagaagaatacaccttgcaataattaggtgacttgcccaaggtcgcctggctaataaatttccagagccagcacttttagccattcctctatttgtgagacgcttcttctgtctggggmagtttgagacttagatgtcctctcagagattaatgtagaaaagggtcttaggtattccttggtgtcatcagagctatcttgagcgagagcagagccataatggggtcctttggtgcaagctgaacctttcttcaagaaatgtgaagtgtattccaggtgccctttggagcacaggctgttgtgagaaagactaaaataaataggtactaaaacagtagtggattcttccctggttaaggctgtagttttccctggggcattgaagtagacacactttggggctacagacccctggtttgctgcaaaggttatgtggagggcagtctgaagtggaaggaaatgactcccatttgcacaaaaaagaccttttcccattgccccctccaaaatctggagtctcagaaatgctatcagtttttatagccctcactcatca

SEQ ID NO: 720452 - DNA, 614 bp, Homo sapiens
caagactacagccttcagaggtgggtactggtgtgttatatttccaattaacttaagaaaagaagaatacaccttgcaataattaggtgacttgcccaaggtcgcctggctaataaatttccagagccagcacttttagccattcctctatttgtgagacgcttcttctgtctggggcagtttgagacttagatgtcctctcagagattaatgtagaaaagggtcttaggtattccttggtgtcatcagagctatcttgagcgagagcagagccataatggggtcctttggtgcaagctgaacctttcttcaagaaatgtgaagtgtattccaggtgccctttggagcacaggctgttgtgagaaagactaaaataaataggtactaaaacagtagtggattcttccctggttaaggctgtagttttccctggggcattgaagtagacacactttggggctacagacccctggtttgctgcaaaggttatgtggagggcagtctgaagtggaaggaaatgactcccatttgcacaaaaaagaccttttcccattgccccctccaaaatctggagtctcagaaatgctatcartttttatagccctcactcatca

SEQ ID NO: 720453 - DNA, 1027 bp, Homo sapiens
gagggatagaagcacccctctggctgcagtgtggacagtgatccagagaggatccgaattatgagaagagattgattgggtaggaggttcttgctggggtccagatgagagatgacgctagctgggccagaggagctggtggttgagttgtggggggtaggagttaaagtcagcgggattgccactctttgtctgccttgcctcataccctgccacatctttgtcgagggtgtggtggctcgtcgctggatccactcctatggatccctcatctcaagagaggatgagataatataaggaacacctgaaagaaaggagcgtgtgtgtttgtaagaggtgcatcaatttgagctcctggaaagtagtgtcaaaaatggactcaggcaagcttacrtaagaaaggcattcattgggaggctaacagaactcaccaaacctgatggcttaggaaatggacaggaaccaagatggctccagatggtcaggcagcaggaatcccctgttctttccttccccaaacatttactgtgtgcctactaggtgccaagcaacagcccatccacaggtaacagaacagcaggcgggataagaatgtatgaaggtgaaagagggccccagagccacacagggcatgggtggggggggggggttctgtttcagatgcaggggacaggaagtcctttccagtgatgcgatcagaaaagatacctgaatgcagagaaggtgcagccttgcgaatctctgtggggcgagcatccccagcaaaagaatgggggctagaacaagctctgtctgtcatgggaacagttagatccatgtggctactgccgactgagcaggccacagtgagggctgtggattttgagtgaaatggtgagccactggaaggatttgaacaggggaataaccctaacccgatttgatttacaagctgaaagaatccttctttttttttttttccaaacagggtctggctctgttgcccagattggagtgcagtggctcaatcatggctcactgcaatctc

SEQ ID NO: 720454 - DNA, 669 bp, Homo sapiens
cttttactgagcgtttatcactgtattcctaacacatagcacaascctgtcacatagcaggagtttaataaatatttattaaatgaataattgaacaagagtgcttgacaactttcataactttcacctactccaggttattggactcttctgtgggcacttaaccatagtcatagtcctgcttcttccaggatggaccctcttagatccaagaccttctacccacttgtcactgaaagcttctatgaccagagattcctcattatccacctgggtgggcccatggacaccagtgccagccttgactaggacaaagatttcaaatgtccctttaggcactgcagtgatagcttttttatacccttcttggtgacaacagcattagtcccctgacccagaacttgggtctcagcctacttccttcttgtcatccttcacaggcagctctatgagagttgtggtgatattgtagacgcccttgagggtctccctgctacaacagcctaggagtaaaaagtaggattataataatgtaatttcactctgattcacaattgaaaacatgtaaatcttctctcctaatatgctaatatatatatacatgtctgtttttaattttcttatagcatttactgctatttgaaattgcctatatatttgttatctggc

SEQ ID NO: 720455 - DNA, 631 bp, Homo sapiens
atatagctatcacatatcaccacatgttcacggattttcaccaacccagaccccaaaatgacatgctgctctttcttcttcagaaacatgaattctggaatcttgcaagtcttccagagggcactcacctgtcccatctgcatgarctacttcctagacccagtcaccatagactgtgggcacagcttttgccggccctgtttgtacctcaactggcaagacacggcagttcttgctcagtgctctgaatgcaagaagacaacgcggcagagaaacctcaacactgacatttgtttgaagaacatggctttcattgccagaaaagccagcctccggcaattccttagctctgaggagcaaatatgtgggatgcacagagagacaaagaagatgttctgtgaagtggacaagagcctgctctgtttgccgtgctccaactctcaggagcaccggaatcacatacactgtcccattgagtgggctgctgaggaacgccgggtaagtgatgcctctgaagatctatttctatacaggacacatgaaattcttgtaagtctatttccttcgagattggatgatgccatctctgtgtccccttaagcatgtctgttatgagcttccttgacttcac

SEQ ID NO: 720456 - DNA, 631 bp, Homo sapiens
atatagctatcacatatcaccacatgttcacggattttcaccaacccagaccccaaaatgacatgctgctctttcttcttcagaaacatgaattctggaatcttgcaagtcttccagagggcactcacctgtcccatctgcatgaactacttcmtagacccagtcaccatagactgtgggcacagcttttgccggccctgtttgtacctcaactggcaagacacggcagttcttgctcagtgctctgaatgcaagaagacaacgcggcagagaaacctcaacactgacatttgtttgaagaacatggctttcattgccagaaaagccagcctccggcaattccttagctctgaggagcaaatatgtgggatgcacagagagacaaagaagatgttctgtgaagtggacaagagcctgctctgtttgccgtgctccaactctcaggagcaccggaatcacatacactgtcccattgagtgggctgctgaggaacgccgggtaagtgatgcctctgaagatctatttctatacaggacacatgaaattcttgtaagtctatttccttcgagattggatgatgccatctctgtgtccccttaagcatgtctgttatgagcttccttgacttcac

SEQ ID NO: 720457 - DNA, 1887 bp, Homo sapiens
tctctcaactaatctatgtccagatttttgtcatgtaaacaataaattcccacttttgcttaagccacttaaaaaatttaatctgccacatgcaaccaaagatgaaaaatgcaccttcttataaatattctttttttataaatattctcttcattaattgcataatgttctagttccttgtagtgaatttcaagataatttagccatatatgtgtgtatgtatgtatagatgggtacatatatatatacacatatataggtgtgtgtatataacaatatagctatagatatatacatacacaattttaaattaacacatatatatatatatacacacacacatagttttaaattaacttgttttatatgtctttcagctatacttatctttctccactagaaaacacattctcaatctcattttcaattctccaatcacgccatggactttccaatttccacttaagtgtttgtgttgttttcccttctatttctcatccactatttttcacttgatgtaattcttaatgcccagttcaagttattctccttttctctgttttgtacctggtacctagaacaatccctggaagaaaatactcatagagtgaatttatttgttcgatgaaggccttttgatgttttctgaccttgtgtggccagcatttcatttgaatgcagatgcaactctatcatagtacatatcggagttattaaactcatttataattgtttttctcaatcactagatacatttttgcttcttttcaatttattgtaccattgatttgcatagaatattatagcagttgtttgataagttgctttgagctggctaaatcaaattagataataaatataatcaaatttttcatatagtaacctaccatttcaaaagccaaagtatgtctctttgyagcattctcgtgatgtagaaaaacatcttacatcatttcattttgtgtttaatcaattccccagtagaaatgtttaattgctcacatatcttttcccattagagatttgaatatcagagtttgagttcttgggatctgatgtgagatcaaaagctgatctcgaaagcctcagagcaaaatataaaaagccttgtttctcctaaggaaccacagtctttttaagaaaggcacaaatgtcttctatgaacacagaatgtttgccccaaatggattataccaaatgttacaatggatcatttttttgtaatatttcagtgtcaaatttaatttttctagtggaaaatgaactggagctcaaaaacagtgaagtcagaaggtgaacggggaataaaaagttagttacctggtaagtatttctaacataatcctagggatattagagcagaagagattttgtgtttacctccttatagtttcttattttacacataggaaactgatgttttgagagtaaatatgtctagaataacacaggttttaaatcttcaaggtgttttcaacaaaaatgagagcaacaaccaaaagcacatttagcacacaatattcataatacaaccatcaacattattggactttgattaggaatcgaatgtaagcacagttttcgttacatattatttatttttaaaatttaaatacagattaaggctgactcaattttatataatgttatttattatatattatggcaatgcattggtaccaagtcatcagtgcactagtaacaggcctgaggtgggaaaagggaattagttaagaaataaaaagttaaaaatatcataaattaatatagattacctacataacagtatgacattttgctgagctatttcagaaacttccattcccacctgcctattccatagaagaacacctggtttgtctcattttttgaatcttcttaatcttt

SEQ ID NO: 720458 - DNA, 578 bp, Homo sapiens
acattattacttttgtatggagggctgcagaaagtgatgagaaaaaacaaaaacaaaaaacacctctggccagtaagggaagcaaacccacattcactgtccatatttttgcttccttttaaatgcataaagtcattattctgtccaggctctctgttgaaatcrtgggtcatacttattttataccaagctttggaaataaggagatgtcctggtttatgtcaggtaattaacccatataagggcaaagaaatgctactcattctaaacagaatcaaaatcagaaattctaaatagaatcatcagttcaggtatactgcaggcataatataaaaacatgtttctatagtaaaatcactgacgactatacattgggctgccttttctccaagttgtgtttgatcatttcttctcacagatgttaggctacaaattaagacagatgggttttgtttgtctctcaaagaaaactctgtctgctatgtagctaacatctcaggaagaacttgagtgttactctgagtgactttttccaatgttggacagtatttttagtttcctaaattcaagagcaacaa

SEQ ID NO: 720459 - DNA, 622 bp, Homo sapiens
ctatgaaataaggaaaataactcccatcaaagttacatcattatgacatgtacaacaccagtagtaaaggaaaacctaaacacttccaataggaaaaaagttgaagtaatatgaaaagaagtgggaataagaatagtacccaaatagtcaacagatactacagttgaaaagctgggatatacgtgccttcaaaaatatggaagaaaataattttcaatctagaaatctatagcctgtcagatcatcattcaaatattattcttgtagaattaagatatttctcaggttcaaggactcagaaaacatgtcttccatttactgtttactagagacagagagaagtgtgcaaatgataaacaaaacaaaaaagttgaaagggaaaaaaattaaaaattttgttatagtattgggcttaacaatgaaagatctatatagtcaaaataaaataaatactgactatttaaacaaaaatataatataaacatcaggtgtattgggaagtaaagaggagtggtacatgatatctaaattcttaataattatcacatacaccctcccaagactaaaccaggaagaagttgaatccatgaatagaccaataacaggagctgaaattgwggca

SEQ ID NO: 720460 - DNA, 1686 bp, Homo sapiens
atcatttttgtggttgtttcaactccgtgagctagcctgcagagcgcccgaggctggggggcatccgaagcccgatttcctccctattccacccaactctccagcttcggaggcctgcagaggaggctgggggccggcgggaatcctcgccttccacctgcagcctaagtcgcctgtggctaagtcaacctgccgccagcgcccagggtggcgaccggcatttgaaaacgtctgagcatcccgagagaagtgctttgctgtggccggcttggctgtggctcctccagagccggcctcgaaggcacctccttctgcggaaagccgctcagcgttgcaccgtctcacgacttccaccggctgcggacgcggcgaaataaataatcccagatgggaytgcggacataggatttcccaacttactttgcgtaatcaaatacgcgacccgtcgcaagccatgggggtggggagtggagactgcgggagacaattctctccgccaggctgttcgaatcctccctttccggccgcgcgcggtggctcacgcctgtcatcccagcacttcgggaggccgaggcgggcggatcacgaggtcaggagatcgagaccatcctggctaacacggtgaagccccgtctctactaaaaatacaaaaattagccgggcgtggtggcaggtgcctgtagtcccagctactcgggaggctgaggcaggagaatggcgtgaacccgggaggcggagcttgcagggagccgagatggcgccaccgccctccagcctgggcgacagagcgagactccgtctcaaaaaaaaacccaaaaaaaaaaaaaaaaaaagaatcctccctttccctgctccgatttacaaaggaaaggaaaaactgaagctcggagaagctcatgggagttgctgggagacacacagctaaaacagtggctgtgcggggtcaaagagcacctccagctccctgcctcataccgtctttttaaatgtgctctttgcagcgggatacggagtcagacgccgactatgaagtaatcgtcccttcctagcatatctatctggaggatctgccagcccgcctgtcccaacccccggcagcttccatcctccatgctgggaaacgtggctcaattcccttggggggctggtagcagccaggagatgaggcaactgcagactttcttgacttctcagtacccattccaaatggtcctcaggggaggcagataccgtgggctgtactggggcctgggttccacccccggggctgtggccttgctatggaaggcagtcctgggagggcatgtggctggttgccacatcacgagacacacagctcttcacccccgagagccttcttgcagcccctaggggtcctcacgactaactggaacagtaaacccttaactctgagaactttccactccctattcccattctattttggggttttacatttcaagggggcaggctttatccacactgaaatcactctccatattttcccagcagtctaacaaccaggtagagaggaatcaaggcggggcggggcgggggggggattgccaagtgttggcaaggcaggtgctgtgatgaaaagttaacttcttccatgtgcatgaacccctcagcaaatctttccaccttcctgggcctgggcttccttgactgtaaagtgaaggaggg

SEQ ID NO: 720461 - DNA, 1686 bp, Homo sapiens
atcatttttgtggttgtttcaactccgtgagctagcctgcagagcgcccgaggctggggggcatccgaagcccgatttcctccctattccacccaactctccagcttcggaggcctgcagaggaggctgggggccggcgggaatcctcgccttccacctgcagcctaagtcgcctgtggctaagtcaacctgccgccagcgcccagggtggcgaccggcatttgaaaacgtctgagcatcccgagagaagtgctttgctgtggccggcttggctgtggctcctccagagccggcctcgaaggcacctccttctgcggaaagccgctcagcgttgcaccgtctcacgacttccaccggctgcggacgcggcgaaataaataatcccagatgggattgcggacataggatttcccaacttactttgcgtaatcaaatacgcgacccgtcgcaagccatgggggtggggagtggagactgcgggagacaattctctccgccaggctgttcgaatcctccctttccggccgcgcgcggtggctcacgcctgtcatcccrgcacttcgggaggccgaggcgggcggatcacgaggtcaggagatcgagaccatcctggctaacacggtgaagccccgtctctactaaaaatacaaaaattagccgggcgtggtggcaggtgcctgtagtcccagctactcgggaggctgaggcaggagaatggcgtgaacccgggaggcggagcttgcagggagccgagatggcgccaccgccctccagcctgggcgacagagcgagactccgtctcaaaaaaaaacccaaaaaaaaaaaaaaaaaaagaatcctccctttccctgctccgatttacaaaggaaaggaaaaactgaagctcggagaagctcatgggagttgctgggagacacacagctaaaacagtggctgtgcggggtcaaagagcacctccagctccctgcctcataccgtctttttaaatgtgctctttgcagcgggatacggagtcagacgccgactatgaagtaatcgtcccttcctagcatatctatctggaggatctgccagcccgcctgtcccaacccccggcagcttccatcctccatgctgggaaacgtggctcaattcccttggggggctggtagcagccaggagatgaggcaactgcagactttcttgacttctcagtacccattccaaatggtcctcaggggaggcagataccgtgggctgtactggggcctgggttccacccccggggctgtggccttgctatggaaggcagtcctgggagggcatgtggctggttgccacatcacgagacacacagctcttcacccccgagagccttcttgcagcccctaggggtcctcacgactaactggaacagtaaacccttaactctgagaactttccactccctattcccattctattttggggttttacatttcaagggggcaggctttatccacactgaaatcactctccatattttcccagcagtctaacaaccaggtagagaggaatcaaggcggggcggggcgggggggggattgccaagtgttggcaaggcaggtgctgtgatgaaaagttaacttcttccatgtgcatgaacccctcagcaaatctttccaccttcctgggcctgggcttccttgactgtaaagtgaaggaggg

SEQ ID NO: 720462 - DNA, 642 bp, Homo sapiens
agaataaatagtccaatttcactttaggtgaatctcactcccctcttcacaggtaatgagggttaacagtaagtaggctgcaattcatttcaggtaacttttcttttttcttttatttgcttttgttttatcttcttttcttttttttttgtttttactttttaatttctttttgagggagagtgcaaacgaaattcctcactaccacaaattatgccttgggttttccacattaggggaagtcacaggggtcagaacatccagagtgcaatggataagcccactctgggtaaaccacctttgtaatcacaatatctcacctgcctagtaagtatccccagatcacctcccatgcaatatgtaagatatatacacatgcatatatttatatatgtgtgtgtaaatktatgcacatacatacatataattttgtttttaaacacatttttttaccaaatgtcataattctatacctaatatcacaatttactttttccacttttcaatatgtgctggagatctttccatgctggcatatacatgactggtatatatataaatctatgtaattattctacagtacaaatatactgcagttcaactaacaatggatgtgtaggttgagtgtagttttgttaacta

SEQ ID NO: 720463 - DNA, 642 bp, Homo sapiens
agaataaatagtccaatttcactttaggtgaatctcactcccctcttcacaggtaatgagggttaacagtaagtaggctgcaattcatttcaggtaacttttcttttttcttttatttgcttttgttttatcttcttttcttttttttttgtttttactttttaatttctttttgagggagagtgcaaacgaaattcctcactaccacaaattatgccttgggttttccacattaggggaagtcacaggggtcagaacatccagagtgcaatggataagcccactctgggtaaaccacctttgtaatcacaatatctcacctgcctagtaagtatccccagatcacctcccatgcaatatgtaagatatatacacatgcatatatttatatatgtgtgtgtaaatttatgcacatacatacatataattttgtttttaaacacatttttttaccaaatgtcataattctatacctaatatcacaatttactttttccacttttcaatatgtgctggagatctttccatgctggcatatacatgactggtatatatataaatctatgtaattattctacagtacaaatatactgcagttcaactamcaatggatgtgtaggttgagtgtagttttgttaacta

SEQ ID NO: 720464 - DNA, 1512 bp, Homo sapiens
cttagcacagttcccactacatagtaagatctcaaaactgatagcaataattattattttgcattatgtatatatatattgagaaagaagagaaaatactgggagcctttaataaattactgccaaatttaacaataccaaaccaacaaaatatcccacaaacactgtaatgactgttgttaatttctcaacaaaaaagtcagtatttaaggataagtctactccagcttcagtcagttacgattgaagacacacctaaaactcattctacacaggccgggcacagtggttcacgcctgtaatcccagcactttgggaggcctatgcaggtggatcacctgaggtcaggagttcaaaaccagcctggccaacatggcaaaaccccgtctctactaaaaaatacaaaaatcagccaggtgtggtggcaggcgcctgtaatcccagctactcatgaggctgaggcarggagaactgcttgaacctgggaggcgggagctgcagtgagacgagatcttgccactgcactccagagtgggtgacagagtgagactctgtttccaaaaaaaacagggctaaagctgggcatttttagagaaaataaattttgaaaaatatagcccattaaatgtataacttcatttgttcacattctcaacatgatggaaagttcaatggtccaaaaataaagtcgaaattaaaataaattttggggcccggtgtggtggctcacgcctgtaatctcagcactttcggagactaaggcaggcagatcatctgaggtcaggagttcgagaccagcctggccaacatggtgaagccccatctctactaaaaatataaaaaaattagccaggcatggtggcgggcacctgtaatcccagctacttgggaagttgaggcaggagaatcgcttgaacccgggaggtggaagttgcagtgagccaagattatgccactgcactccagcctgggcatcagagcaagactctctgtcttaaaaaataaaaaaaataaatgtttttgtttcacaggtctttagttaccttcctcttatctaccatactaaatgacaatttttttcccctcacatttgtctgcttaagatattcaaagacataagattagacggagtacatttccttccgttctggctgtttttactcaaaattgcttcaataacttcacattacatatgggatcaagtccccaaagcctatagcatgggatacagggccctgcctagcttgcagcctcaatctcatctcattccattccatacatcccggggcttgctctccccacaactcaatcgctttgtgagcctctcatctgaaaagttctccagctcccctgacacacacacctcacaattgctggcaaaaccctcctacttttcaaataacctcaggggtacttcctccgtaagacattttcggtccctttgcctcccgccctcttctttcatcccatcatctcctcccagtacagacttctactatagcccattatcat

SEQ ID NO: 720465 - DNA, 2132 bp, Homo sapiens
cactgaggtattatgaatcagtttgtttcctaggcattagagaatcctttgtggcaatcaatttaaaaactgatgtgattttaatccaccttcaattttgtaatagagtcacaagccatataaaagacatcttagtcaatgatgaactgcatatacaatggtggtccagtaagctaaaattaatttatcactaaagaaaaaatatttttaatatgtttagtgtagtctaagtccacagtgtttattatgtctactgtagtgtacaataataatgtcctataccttcacattcactcactactcactcactgataaacccacagcagcttccaggcctgcaagctccatttatcttatggtaagtgtcctatacaggggtaacatttattatcttttataccgtatttttaccatacctttcatatgtttggatatgtttaaatatataagtacttaccattgtgttatcaattacccacagtattcagtatagtaacatgctttacagctttatagcctaagagcaacagagcaacaggctataccataaagcctaggtatacagcaggctacaccatctagtttgtgtaaatatatgctgtgacatttgcataaacaacaaaattgcctaaagactaatttctcagaacatatccctgttgttaagtgacatataagtataataaatttttgcaatgataaaaattcaaaattaatatctaaagtctgttaaaagaaaacaaattccagctgggtgtggtggctcacaactataawcccagcactttgggaggccaaggcaggtggatcacctgagttcaggagttcgagacctacctgactaacatggtgaaaccccgtctctactgaaaatacaaaaatagccaggcatggtggtgcatgcctgtaatcccagctattcaggaggctgaggcaggagaatcactggaacccaggaggtggaggttgtggtgagccaagattgcgccactgcactccagcctggggaacaagagcgaaacttggtctcaaaaaaaaaaaaaaagaaaacaaatcccaaaactcaaagtttcaagtgtcattatacttgttacaggaatagttttaagaaaaagaagtatttagcataaaatataaatattttctccaaatgttttagtaatatagtttgttcactatatagaaagttaaaattgtttatgtttgaatcaacttttagcaaactcttaaattggcagaactgcatgatagccatataaagctggtaaaagtgaaaagtcatcttaaaaaaaggctaacaatagagaatgtttatataaaatccaacgaaataaaagaatatgcagacatcaaagcaatgcttatgaagaatttgtgatgacatgagaaagtatgatataaacagaatacaaaactacatatacagtataatctcaagtaattaaaaatttatgtagttaaagagagaaaaaatttagaaggacattctccaaatactaataatttatctgtgggtggtagaatcatacagaattttagttttctcattttactttactatatttcccaattttctataacaaaaataaatttcttttacagttataagaacatataactttaaagtaaggaatttaatcatacctgacagtgatggtatgcctgtaactcggaagaagtttttccatattcaaaaatctggtgatttcttcaagaatgagtcgcacatcaggatttaagttatccaaagttctaacttcattattcacactgactgcaggtgtaacagagttggccagggcatcaatcatttctgcacgataatagttatctgaaaactaggccaaagaaaaattaagtgaagataacaaaattaactcttctgatcaaaattaacaaaataaaatttgtataattacattttagataaaataaaaattttcccaaaacacaagcaagtcctctggtaaacattcaactccaccctttgcatgtggtcactctgaaaacagtaagagattcactataacaatacattagtttactgatggaaaactaatgatagaaaataggaggaaagcataaagaaactggagggttaatgtaggagttctagccagagaaacagaaaa

SEQ ID NO: 720466 - DNA, 650 bp, Homo sapiens
atcaatctctctaccagttaggaaggatataatataactatggctttaacaactattcaaggtaacaactacaaagcacagagttctggaagtgaaaagacttctcaatatattttaataatttctttctgttaaataaacattgttgacaatgaacactgacattccaaaaacattcagagcatcttcaccagtagatcccatctcaagaaaccactttctttgctcatccataagcagcaactcctccgtccattaaagttgtatcatsagactgcagcaattcagtcttacctttaggctccacttctaattctagtttcattgctatttctaccacaactgcagttacttccttctctaaacccctcaaagtcatccatgaggtttggaatcaacttcttccaaacccttgttcatgttgatgttttgacctcctccctaaatcatgaatgtccttaatggcatccagaatggtgaatccttttcagggtttcaactgactttgtccagatccctcagaggaatcactatctatggcaactatcgccttatgaaatgcatttcttaaataataagacttgaaagtagaaattactctttaatccataggctgcagaatagatgttatgttagcacacataaaaaca

SEQ ID NO: 720467 - DNA, 1399 bp, Homo sapiens
cagctaattcttgtgtttttagtagagacagggtttcaccatgttggccaggctggtctcaaactcctgacctcaagtgatctgcccaccttggcctcctaaagtgctgggattacaggcatgagccgccgcgcccggccacctccattatttaaaacttagatcacattgtacttttccattaattaaaacactcctagttgcttcccattatatgtagaattaagtcacaattctttttccctgtccttcaaggttctacgtgatctagctgttgccccttctctagctcacgtcctcctattcctccctctccttattatgttccggtcgtaatcttcttctctttgaggtacagaagaggaaaccaaagttcaggaagcattggtaacctagacaagttcacacaggtaccttgtatccaggttctctgactctaggccctgctgtgtaggcctcactgtattacactgcttgtatttctaattyagaggctgtgtcatataatagaaatagcatagactttgaagttgtacaaacctggtggcaggatttgactctcatttattacttgtctgagccatagttctcatatctaatatagggttaaataatacattatttctagtttttgttttttgcttttttttttgtttgtttttttgagacagagtctcacactgtcactcaggctggagtgcagtggcgcgatctccgctcactgcaacctctgcctcccgggttcaagcaattctcctgccccagcctcccaagtagctgggataacaggtgcccaccaccacacccggctaatttttttctatttttaatagagacagggtttcactacgttggccaggctgatcttcaactcctgaccttgtgatctgcccacctcggcctcccaaagtgctgggattacaggcgtgagccacccgcctggcctactcctacttttattgtgtgggttaaatgagacaatacatataatgtacttaatttaattaaaacttagaaccactccccaccctatctctcccacaaacacctacacttacgcttgttgagaagacagattcagggggagagagagaaaataagtacatagtactgtatcataatatgttccctaaaatattcatgttatatattttttattgttcctacagagatttgtgtggagagaagcaaaccataggtgcattactcactaaatattctcattcttcgatgcaaaatggtgttaaagtttataattcgagaagacccatttcttaaaagaacaacggtcttttcttcaggactcaagttgctttataaagttgctggatagaagaaaaataacttgtacttttatttctgacttttagaaacctagtcttttaaggcattttctcct

SEQ ID NO: 720468 - DNA, 611 bp, Homo sapiens
ccatacccggctaattttttgtgtttttagtagagacggggtttcactgtgttggccaggctggtctcgaactcccgacctcaggtgatccccccgcccccgcagcctcccaaagtgctgggattccaggcgtgagcccccgcgcscggccaagagttaattttgatgacatagaatgtgctgggagctggtgccccaaagggaaccacaaggagtttcccgtataaatgaggaatgaagatggtattctagtgtgaaagtaattatcagcgaacgacactaacagcgctgttgagctccccgcccagtgagactgattcctgggcttaagagagaatctcagagtacataactcttacttcctactctccaggtgctttcttcattgatggggagacgtacatgaaacacgcttagagcaaaggacgcctagcgtgttctaaatgaccacaataggggatgtggtcatgagccggattgggagtcctgtacgtcgtagcctgtgttgacttccttgagcaccgttgttcttaagtccctctgtcacctgaaatttcaatagcttttttgacaacatgtgagattgagtgtcttagtattcactttgggag

SEQ ID NO: 720469 - DNA, 2850 bp, Homo sapiens
ggtcctaccttattcaggtccacataaactagcaagcccttaaaacttttcataggcactcagacacccaaggagagagactgtcagaaaaaaacagagtcctggtaggtgtacctctatttccctaagtactctctaagtatctgtcttcctatgggctcccacttccagattccacttctgcagggctccacagaagtctccaatctttaaatcttcagtctatgaaagcacagattcctgaaaggatggcctcaaatgaccaggactaggagctctctatatccctgctcctgaaaaacaagctaactggagtctccatcacctgcccccagctagacacactaccaactacccaactgaactccatgactgatttgccagccaatcatgcccctgacccagcccacatggacatgggaaggacatcagtgaatcgggaaaagaggcagaggtgaggagacacctgtactgggccacagatctatgtagttcagcaatctccagccccttagtactccaggggctctaagccacccctttctaagtcaggatggaagcagatgacaccacatttctatctgctgcagacgctcctcccagtgtctcaaaatgttttagcatctttcagtaaaaatcttcaagtttgtcagtccttgatttaaaaaaaagcagcaaactttttagagctcccttgaaccttctattttaatgtgccttcgtagataattcccaacatcttgtgtccttcatttttataatttatctttatcaaacttgtcataaaccccaatattttgatctcttatagaagagtctgtactcctatccaatccagtgttgtttatcttcaaacttggacttcccctgctcattccattcttatctacttccattgggttccccggctaattccattctcattctacccacagactcactcccgtttgtattattaaaacacacgccaataggatataaaaagaagcaagagtactgggctttaacatgagttcaaatctcatttctgccaattcctatgtctaaaaaaaagcatcctaaactctttgagcctcacattctctatctagagaatcatttgaccagaatgttcaacacaggtaaaaatactagaaggtattttaattcattccaagattccttaaaattctgtaattctatgtcctcttgattctgtctatagaaaaacttagaatacatagccagcagagtttgaaaaaataatagaacaaaagaaataccaagaaaagcagagaagaaagttttaaaaaatgaaggcaagattatagaaaagtcacggaaaaagcaacaagactaaaaaatgtattatggaagtaagcagaaatacttgcctaaatggaaaaccaaactgggaagtcaaataatttgtctctaagacttgcctaaacttgcttttgtaaaacttacacccctatggcaaagctaagtaagatctgccctagagcctttgatggtaaaaataagatactggttaccactgaaattgtcaaatttattaggacaaactcttggactaaccacattctaatgataaacttaaatgagagttcaaggtatttaaactctcattaatttagacattaatcaaattaatcaatctgactaatctgattcagacctataccttgatccaagggctgcacagatatctgtcaatctatgctgaggagcaagagacaggatttggaaggcaggcaggctgatggtcaaactgtaggccagctactttgttaactatgggatcatgaggcaattaatcagctctaatccatagttgtttatttaataaacagtaggttataggaacacagatgttgtgatggctttatgagatgatatatgcatagaacatattaggatgtctagcccagaatacaacactcaacagatactcatttcttccatctatattttcttagttaacataattttttaaatctataaaatcctacctgactgcagattcatcagaacttccaacatctattaaagaaaaaggtaaaatgcattttaaatcaataacaaatgtacagaatattaaaagcataagaatgcacagtgatgcatccctctaatccaaactacttgggaggctgaggcaggaggatcacttgaggagcccagaagtttgagaccagcttgggaaacatagtaagactctaccttcataaaaaaattgtgcacacttgtatgtatgctttagatcctgtttkttgttgttgttgtttttgttttggtttggtttggttttttaaagcataagactgatgctttgttacaaagcattcctttgggagcatgcctgggaccttattagaattaacattcgttatacatattggtaggtaattaatgcagtaagaactcttccctttgtatttattagatgcaaagaagaataaatttattaaaatttggtatctacaagtgaactgcagtatgcaagtcatcttagccaaaccctatgaggttgagtaaaaatggtattgttagcagaacaggtgtgatgagtcaacagtgtcaaagagcatgatttctggaccaaaatatgaggcgccattaaaacagagtacacagtagtaccccttatccactatacgtgcagaaagacatacttgacacatttttctctgctgtcacaccacagcaacaatcatcaacaaagaaggcttctgtgaccaaatgtgtggagggtttttccccaccaacaagcaagcaatcattcctgctgatgacacaattcaattctcacaccttatctgctggtaacatcagattcaatttaatttataaattaaactttagcat

SEQ ID NO: 720470 - DNA, 2850 bp, Homo sapiens
ggtcctaccttattcaggtccacataaactagcaagcccttaaaacttttcataggcactcagacacccaaggagagagactgtcagaaaaaaacagagtcctggtaggtgtacctctatttccctaagtactctctaagtatctgtcttcctatgggctcccacttccagattccacttctgcagggctccacagaagtctccaatctttaaatcttcagtctatgaaagcacagattcctgaaaggatggcctcaaatgaccaggactaggagctctctatatccctgctcctgaaaaacaagctaactggagtctccatcacctgcccccagctagacacactaccaactacccaactgaactccatgactgatttgccagccaatcatgcccctgacccagcccacatggacatgggaaggacatcagtgaatcgggaaaagaggcagaggtgaggagacacctgtactgggccacagatctatgtagttcagcaatctccagccccttagtactccaggggctctaagccacccctttctaagtcaggatggaagcagatgacaccacatttctatctgctgcagacgctcctcccagtgtctcaaaatgttttagcatctttcagtaaaaatcttcaagtttgtcagtccttgatttaaaaaaaagcagcaaactttttagagctcccttgaaccttctattttaatgtgccttcgtagataattcccaacatcttgtgtccttcatttttataatttatctttatcaaacttgtcataaaccccaatattttgatctcttatagaagagtctgtactcctatccaatccagtgttgtttatcttcaaacttggacttcccctgctcattccattcttatctacttccattgggttccccggctaattccattctcattctacccacagactcactcccgtttgtattattaaaacacacgccaataggatataaaaagaagcaagagtactgggctttaacatgagttcaaatctcatttctgccaattcctatgtctaaaaaaaagcatcctaaactctttgagcctcacattctctatctagagaatcatttgaccagaatgttcaacacaggtaaaaatactagaaggtattttaattcattccaagattccttaaaattctgtaattctatgtcctcttgattctgtctatagaaaaacttagaatacatagccagcagagtttgaaaaaataatagaacaaaagaaataccaagaaaagcagagaagaaagttttaaaaaatgaaggcaagattatagaaaagtcacggaaaaagcaacaagactaaaaaatgtattatggaagtaagcagaaatacttgcctaaatggaaaaccaaactgggaagtcaaataatttgtctctaagacttgcctaaacttgcttttgtaaaacttacacccctatggcaaagctaagtaagatctgccctagagcctttgatggtaaaaataagatactggttaccactgaaattgtcaaatttattaggacaaactcttggactaaccacattctaatgataaacttaaatgagagttcaaggtatttaaactctcattaatttagacattaatcaaattaatcaatctgactaatctgattcagacctataccttgatccaagggctgcacagatatctgtcaatctatgctgaggagcaagagacaggatttggaaggcaggcaggctgatggtcaaactgtaggccagctactttgttaactatgggatcatgaggcaattaatcagctctaatccatagttgtttatttaataaacagtaggttataggaacacagatgttgtgatggctttatgagatgatatatgcatagaacatattaggatgtctagcccagaatacaacactcaacagatactcatttcttccatctatattttcttagttaacataattttttaaatctataaaatcctacctgactgcagattcatcagaacttccaacatctattaaagaaaaaggtaaaatgcattttaaatcaataacaaatgtacagaatattaaaagcataagaatgcacagtgatgcatccctctaatccaaactacttgggaggctgaggcaggaggatcacttgaggagcccagaagtttgagaccagcttgggaaacatagtaagactctaccttcataaaaaaattgtgcacacttgtatgtatgctttagatcctgtttgttgttgttgttgtttttgttttggtttggtttggttttttaaagcataagactgatgctttgttacaaagcattcctttgggagcatgcctgggaccttattagaattaacattcgttatacatattggtaggtaattaaygcagtaagaactcttccctttgtatttattagatgcaaagaagaataaatttattaaaatttggtatctacaagtgaactgcagtatgcaagtcatcttagccaaaccctatgaggttgagtaaaaatggtattgttagcagaacaggtgtgatgagtcaacagtgtcaaagagcatgatttctggaccaaaatatgaggcgccattaaaacagagtacacagtagtaccccttatccactatacgtgcagaaagacatacttgacacatttttctctgctgtcacaccacagcaacaatcatcaacaaagaaggcttctgtgaccaaatgtgtggagggtttttccccaccaacaagcaagcaatcattcctgctgatgacacaattcaattctcacaccttatctgctggtaacatcagattcaatttaatttataaattaaactttagcat

SEQ ID NO: 720471 - DNA, 1281 bp, Homo sapiens
gaattcaaaatacacattccacaggtttcaccaactagttatatgtaaatgagatcaatttattttaattctatatatgtaaatcaaatccatgtcatgctaaaagagttggctctaatatacctgtatcaaaggcgttctgttttctttgtcacagacatcaatctggcattttctgttaaccaggagagtgaccacttgcacatggccactggcacaggccaagtgtagagcagttctatgagagtaagaggattttttaagaaactgtagtacaatatctcaaaacatacaatcattcatgtaatgtaaaaactgaatagcatgtttttcctctgccttcaaaacaaataaattttttgaagaaagtacaatacttactagctcttattgctcactgccttaatgaaaacagcagcctatttgagtagaaagagctcagtctttggattcggttcaactagggcttgagtcctactttaagccttgacacttaccaactattgcttagcctttctgtacctcaacttcctcattaataaagatgacaatagtagctatctcataggacaccatcrtgatgcttaaatgagaagctatgtaaagtatgtagaacagttcctacgacaactcaataattgtaagatttttgttttttgagacaaagtctcactcttttgcccaggctggagtgcaatggtgtaactatacctggaactcctgggtcaaatgatcctccatccccagcctcctgagtagctgggactacagatgagcaccagcatgcccagctatttatttaaaaatttttgtagagtaagaatctcactttgttgcccaggctggtctcaaactcctggcatcaagcaatcctctcaccccagcctcccaaagttctgggattacaggtgtgagccactgcacccagccagatattataattattactattactactacttaacaaaaccattttaattaggtagaatgatacaattatacctactttgcaagatgacttaacgagtaggtcacattttaacacctctgacattggaatgccacttataattcatgatttgttataactataattggtagcattttaaaaattatcttattgatatataaaatatcggggcatcacgcaatccatgagaccttacattaagtagaatatggtatactcagcaggtctagggcagttctaggcatgtaactgaaacttaaatacattttagttcttaaaggtactatggggaaagagcactgaaataacaa

SEQ ID NO: 720472 - DNA, 1281 bp, Homo sapiens
gaattcaaaatacacattccacaggtttcaccaactagttatatgtaaatgagatcaatttattttaattctatatatgtaaatcaaatccatgtcatgctaaaagagttggctctaatatacctgtatcaaaggcgttctgttttctttgtcacagacatcaatctggcattttctgttaaccaggagagtgaccacttgcacatggccactggcacaggccaagtgtagagcagttctatgagagtaagaggattttttaagaaactgtagtacaatatctcaaaacatacaatcattcatgtaatgtaaaaactgaatagcatgtttttcctctgccttcaaaacaaataaattttttgaagaaagtacaatacttactagctcttattgctcactgccttaatgaaaacagcagcctatttgagtagaaagagctcagtctttggattcggttcaactagggcttgagtcctactttaagccttgacacttaccaactattgcttagcctttctgtacctcaacttcctcattaataaagatgacaatagtagctatctcataggacaccatcgtgatgcttaaatgagaagctatgtaaagtatgyagaacagttcctacgacaactcaataattgtaagatttttgttttttgagacaaagtctcactcttttgcccaggctggagtgcaatggtgtaactatacctggaactcctgggtcaaatgatcctccatccccagcctcctgagtagctgggactacagatgagcaccagcatgcccagctatttatttaaaaatttttgtagagtaagaatctcactttgttgcccaggctggtctcaaactcctggcatcaagcaatcctctcaccccagcctcccaaagttctgggattacaggtgtgagccactgcacccagccagatattataattattactattactactacttaacaaaaccattttaattaggtagaatgatacaattatacctactttgcaagatgacttaacgagtaggtcacattttaacacctctgacattggaatgccacttataattcatgatttgttataactataattggtagcattttaaaaattatcttattgatatataaaatatcggggcatcacgcaatccatgagaccttacattaagtagaatatggtatactcagcaggtctagggcagttctaggcatgtaactgaaacttaaatacattttagttcttaaaggtactatggggaaagagcactgaaataacaa

SEQ ID NO: 720473 - DNA, 890 bp, Homo sapiens
taaacttttactagaagttttgtactcactgcagcaatcacagataagaaaaaggaaaaaaactttacttaaaatacaaatgctcagaaattacaaattttatattttgtacatatttttgctaaaacaagaccatagtatgtttgtgtatgtataatttaactaattttttctccttgctagctataacaaaatacatctttgcacatcaacgtacttctgtatctaytgccaccttcagtggtcacatattattccatcctatggatgcaactgaaatttatttataggatccattctatgggttctctttaaagtaagtactgtgaaaaataaagtgcatgtatctttatttcctaagggtattttagtataatggaattggtgggtaaagggcatacacattttttaaatgtagtacttaccattttcaaatgagtactttgaaaagtaatcagcaactttaagcagcagtataaaacatcctcacaaatattgtggatagaaaactgtttcattcctcttttagtttaaattcttagaccagaaatgcgaaggattttttcctatgtagataagtaacttgtagatctggaaaaaggtactttgcccacttttagagtgtttgatgatttgatttgaaagaatttcctgtaaaatgaagaggtacttttcatctaatgtgtatatataactgatatatataacatattatatgtgttatatatgtatacatatcagtaatatatatatatcttatgatatataataaacaacataggccaggcgcggtggctcacacctgtaatcccagcgctttgggaggcggaggcgggcagatgacttgaggtcaggagttcgagaccagcctggccaacgtggtgaaacta

SEQ ID NO: 720474 - DNA, 2239 bp, Homo sapiens
ataatcaggcccctgcattctagccctgggttgacagagtgagacccagtttcataaaaagagattgataagaaactcttgatgcaactcattataattttaaaatggaaactaattcttgatattaccttagcagtgtgtccccgagaaagtgtcagagcctttacctggatcttcgcatgaaaaaggaaacagaatagtcaatggacaaggagaaggtgagaaccgtattttatttaaaaagtcttttgatggaggccgggtgcggtggctcacgcctgtaatcccagcactttgggaggccgaggcgggcggatcacgaggtcaggagatccagaccatcctggataacatggtgaaaccccatctctactaaaaatacaaaaaactagccaggtgttgttgtgggcacctgtagtcccagctactcaggaggctgaggcaggagaatggcttgaacccgggaggcggagcttgcagtgagcggagataccaccactgcattccaccttgggtgacagagcgagactccgtctcagaaaaaacaaaacaaaaaaagtcatttgatggaatgtttctttgaaaatatgagctaaagaaagtgtcctatttctttagctaaaatagctaaagaaagtgtcctattaactgtataataagtaaaggagaagtgaaatggtgataagttgtgtctctaaccaagggtcagcagttgattctattgggagtaccactaaaggagctgagttgtgagttccattttaagatactctaagacctgaggcaagtcaggagagagggaagaggaaatgaataaagagaaagaaagaatgaggagagcggattgtacatggaataaataaaaaagcatatgcagaggtaagtaagagaggatagtaaaggcaaattgatctgtagaagaaggaagaacatggtgttagaaacaggaaagaagataaagtgagcttccagtaccaaaatgtgtcagagaattacagtaacattttccttctcttgctgtcatcctcactactggggaggcattaaggattgaggcacctcaccacacagacctgtgttttatctaccatagatgaacatcaccaaagatggtcagccatgtatggctataatttgtttttatagaaaatgttgtaacctcataggatagtatcatataggccaaattaacataattgaatagtgttgggtgatttatggagaagaaattaattcaagaagttattgcctgattaaaagttcattagaaacattatggcttataatgtagtattaaattgagggacataatagggaagaaattgaggctaggccaaaagggcaattaggggaaaccaatatggaagcacatcagtgtagaacagggcattcaaattgtcatgaatgagttgaagagcttctggaaggtgcacattctgattcagcaggtatgggagtctgcatttctcatgagtactcaggtgatttttggtgctggtccttggacacagctctgaatagcaagggaatagccttcctttagagaactctggaaaaagaaccattggagagcaatttaaaaaataacagaatccagggaaagcattaatttccttttatttctgagcatgattctagccacaggggaaggagaatgagatgaaaacagagagattacaggtgtatactactgctgaatacagatgaaaaaagtggtcacaattatccataaaaagcagttaggaagggaagcatcaggatgacagttctaaaaatcactttttcaaaggaagagggattgtgaaaggacacggagggaggaaagaaagacatttgctggggtcttgggagttgaagccaagtaaacttgagacaactcacttccagttgcttcagcatatgcccagtctcacaaaagaggttattgctgtggagagtactggaggcaggagggagtgctagagttggggtaaaccacagcagctcatttcacttgataactgtcaggcctcagagagagaagtttcactgacatgagtgaataagatgtgattaagttgcatataratgctttggctaattttttttgatattacaaaattcattcggtgaataccaaaattctctttttcaataaatactgcactgattttgaaatataaatatgtattcatatccagcaagtctgtggtaattcagtgttttcttttttgataaatattttgatatcggaagctta

SEQ ID NO: 720475 - DNA, 2239 bp, Homo sapiens
ataatcaggcccctgcattctagccctgggttgacagagtgagacccagtttcataaaaagagattgataagaaactcttgatgcaactcattataattttaaaatggaaactaattcttgatattaccttagcagtgtgtccccgagaaagtgtcagagcctttacctggatcttcgcatgaaaaaggaaacagaatagtcaatggacaaggagaaggtgagaaccgtattttatttaaaaagtcttttgatggaggccgggtgcggtggctcacgcctgtaatcccagcactttgggaggccgaggcgggcggatcacgaggtcaggagatccagaccatcctggataacatggtgaaaccccatctctactaaaaatacaaaaaactagccaggtgttgttgtgggcacctgtagtcccagctactcaggaggctgaggcaggagaatggcttgaacccgggaggcggagcttgcagtgagcggagataccaccactgcattccaccttgggtgacagagcgagactccgtctcagaaaaaacaaaacaaaaaaagtcatttgatggaatgtttctttgaaaatatgagctaaagaaagtgtcctatttctttagctaaaatagctaaagaaagtgtcctattaactgtataataagtaaaggagaagtgaaatggtgataagttgtgtctctaaccaagggtcagcagttgattctattgggagtaccactaaaggagctgagttgtgagttccattttaagatactctaagacctgaggcaagtcaggagagagggaagaggaaatgaataaagagaaagaaagaatgaggagagcggattgtacatggaataaataaaaaagcatatgcagaggtaagtaagagaggatagtaaaggcaaattgatctgtagaagaaggaagaacatggtgttagaaacaggaaagaagataaagtgagcttccagtaccaaaatgtgtcagagaattacagtaacattttccttctcttgctgtcatcctcactactggggaggcattaaggattgaggcacctcaccacacagacctgtgttttatctaccatagatgaacatcaccaaagatggtcagccatgtatggctataatttgtttttatagaaaatgttgtaacctcataggatagtatcatataggccaaattaacataattgaatagtgttgggtgatttatggagaagaaattaattcaagaagttattgcctgattaaaagttcattagaaacattatggcttataatgtagtattaaattgagggacataatagggaagaaattgaggctaggccaaaagggcaattaggggaaaccaatatggaagcacatcagtgtagaacagggcattcaaattgtcatgaatgagttgaagagcttctggaaggtgcacattctgattcagcaggtatgggagtctgcatttctcatgagtactcaggtgatttttggtgctggtccttggacacagctctgaatagcaagggaatagccttcctttagagaactctggaaaaagaaccattggagagcaatttaaaaaataacagaatccagggaaagcattaatttccttttatttctgagcatgattctagccacaggggaaggagaatgagatgaaaacagagagattacaggtgtatactactgctgaatacagatgaaaaaagtggtcacaattatccataaaaagcagttaggaagggaagcatcaggatgacagttctaaaaatcactttttcaaaggaagagggattgtgaaaggacacggagggaggaaagaaagacatttgctggggtcttgggagttgaagccaagtaaacttgagacaactcacttccagttgcttcagcatatgcccagtctcacaaaagaggttattgctgtggagagtactggaggcaggagggagtgctagagttggggtaaaccacagcagctcatttcacttgataactgtcaggcctcagagagagaagtttcactgacatgagtgaataagatgtgattaagttgcatatagatgctttggctaattttttttgatattacaaaattcattckgtgaataccaaaattctctttttcaataaatactgcactgattttgaaatataaatatgtattcatatccagcaagtctgtggtaattcagtgttttcttttttgataaatattttgatatcggaagctta

SEQ ID NO: 720476 - DNA, 620 bp, Homo sapiens
ttctatttgttcaaaattgaatggaaggcattgacataaatgttattgttggtatccatatttgaataaaaataaatttagaagcataaaaaagattttaaaaatgtaagctttaactcagatgtttctcttttaatgtttttgaatagcatgaagttttcagtataaaatttttatacctgtcagggattcaaagmagtgaattttgagactctgagatatttccaatgagttaagtgctacttggagttctgaactttacctagaggaaagctttacttattaacatgtcagattctgttttaactttagaggcttgctgctagtgttattacactgatgatctgaagccaatcagatgttctaatgagcaagactgtgtgtgtaggtgtatatatagctgtgtgtatgtgtgtgtttgtggtatctttgactattaaaaatgaggaaagtaatgattcatttataactggtagacacagtcttttaaaatggtgattttgagactttttggtgttaaggtttttaaaacatgattgcatagaggctaccgacatcataagttggttgtttttcatttcaatgcccttttgaaatctttaactatattgtgatgctca

SEQ ID NO: 720477 - DNA, 620 bp, Homo sapiens
ttctatttgttcaaaattgaatggaaggcattgacataaatgttattgttggtatccatatttgaataaaaataaatttagaagcataaaaaagattttaaaaatgtaagctttaactcagatgtttctcttttaatgtttttgaatagcatgaagttttcagtataaaatttttatacctgtcagggattcaaagaagtgaattttgagactctragatatttccaatgagttaagtgctacttggagttctgaactttacctagaggaaagctttacttattaacatgtcagattctgttttaactttagaggcttgctgctagtgttattacactgatgatctgaagccaatcagatgttctaatgagcaagactgtgtgtgtaggtgtatatatagctgtgtgtatgtgtgtgtttgtggtatctttgactattaaaaatgaggaaagtaatgattcatttataactggtagacacagtcttttaaaatggtgattttgagactttttggtgttaaggtttttaaaacatgattgcatagaggctaccgacatcataagttggttgtttttcatttcaatgcccttttgaaatctttaactatattgtgatgctca

SEQ ID NO: 720478 - DNA, 620 bp, Homo sapiens
ttctatttgttcaaaattgaatggaaggcattgacataaatgttattgttggtatccatatttgaataaaaataaatttagaagcataaaaaagattttaaaaatgtaagctttaactcagatgtttctcttttaatgtttttgaatagcatgaagttttcagtataaaatttttatacctgtcagggattcaaagaagtgaattttgagactctgagatatttccratgagttaagtgctacttggagttctgaactttacctagaggaaagctttacttattaacatgtcagattctgttttaactttagaggcttgctgctagtgttattacactgatgatctgaagccaatcagatgttctaatgagcaagactgtgtgtgtaggtgtatatatagctgtgtgtatgtgtgtgtttgtggtatctttgactattaaaaatgaggaaagtaatgattcatttataactggtagacacagtcttttaaaatggtgattttgagactttttggtgttaaggtttttaaaacatgattgcatagaggctaccgacatcataagttggttgtttttcatttcaatgcccttttgaaatctttaactatattgtgatgctca

SEQ ID NO: 720479 - DNA, 620 bp, Homo sapiens
ttctatttgttcaaaattgaatggaaggcattgacataaatgttattgttggtatccatatttgaataaaaataaatttagaagcataaaaaagattttaaaaatgtaagctttaactcagatgtttctcttttaatgtttttgaatagcatgaagttttcagtataaaatttttatacctgtcagggattcaaagaagtgaattttgagactctgagatatttccaatgagttaagtgctacttggagttctgaactttacctagaggaaagctttacttattaacatgtcagattctgttttaactttagaggcttgctgctagtgttattacactgatgatctgaagccaatcagatgttctaatgagcaagactgtgtgtgtaggtgtatatatagctgtgtgtatgtgtgtgtttgtggyatctttgactattaaaaatgaggaaagtaatgattcatttataactggtagacacagtcttttaaaatggtgattttgagactttttggtgttaaggtttttaaaacatgattgcatagaggctaccgacatcataagttggttgtttttcatttcaatgcccttttgaaatctttaactatattgtgatgctca

SEQ ID NO: 720480 - DNA, 580 bp, Homo sapiens
gtttcactctctttatagtgcttcaggatacaactttttcagggccttattagagaaaaactgattcacatgttattcttctaaagctaaattattaaaatgtaggttgaaagattggattgattgtgaatctacactaaagatatggttccaggcagacctccttagagacctccaggcagacctccttactgtcttcagtgatgtttaatttcattactgttactgggtgccaagtgtctttcatttggaagtgaacttactccagttattgaatgtttatcatatcataatttgcatttttccaacattgaaggtattttaaaaagtcactaagagattcattcttttattattcaactacaaaaaaatagtgtaatgatcagaatttaaaatgtgtgattctttttcttctgtaagtatgtattgctatgataaataaaaaatggcaggaccattgtttttattaaaatatctactgtgtctattcttaaacattaatcttgrttactattttactcaaatttaataatgctttttaaattttcatcattgagcaacatctatcacaaaggtgtac

SEQ ID NO: 720481 - DNA, 891 bp, Homo sapiens
ctgttttttttttcttgtcttagttcaggctactataccagaatatcatagactggatggcttaaacagcaaacatttatttcttgcagttctggaggctaggaagtctaagatcaaagtgctggaagatatgatgtctggtgagggcctgcttcctggttcatagatggtcatcttctcactgtgtccttacatggcataaagagggctagagaattctctgaagtctcttttataagggcactaatcccattcctgaaggcttcaccctcatgacctaatcacctccaaaggtctcacttcttaataccatcatattggggtttaggatttcaccatatgaatttgcaaggcacacagacattcagtccatacatttctagtccctttctcctgaggtcagtatgtattaaaggagcagaatcttactcctttccccttggaaggtatgcttcagtggaaaggcgaagatcgcagtattttagacatctccagatattgtgtccataagagggaaggctgtcggcatgggcaatttaaattaatttgtcttttctttttatggacttgctatgtctacaaaaagcaaacttatcaagttaaattaaatatatgccttcatttaacaaatatgtattgagggcctatcttagacactattccaggcgctcagatacagtaatgaataagacaaagtctctgccttcccagagtttgtgttccagcggggatagggagacaataacaaataggtagatacacagtaagccaggtggtaartgcaacaagagaaaaatacagcaagttaaggaggatatggagtgtcattatatttgtgggaaggggtgtaacatattgatttctgtttcagatatccattgccacacaaca

SEQ ID NO: 720482 - DNA, 696 bp, Homo sapiens
ggaaccgaaggctttattagctgtgtgaccttgggcaagttacatacattcttggggttgaaaggaaccaatgctttaatacataacacctcactgaggtgtaatccatcttctatgtcattttcttctgaaaataacttctactagttcttcagcacttcctatgggccagggcctaggcaaagtatgtgctatacattatcactagtcctgaaagtaacccagcaagtggttagtaccagtcgcattttacagatgtagaaagtgaaactcgattgagtgacataattcatccaagtaagtggcagagccaggattcatacccaattacctttagtcccaaagttgaagctgtgtgattttcctaagagatccaattcttaccctataattgaagcatcatttttaatgagctaaattctgtcttcctctaactctggctcatcacccctctgggtatggtgagcaaagtttrcttcctcttccacatgccactccttcagatatttgaagactacaaactacttcgaccaccctgaaattgttcgacttttcttcctacaaatgtttaaagtcccttaactgtcctggtgattccccttcactttgtctctgtcccatttaaaaaaaaaagaaaagaaaaaaacctgaagcttaagatacatacagaaaactgcacgaattataaatatactg

SEQ ID NO: 720483 - DNA, 696 bp, Homo sapiens
ggaaccgaaggctttattagctgtgtgaccttgggcaagttacatacattcttggggttgaaaggaaccaatgctttaatacataacacctcactgaggtgtaatccatcttctatgtcattttcttctgaaaataacttctactagttcttcagcacttcctatgggccagggcctaggcaaagtatgtgctatacattatcactagtcctgaaagtaacccagcaagtggttagtaccagtcgcattttacagatgtagaaagtgaaactcgattgagtgacataattcatccaagtaagtggcagagccaggattcatacccaattacctttagtcccaaagttgaagctgtgtgattttcctaagagatccaattcttaccctataattgaagcatcatttttaatgagctaaattctgtcttcctctaactctggctcatcacccctctgggtatggtgagcaaagtttgcttcctcttccacatgccactccttcagatatttgaagactacaarctacttcgaccaccctgaaattgttcgacttttcttcctacaaatgtttaaagtcccttaactgtcctggtgattccccttcactttgtctctgtcccatttaaaaaaaaaagaaaagaaaaaaacctgaagcttaagatacatacagaaaactgcacgaattataaatatactg

SEQ ID NO: 720484 - DNA, 746 bp, Homo sapiens
gcccaccttggcctcccaaattgctgggattacaggcatgagccaaggcgcccggccagtgtgtatttttatcaccctctttaatctaaactggaattgggattttcttttttcaatagaacgtggtggaaatgacattaagtgagtttcagatcttaatatctgagaggccctgcttcctttctcactctttggaagtcttgagataaccatgaagcaaagacgttctgccaagsctactggtggatgagaagtcacatggaggaaaacagagacaccccagcagagagcaaacaccacggcttctgacatgaaagtggggacatcttgaaccttctaccactgcccatgtaccagctgagtgaaacaatctgcataaatgagctccagtgggacaagcagaagcaatgagtaaattgataacattttgagaactaacattgctgttttaaaccagtaagtctgggatagttttctatgcagtgatagataattagaatatatttgaacgtgataaattgagaataagtattgtaatctaaaggcagccattaaaggatactaagaatatgtaactaccaaccagggtagacaatctcagtgcagcaaacaaacatgtagcacacccaagagttttttagaatgaatatttatataaacttaatttaaggttcctggtattattggcttgttataacaaaagatcttttcagcatataattgtgtttcatttactactgtgtgga

SEQ ID NO: 720485 - DNA, 646 bp, Homo sapiens
agtctgcattttagtaagatccccagttgactcttctctgctttaaagtttaagaagcaaatctcttagcatctactcttacccttttataattcattctctgaacagctgcctgagtaattttaattttatttgttagcccactgattagttccactctctagaaggaaagttccataagggcaggaaacgggaatggaattaggtattcaattaatattcattgaatgaatatccttcagtccaggataaagtccagatgagatatgcaaggtttctcatattttttctttaccacttcaaaagtctcaccctcttttcccttgctcttatttataaggaagctacattttgcatgccaagcccaaattcttgtccacrttctttataccctttcctttagaacattttctataaatttgtcttttttctgattacacatgtagcacccctctctacctgcccctgcctttggcttgtgattttccatgttaataagcagcaaaagcgcactgaagtcactaccttcttgcttttcatattttatctctcttttctttgagttccggactccttaagtgtattttcctattgttttcatatccttatttactcattcatttctcaagatcttgtttgtgtctcc

SEQ ID NO: 720486 - DNA, 646 bp, Homo sapiens
agtctgcattttagtaagatccccagttgactcttctctgctttaaagtttaagaagcaaatctcttagcatctactcttacccttttataattcattctctgaacagctgcctgagtaattttaattttatttgttagcccactgattagttccactctctagaaggaaagttccataagggcaggaaacgggaatggaattaggtattcaattaatattcattgaatgaatatccttcagtccaggataaagtccagatgagatatgcaaggtttctcatattttttctttaccacttcaaaagtctcaccctcttttcccttgctcttatttataaggaagctacattttgcatgccaagcccaaattcttgtccacgttctttataccctttcctttagaacattttctataaatttgtcttttttctgattacacatgtagcacccctctctacctgcccctgcctttggcttgtgattttccatgttaataagcagcaaaagcscactgaagtcactaccttcttgcttttcatattttatctctcttttctttgagttccggactccttaagtgtattttcctattgttttcatatccttatttactcattcatttctcaagatcttgtttgtgtctcc

SEQ ID NO: 720487 - DNA, 684 bp, Homo sapiens
tgctttcattttgacagcctgacatcctgaggaaataggcttgttgatgccatgaaagatgaatayaaaaatactacccactggaagaatcttaaagaacaagtattggatctgtggtgtttttttgttttttgttttttcaagagagaaagatagggggccgagagaggatacagtgattaatgattattaaaacatacacacatatacgcacatatatgtagctctatagtcttcatatgtaatacaattgtttatattctgttttgcaattttataattgtttgttatataatgaatgtctttaaaattcattatataagcatttcctaagtgtccatttcctccaaggccctattgagacagcacgcataagtgtaaaggccccagtttctccttaaaaagcctatgggctgctaggggagaatggacctatccagatacaatcataacatgaagcataacaagtctataagaaatgtgtgaagcaacatgaagcaagttggaagagaaatatagcgtctccctgagaaggtactggaagttgaccaagaagctaatcaaaattttgtcttgattctggaaagctcaaagcactgaagcttactggttagacattaagaacatccgcctctccccacttcctatttcattagagtattagcattttctacacttttttta

SEQ ID NO: 720488 - DNA, 1119 bp, Homo sapiens
atttactttaaatgtttccttctgtgacaacaattattagtagataatgaggttctcttgtacatattttctgccaaaaatctaattttgaataaatctatttccataagggctgtttaaaagtcacacaaaactgtctaagatagtgaaatgagtctcactgaaatacgtttgttgagaggactactaatgaacagtagctaggagaaactgtatttttaaaattgttttctaaaacagcctagttacctttatataaatatttttttcagatctgatgtattcacatttgcatacacacgcatatactcttttagtatatttctgctgcactaactaaaacacagtgagaaattactgactatgtttaaaatcttcatctctgtggttacatataatataccataaccatcaggctttgttcaacagcctctaaagtttttagcatttttatggggaggccattagaattgggagtttatttcggtctgcagaagtattctgttttgggatttgccaacactaacactttgtctttcctgtccgcttattcaacatgcttggcaaactataattatcagtattttcctttatggcaggataattatttgttattcttgcttaagcaataaaagaacttaacagcattctctgcacaaacaaaaagcatgtgcgcagggtttgggcctgcctatgtgtacaatttgaaaagacctccataaaacagactgttactgtagggttactcggttaaaataccaaaaactgttttacagaaatcctttttaaaggcttcgaagagaaagcaaggtggttacatttaagaggatatcccttttcttagttctaattacatttgaactgctgatggtcataytagagaacaaatgtatcaccaaaatgaatattggtgagtttctttagaccaggagcaaaaacctttttgctacaattcatgattatgcagatagggcactgtacaccctgtgttaaggtcactttagggaactaaagagccaaactaccaaattagctcatctggattagtgcagattaagacaaggatttatgtggcattcttgtttcaagggtactgggtacggacttaatgaacacctc

SEQ ID NO: 720489 - DNA, 648 bp, Homo sapiens
tcagataaacctcaagagaaacagctgaactcttaacattgcccctgccagcttttctcctgagagaagaatggcctcaggtggtgtaatttaggttgtatataatttccaggcctttctggtgactttggataatatacagttccatctatcatcttgctgcttttcacctgtcgatgtgtgtgggctttttttgttttgtttgtttttattttgggtaagagtgaaatgggtagaaagaagcaaaggggcagagtaaaggaaactgtgcagtcccttcaatgctccttttataggtcttagcttttgtttaatgataggctttgtctttatcaaactttaccattcagtttcaaaacaacatcaagaaagaactgagcacctaccttgtttgttaagaagggagtagagtaatgtaatttggaagatcatagtaattactactaattatataactttttctctgtaaattatcttcattaaccccctcaatatcctaataagttttttattatcattcctgttttatacacctgaggygtggtaaatttccaatatttcacagttgatgaggatctgaacccaagggtatccaatttcaaagtacggacttattattccactacattataactcaatatttgttaa

SEQ ID NO: 720490 - DNA, 264 bp, Homo sapiens
cccaggaattatagtctacattagttgttcattgtcygatttgattgctaaatcaagtcaacaagattaagcagaaataagtgaagacatcataagagtaggaattatgtatcagagagggctcaaatatgatgcctataatgtttgtttagtaattttttttcctgaaaattgtataatgctctcttactctgtcaccaggctagagtgcagtggtacgaacatagatcatatctcactgtagcctggaactcctgtgctcaa

SEQ ID NO: 720491 - DNA, 2291 bp, Homo sapiens
ttgttttgttttttgagatggagtttcgctcttgttgcccagggtggagtgcgatggagcagtctcagctcaccgcaacctccacctcctgggctcaagcaattctcctgcctcagcctcccaagtagctggaattacaggcaaccaccaccacgcccagctaatttctatatttttagtagagacagcgtttcaccatgtgggccaggctagtctcaaactcctgacctcaaatgattcgcccacctcggcctgccaaagtgctgggattacaggcgtgagccacggcgcccagcccgatctgacggttttataaggggtttcccctttcacttggctctcattctctcttgcctgtcaccacctaagagatgtctttcgccttccaccatgattgtgaggtctcctagccacgtggaactgtgagtccattaaacctctttttctttataaattacccagtctcgagtatgtctttatcagcagcacgaaaatggactaatatagcagtctacctcctaatgataggttcctaatgacaatttatactctcatcacatgaggcagctctaattaagaaggatgataacagcaatgtttcatatcacacttactactgacacctgtaagttgtcttcacccttcactgtaattaccaccagcaaaaattttataatcaatatacacatcaagaagctatgcacaaagtacatgaatttacattacccaacatgaaccacttgtagaacatattaaaggaccgctatacatttgtagaggaaaaaaacatacttatgaacagttctgatgtgtgtgtgtgtgtgtgtrtatatatttgtttgaaatgacatcatagataatcctctttactgcctgagattttggagcaaaactattaatactaatttatattctatttaattttactttaggaaacatttattccagagaattttaaaatctgtgtaacgtattttataattttgttctactacaagaagtaattatgattaatccagttttgtttacagttttaattatatgtttacaataaccctaattttgatagacaatactaagaagtatgtgttgatataaactataaaaattaactcaaatgcccagacaggtatcagtggtttttatccaatatagataaaagtactatacagtaattacatgaaataatttaatgggtataagaggaaaaaattacaaaaactgaaaacttttttaggccaaatgtattaatagataaaagttgtatacaaaatgctatttataccataattgctattattatgtaacatcatattattatgtaatagcagtgctattaaatacttcttacctgcccctttcaactgctaaggcatccagttcatcaaagaaaataatggaaggcgccactgctcttgcttttcggaaggtctggtggaaagagtgccacattagctaaagatgagcaaacactagaaaattctgtagttggtttgttttaaaactatatttagaaccaaacctattaggtacaagtcaacaagcccagtcactttgtatagaccttgtaatagatgttcagaactttataatggatgtaaaagtatccccttcaatagtgcttaaagagacaagactatcaatacatattcacataggtgtgaaggaggcaattcagttaagcaatcagaaaatttcagttaaaatcccagctgcactactagtaactgtgtgactttcagcagttaacttcacttctgtaagcctcgatttctacatctataaaatggagataataaacacctacctcagaaagttattttaataattgaattttaaaaagaacacaaagcatttggcacaatgcctgaaacagtaagagctcaataaatgataggtattattaactattagtaacagcattaactattttaacagaaatgctggctattattatcagaaaaaatgatagttttaaaagggctggtaatatgatgtttaaaaacaaaactgaagtattgcagatgatcaaaactgcatttttaaataataaaataatatttacctgaagaaaaaaaaataccactaagatctgacttcggaaatgccaaagtctgttacctaaaacaaaagggaagctgcacaggacagaagtgtgattctcctgtgctgagtgccactaaaggcacaatttcttacctctctaactgctctttcagattcaccaacatatttattcattaattcaggcccctgcatgaaaagaaaacaactgttcagtgtctttataa

SEQ ID NO: 720492 - DNA, 696 bp, Homo sapiens
ggggcccagtcttagctccagcccctcctgctgcagtctgggagctatcccatctatgtacggacctgctgggagacacatgcccatctgagccaatgtgacaagaacaccaacctccatcccacagcagattccaagggagcccagtctcagtaccagacccccctgttacagtcaagcacttttgcaatgaccagctgagtgatgcatgctgatatgagcaaataagtcggggccagtctccttcacacagcagatcccaacgcagcccagtctcaactccaggccctctcactgcagttagcagcccrtcctgcctgtgcagaaatatgctgaaaggcacactcatctgggtgattgggacagtcttctggactcagatccctggccagcatttccacgcagccggagtatctgccttgggtctaccccaggtccatctgggccagaaagccatatcaaccaaagagatcctgtgagatttgtggcaagcctgggctcagagagtctctgtgatggtaaatattaattgtcaacttgattggactgaaggatgcaaaatattgtttctggttgggtctatgaggatgttgccggaggagattaacacttgggtcagtggactgggcgacaaagccccaccctcagtttgggtgggtaccatccaatctgctgccagtgtggctagaaaaagca

SEQ ID NO: 720493 - DNA, 517 bp, Homo sapiens
catgtgccagcaatgtctggcaatcagctatccaaaaacaaggaagtctgggagataaacccttgtttacaaaatgacaatctttgcctagaaatgatgcccaagagacagttgtgcgtcaaccaaccacaagcggttttgttcttgttttgttttttaggttttcccttttccacacattctctaataaatctgaacaaactaactttgacatttcctaatgtttcaaaaaaggaagtaagctaaagtcataaaacaccttgctcaacaataattttcttgggtttttaatcttgcttggaacagataggcrtgattcacatccaagtcaacatggccttttgtaagctgactcacagagaggggatgctggggaccctaccctcatcctggtggctcttctctatttgagccccagcaaaggccaccagcagtgggcaccagccaccttatcagatgggccaaagacttgttgtcatcactgatttacatttctataatttttttaaagttacat

SEQ ID NO: 720494 - DNA, 915 bp, Homo sapiens
ttaccgtttaacattagccgtggatcttcccacatcacatgactatgcctcattctttttggataatatgattactattgaatggatttactatcattcacttaatcaatactccttttgatggccattttaattgtctattttttccttttgcacagattggtgtaataaacgtgattttatagtaatatttttgtctgcctgtgaaaatgtttgctggacaataaattcctaggagtcaaataaggtcaaagattataaatacagtatttattttcataaatattaccaagtcagccacaaatgtttaaattactaatggtttcagattattgtatttaatgagtaaacacttttatagggtttacttttatgaacacttttatttgccagataycattctaagtcctttacaaaattaacttttttaatttgtaatataaccctgagatgtatattaggattatccccattctacagataagaacactgagaagttaattaacttgccacatatctaggaagtgacaaggctagttgcacagccaggcagtctggctcctgagtccacattttagacaacactatacctcctggttcttttgaggcattactgctggaactatcctaatactcataaataaacatttcttttggggagggccaaataaaattttaaacagaaaagttttcaccaactgtcaagctcataaagttgtacgttatacacttttttcatgatgcccacagataatttattaatgatatcatctattttaaaagacgtatgtaaaacccaacccttaagaaaggattcctatcactgttcccacaggcaccctcctcagtcttatacctttccattccaccccccaaaacaaatcattcagcatatttatttcatactgtaatata

SEQ ID NO: 720495 - DNA, 915 bp, Homo sapiens
ttaccgtttaacattagccgtggatcttcccacatcacatgactatgcctcattctttttggataatatgattactattgaatggatttactatcattcacttaatcaatactccttttgatggccattttaattgtctattttttccttttgcacagattggtgtaataaacgtgattttatagtaatatttttgtctgcctgtgaaaatgtttgctggacaataaattcctaggagtcaaataaggtcaaagattataaatacagtatttattttcataaatattaccaagtcagccacaaatgtttaaattactaatggtttcagattattgtatttaatgagtaaacacttttatagggtttacttttatgaacacttttatttgccagatatcattctaagtcctttacaaaattaacttttttaatttgtaatataaccctgagatgtatattaggattatccccattctacagataagaacactgagaagttaattaacttgccacatatctaggaagtgacaaggctagttgcacagccaggcagtctggctcctgagtccacattttagacaacactatacctcctggttcttttgaggcattactgctggaactatcctaatactcataaataaacatttcttttggggagggccaaataaaattttaaacagaaaagttttcaccaactgtcaagctcataaagttgtacgttatacacttttttcatgatgcccacagataatttaytaatgatatcatctattttaaaagacgtatgtaaaacccaacccttaagaaaggattcctatcactgttcccacaggcaccctcctcagtcttatacctttccattccaccccccaaaacaaatcattcagcatatttatttcatactgtaatata

SEQ ID NO: 720496 - DNA, 1125 bp, Homo sapiens
ttttttttttttaagacggagtcttgctctgttgcccaggctggagtgcagtggtatgatctcggcccactgcaacctccgcctcccaggttcaagtgattctcccacctcagcctcccgagtagctgggactacaggcgcccgccaccacacccaactaatttttggtatttttactagagacggggcttcaccatgtwggccaggctggtcttgaactcctgacctggtgatccacctgcctcagcctcccaaagtgctgggattaaggcatgagccatcacactcagcctcactgaatgttttaataagaacagtgtgtctccttctggctgtagggaaggattaggatttgggattaggttggcacgggtggcttcccttcagagtctccctcccttctgcagtttgttacttccctggagccctgagcccattactcattctgtgggtctcttgtgtgggactcttaggagggtcccccacttaggagaagcatttctttcttttttttttagggatggatctcactccttcacccaggatggagtagcgtggtgtgatctcagctcacggcaacctccgcctcccaggttcaagtgattctcctgcctcagcttctcaagtagctgggactacaggcctgtgccaccacatccagctaatttttgaattttttagtacagatggggtttctctatatgtgggccaggctggtcccgaactcctgtcctcaggtgatccgcctgcttcggcttcccaaagtgctggcattataggcgtgagccaccacgcctggccaggagaagcattcctgtactttggaagcaaacactgaatcaactctttccatccctttcttctgtcctccaatgtccctttgaaggtctggagatacttcagagtccatctgtacctttctttaaccccaacatggtaactatttctcttttgaaagcagcttaaagggttttaacttggggacacacactgctgtcaccactggatatgcactggaaaagcagggtaagggaaaggactgtttccaaatacacctaactaattaccccgaaaattgcttgaaagtccaggcctgttctttgtaatcacatatgatgagtgtag

SEQ ID NO: 720497 - DNA, 1125 bp, Homo sapiens
ttttttttttttaagacggagtcttgctctgttgcccaggctggagtgcagtggtatgatctcggcccactgcaacctccgcctcccaggttcaagtgattctcccacctcagcctcccgagtagctgggactacaggcgcccgccaccacacccaactaatttttggtatttttactagagacggggcttcaccatgttggccaggctggtcttgaactcctgacctggtgatccacctgcctcagcctcccaaagtgctgggattaaggcatgagccatcacactcagcctcactgaatgttttaataagaacagtgtgtctccttctggctgtagggaaggattaggatttgggattaggttggcacgggtggcttcccttcagagtctccctcccttctgcagtttgttacttccctggagccctgagcccattactcattctgtgggtctcttgtgtgggactcttaggagggtcccccacttaggagaagcatttctttcttttttttttagggatggatctcactccttcacccaggatggagtagcgtggtgtgatctcagctcacggcaacctccgcctcccaggttcaagtgattctcctgcctcagcttctcaagtagctgggactacaggcctgtgccaccacatccagctaatttttgaattttttagtacagatggggtttctctatatgtgggccaggctggtcccgaactcctgtcctcaggtgatccgcctgcttcggcttcccaaagtgctggcattataggcgtgagccaccacgcctggccaggagaagcattcctgtactttggaagcaaacactgaatcaactctttccatccctttcttctgtcctccaatgtccctttgaaggtctggagatacttcagagtccatctgtacctttctttaaccccaacatggtaactatttctcttttgaaagcagcttaaagggttttaacttggggacacacactgctgtcaccactggatatgcactggaaaagcagggtaagggaaaggactgtttccaaatacacctaactaattrccccgaaaattgcttgaaagtccaggcctgttctttgtaatcacatatgatgagtgtag

SEQ ID NO: 720498 - DNA, 1108 bp, Homo sapiens
tgagccaccgcgcccggcctgaccctctacattttcaagtgagaaaccacatttatggaaaatcaacatttattaccaattatttatttaaacagaacctctatcttacttttaaaatcagcaaccttgtcaataaaaatgcaaatagcacaatctaggaatttcccaattgttttttttctactgaaaacatcagttagtattatttatttctgggtaagtgccatatcactttaaaatatgtaaaatatatttcctccaattcagttattgtaagatctgtgagaaatctttagaagccatgcccatcacttagggtaaaaaccctggttctcaccatttgtgtaccacacacatacacacacacacacacacacacacacacasacagaaagagagagagagagagagagagagaaaagccactgatatggcagaactgaaggaacaaaaatatggtattaaaatttaaaaacacagaacctatcatgtattacttagcaaagaaacaagtagatacagccttgccttccacagtaatctttctcaagaagatccttctaaaacacaaatctgattatgtttctcccagcttggcttcaaatcctcaaatggttcacaatatcgatcaccttcaagataaaaggcaattttcctagaaaggtatacaaggctttccatgatcttgttcctgcctacttctccagcttgtcttttccttctcccacatgtgcgctacgttctagctagactgaactcattgaagatcttgaaagatacccaagaacctacattttctaacagtaaaagtgaaatcagtacaattttgtataatctttgtttatggacccatccttcagttgtcaggtttagtgttacttcctcagggaatactgccccaatccccactctattacacattctcacagcaccctggacttctccttcactgcatttatcacaactatagtttttacaattttttgtgattattgtattattctcttcatatgcctaaaaaggcaggagtgtgtctagttctatgttctaatatgtccccaaggcagtattacattgtatatgtctggcatataatagatgctcaaca

SEQ ID NO: 720499 - DNA, 1108 bp, Homo sapiens
tgagccaccgcgcccggcctgaccctctacattttcaagtgagaaaccacatttatggaaaatcaacatttattaccaattatttatttaaacagaacctctatcttacttttaaaatcagcaaccttgtcaataaaaatgcaaatagcacaatctaggaatttcccaattgttttttttctactgaaaacatcagttagtattatttatttctgggtaagtgccatatcactttaaaatatgtaaaatatatttcctccaattcagttattgtaagatctgtgagaaatctttagaagccatgcccatcacttagggtaaaaaccctggttctcaccatttgtgtaccacacacatacacacacacacacacacacacacacacacamagaaagagagagagagagagagagagagaaaagccactgatatggcagaactgaaggaacaaaaatatggtattaaaatttaaaaacacagaacctatcatgtattacttagcaaagaaacaagtagatacagccttgccttccacagtaatctttctcaagaagatccttctaaaacacaaatctgattatgtttctcccagcttggcttcaaatcctcaaatggttcacaatatcgatcaccttcaagataaaaggcaattttcctagaaaggtatacaaggctttccatgatcttgttcctgcctacttctccagcttgtcttttccttctcccacatgtgcgctacgttctagctagactgaactcattgaagatcttgaaagatacccaagaacctacattttctaacagtaaaagtgaaatcagtacaattttgtataatctttgtttatggacccatccttcagttgtcaggtttagtgttacttcctcagggaatactgccccaatccccactctattacacattctcacagcaccctggacttctccttcactgcatttatcacaactatagtttttacaattttttgtgattattgtattattctcttcatatgcctaaaaaggcaggagtgtgtctagttctatgttctaatatgtccccaaggcagtattacattgtatatgtctggcatataatagatgctcaaca

SEQ ID NO: 720500 - DNA, 1549 bp, Homo sapiens
gcaagccatctcctcctaacacatatctccctgggcaggggcctgccccagggccccttcctattgttgaccaggagttgacccactgaaggagagcttatctgtwcttcctctttatccctatcacctgtttgacatctgctcttttcactgcagaaattgagcagtgttggaggctagagactttggagggcctaaagacagacccaagggggcttgagggaagcggaaaatgaaaggctttcggagacatttttacctataattagaaagaaaatggaattaatggttataatcaggatttttatttttctttatttttttccttattttattattattattattttttgagatggagtcttgctctgtcccccaggctggagtgcagtggcgcgatcttggctcactgcaagctctgcctcccaggttcacgccattctcctgtctcagcctcccgagtagctaggactgcaggtgcccaccaccacgcctggctgattttttgtatttttagtagagaagaggttttgctatactagccaggatggtcttgatctcctgatcttgtgatctgcctgcctcggcctccgaaagtgctgggattacaggcgtaagccaccgcgcctggccgatttttcttaatttgtgccttgagaccttgagttctactaacattaaatagcttaagttaaaacagtacctattttctgtaagtaacaggacataggatactgtagtggttccaccatagaggttctggaatcagacttcttgcgctcaagatcttggctgtcactttttagctatctagctttgggcaaattacttagcctctgatgccccagcttctccatctgttaagtggggataataatactactactacttcgtagggatactgttcctttgccctaagtaagtacaaaataggttaggtgttaaattactatatcggatcagccctatttaaacatgtagccaataaaagtgttaaaattaatgtttttgatatttcttgattctcttgaagctcatagaggccaggttagacataacctataaggtaatagcagtattgtccatttgatattcaagtggaggcttactgaaggccagttagctgaactctgtctagctcacaagccagtagagaggcaatatctaacttgttccattttccttattagaaagagatggtactattcagagtaataagttattctgcctgtagcttagtgtagacattaaatcagaagtgtgttgagactagtagggaactgctgaattgcatttaaataatttccagttgaatccttgtttttccaggtacagaataacttttgatgtcagttacattttacttggaataaggtgctctgattctaccatctcaaaggctggtaaatcacaagtgttcagttgctgtcacttgggaaacccattgttgctaaatatataagtatgttgaaattgctgtgagaatataacccagtaaagaacaaccttcagacttcagatctaaatctaatgtcagaagattcaaaac

SEQ ID NO: 720501 - DNA, 1375 bp, Homo sapiens
  misc_feature 873, 874, 875, 876, 877, 878, 879, 880, 881, 882, 883, 884,885, 886, 887, 888, 889, 890, 891, 892, 893, 894, 895, 896,897, 898, 899, 900, 901, 902, 903, 904, 905, 906, 907, 908,909, 910, 911, 912, 913, 914, 915, 916, 917, 918, 919: n = A,T,C or G
  misc_feature 920, 921, 922, 923, 924, 925, 926, 927, 928, 929, 930, 931,932, 933, 934, 935, 936, 937, 938, 939, 940, 941, 942, 943,944, 945, 946, 947, 948, 949, 950, 951, 952, 953, 954, 955,956, 957, 958, 959, 960, 961, 962, 963, 964, 965, 966: n = A,T,C or G
  misc_feature 967, 968, 969, 970, 971, 972: n = A,T,C or G
cactaatgatggacaactttttggtgtcatcaatgagttggctactaccttgatgtaaaaatttgtaaggaaaattttcaccatttcgagtgtcaagtgtatttttaactgtctggtttgtacttttatgacttttgtactaccaaagcggagttaaaaataaaaatgttaaacgcagtgtgttgtcttgtgggtgatccaattattggcgccttgtacactggaaatacagtcgtggcagtataattattgagcttaattttttacagtgctgaatttcttgtgtcttgaaatatcaagtgatcacttggctgactttcctcatgagatttcccctcctgcagtaccccttcccctaacacaggcatactttggagatactgtgkgttcagccccggcctactgcagtaaagcaaatattgcaatcaagccagccacatgagctttttggtttcccactgcatataaaaaagttatatttatactatactatagtctattaagtatatgcaataatattctgtcaaaaaacatacataccttaatttaaaatactttttattgctaaaaaaaaatacgataatctgagccttcagcaagtcataatctttttgctgctgcaggatcttgcctcaatgttgaaggctactgaccagggtggtggttactgaaggttggggtggctgtggcaatttcttaaaataacacagtgataaagtttgctgcactgattgacctcacctttcatgaaagttttctctatagcatgcagtactgtttgatagcattttatcacagtagaacatctttcaaaattggagtcaatcatctcaaaatctgatgctgctttatcaactaaggttatgtattatnnnnnnnnnnnnnnnnnnnnnnnnnnnnnnnnnnnnnnnnnnnnnnnnnnnnnnnnnnnnnnnnnnnnnnnnnnnnnnnnnnnnnnnnnnnnnnnnnnnngggtttaagcgactctcctgcctcagcctctcaagtagctgggattacagccatgtgccaccatgcctggctaattttgtatttttagtagagatggagtttcaccatgttggccaggccagtctcaaactccaacctcaggtgatccacctgcctcagcctcccaaagttttgggattataggcgtgagccaccatgtctggcctacatcagtttttttaaccacagaaacctggttaaatgctcaactggtttacaaattagactgacgtaaccagaatgtttaccagaagatgacgaacttccgaaaatatgcaactgtcaggcagtcctatctcaacacacacacgcacacacatgctctcacacatatgcagaaaatctgaagagccctagaaacaca

SEQ ID NO: 720502 - DNA, 2480 bp, Homo sapiens
ggaagaattatgatccaatttaaaaaggaarttaatattgtaaattgatatagtaagtctgcaattaaaataaaatccaaggagaatctttttcttttttaatgagctttcttcccatttctcataaggctttaagaaaatgatgagagagaaataataatgaagactggtacaaatgcattttcaaattattgtcttggaaagtgagtatttgaacttcagaagagatagatggacagctttgatactttctctttatgcttgttatgcattaggaagtttggggctggagggagaaagcctagaattgtagcaccatgggtgatctcctgaggcttctggaaactgttcagtgaggtcttgggttctaagattgattgacttgatgctggtgaccaattgtaacctgttctcccctcctcttttctctttcagaattgaatgacagtgtgaatgaaaacagtgacactgttgggcaaatcgtccactacatcatgaaaaatgaaggtgtgaacattttagtgttccaaaacaattcagtattcctatcctttattaaaaacctgcttcgaagagtcaagatttatatagactctcttactgacttcacctaagctttctaacacctcagcttccagcattattcagctacgcaagtttcacatgagtgagttttctaagcgtgagtcggtctaagcgttgcagagacccagccctggaggcgctgtcagctggtgttcaaatcctggcctcactgcttactggttgtgtgcaatttggggaaactatattgccttgtttcatgaggtagagtttcttcctgtaaaatgaggataataatatttacctcagcctggcacggtggctcacatctgtaatcccagcactttggaaggctgaggtgggaggattacttgaggccaggagttcaagaccagcctgggcaaaatagtgagaccccatctcttcaaaaaaagtaaatagccaggcatggtggcacattcctatgttcccagctacttgggaggctgacgtgggaggatcacttgagctcaggatttcaaagctgcagtgagctgtgatcacaccactgcactccagcatgggtaacagagcgagactctgtcaaaaaaagaaataataagaaacaataataataataatatttacttcacagcattgttgggacatagcacacatagagtgctcagtatggtaagtactcaaatattgtctgttcctttttcatgcgcttaaaaaaattgtggtaaaatacacataaaatttagtactgttaccattttaaagtgcacccttcagtgggattaagcacattcacagtgttgtacatgcatttccactgtctagttccagaactttacatcttcccaagctgaagctctggacactttaggcagccactccccattccctcctcccccgtccactggcagctgctgctgtgcttctgtttgtctactctatgtcatcctttctccagtgttaacacttttacaaagttgaacttttatgaaatttagtattttttcaccctgaaatgtattctaaattatcatcttaaatggaagattaatttaatcttgagtaaagaaactttacggttattgttctgagcactggttattccctccatagcacaccatgccctcagtgatatttgaggtgtgtgggattccttgcccacttactcaatagctgtggattctcacactgtgaattctcattacaatttaaaagaaaatgtttcccctgggctttgtctgtgctttagccagcatgggctcgtggactgatagagctcagcctgatagagctgagccatttgtctaaaggttgaaatacaccacactcatcagtaaatacctgctcctctgccctcaggccctgccctgggcaccccacactcccagatcctcactactccacaagagcacctgcctgcccagcctgtttgtcagtttgactctcttcaacggtttttgacttagagaaacagcagtttcgtatggttgagcataattttcattgctgtttttagaatgtgctttatgcttttggcatagatctgggtgctttatatacgtaatctcatttaatcttcaaaacatccctataaagttagttcagttacacccattttacagataaagaaagaaggttccaagtaattaaattcacatggttagtgagcagcccagctctgtctgtctggtttcaaattcagcatccttttcaaccacacgatattgtccctcctgtcttctaatatgcagttgtcaatttctgcagtctataaagtcagacaaccaaacttactcggatgatgtttaaaataacaaaaaagaccagaatacttggattttgatctctgtcttccagagaccttccttcagggcacagtagttggtgatactgttcttgagtactcaatcatggatgtttcttttatatgaaaaaaa

SEQ ID NO: 720503 - DNA, 2480 bp, Homo sapiens
ggaagaattatgatccaatttaaaaaggaaattaatattgtaaattgatatagtaagtctgcaattaaaataaaatccaaggagaatctttttcttttttaatgagctttcttcccatttctcataaggctttaagaaaatgatgagagagaaataataatgargactggtacaaatgcattttcaaattattgtcttggaaagtgagtatttgaacttcagaagagatagatggacagctttgatactttctctttatgcttgttatgcattaggaagtttggggctggagggagaaagcctagaattgtagcaccatgggtgatctcctgaggcttctggaaactgttcagtgaggtcttgggttctaagattgattgacttgatgctggtgaccaattgtaacctgttctcccctcctcttttctctttcagaattgaatgacagtgtgaatgaaaacagtgacactgttgggcaaatcgtccactacatcatgaaaaatgaaggtgtgaacattttagtgttccaaaacaattcagtattcctatcctttattaaaaacctgcttcgaagagtcaagatttatatagactctcttactgacttcacctaagctttctaacacctcagcttccagcattattcagctacgcaagtttcacatgagtgagttttctaagcgtgagtcggtctaagcgttgcagagacccagccctggaggcgctgtcagctggtgttcaaatcctggcctcactgcttactggttgtgtgcaatttggggaaactatattgccttgtttcatgaggtagagtttcttcctgtaaaatgaggataataatatttacctcagcctggcacggtggctcacatctgtaatcccagcactttggaaggctgaggtgggaggattacttgaggccaggagttcaagaccagcctgggcaaaatagtgagaccccatctcttcaaaaaaagtaaatagccaggcatggtggcacattcctatgttcccagctacttgggaggctgacgtgggaggatcacttgagctcaggatttcaaagctgcagtgagctgtgatcacaccactgcactccagcatgggtaacagagcgagactctgtcaaaaaaagaaataataagaaacaataataataataatatttacttcacagcattgttgggacatagcacacatagagtgctcagtatggtaagtactcaaatattgtctgttcctttttcatgcgcttaaaaaaattgtggtaaaatacacataaaatttagtactgttaccattttaaagtgcacccttcagtgggattaagcacattcacagtgttgtacatgcatttccactgtctagttccagaactttacatcttcccaagctgaagctctggacactttaggcagccactccccattccctcctcccccgtccactggcagctgctgctgtgcttctgtttgtctactctatgtcatcctttctccagtgttaacacttttacaaagttgaacttttatgaaatttagtattttttcaccctgaaatgtattctaaattatcatcttaaatggaagattaatttaatcttgagtaaagaaactttacggttattgttctgagcactggttattccctccatagcacaccatgccctcagtgatatttgaggtgtgtgggattccttgcccacttactcaatagctgtggattctcacactgtgaattctcattacaatttaaaagaaaatgtttcccctgggctttgtctgtgctttagccagcatgggctcgtggactgatagagctcagcctgatagagctgagccatttgtctaaaggttgaaatacaccacactcatcagtaaatacctgctcctctgccctcaggccctgccctgggcaccccacactcccagatcctcactactccacaagagcacctgcctgcccagcctgtttgtcagtttgactctcttcaacggtttttgacttagagaaacagcagtttcgtatggttgagcataattttcattgctgtttttagaatgtgctttatgcttttggcatagatctgggtgctttatatacgtaatctcatttaatcttcaaaacatccctataaagttagttcagttacacccattttacagataaagaaagaaggttccaagtaattaaattcacatggttagtgagcagcccagctctgtctgtctggtttcaaattcagcatccttttcaaccacacgatattgtccctcctgtcttctaatatgcagttgtcaatttctgcagtctataaagtcagacaaccaaacttactcggatgatgtttaaaataacaaaaaagaccagaatacttggattttgatctctgtcttccagagaccttccttcagggcacagtagttggtgatactgttcttgagtactcaatcatggatgtttcttttatatgaaaaaaa

SEQ ID NO: 720504 - DNA, 2480 bp, Homo sapiens
ggaagaattatgatccaatttaaaaaggaaattaatattgtaaattgatatagtaagtctgcaattaaaataaaatccaaggagaatctttttcttttttaatgagctttcttcccatttctcataaggctttaagaaaatgatgagagagaaataataatgaagactggtacaaatgcattttcaaattattgtcttggaaagkgagtatttgaacttcagaagagatagatggacagctttgatactttctctttatgcttgttatgcattaggaagtttggggctggagggagaaagcctagaattgtagcaccatgggtgatctcctgaggcttctggaaactgttcagtgaggtcttgggttctaagattgattgacttgatgctggtgaccaattgtaacctgttctcccctcctcttttctctttcagaattgaatgacagtgtgaatgaaaacagtgacactgttgggcaaatcgtccactacatcatgaaaaatgaaggtgtgaacattttagtgttccaaaacaattcagtattcctatcctttattaaaaacctgcttcgaagagtcaagatttatatagactctcttactgacttcacctaagctttctaacacctcagcttccagcattattcagctacgcaagtttcacatgagtgagttttctaagcgtgagtcggtctaagcgttgcagagacccagccctggaggcgctgtcagctggtgttcaaatcctggcctcactgcttactggttgtgtgcaatttggggaaactatattgccttgtttcatgaggtagagtttcttcctgtaaaatgaggataataatatttacctcagcctggcacggtggctcacatctgtaatcccagcactttggaaggctgaggtgggaggattacttgaggccaggagttcaagaccagcctgggcaaaatagtgagaccccatctcttcaaaaaaagtaaatagccaggcatggtggcacattcctatgttcccagctacttgggaggctgacgtgggaggatcacttgagctcaggatttcaaagctgcagtgagctgtgatcacaccactgcactccagcatgggtaacagagcgagactctgtcaaaaaaagaaataataagaaacaataataataataatatttacttcacagcattgttgggacatagcacacatagagtgctcagtatggtaagtactcaaatattgtctgttcctttttcatgcgcttaaaaaaattgtggtaaaatacacataaaatttagtactgttaccattttaaagtgcacccttcagtgggattaagcacattcacagtgttgtacatgcatttccactgtctagttccagaactttacatcttcccaagctgaagctctggacactttaggcagccactccccattccctcctcccccgtccactggcagctgctgctgtgcttctgtttgtctactctatgtcatcctttctccagtgttaacacttttacaaagttgaacttttatgaaatttagtattttttcaccctgaaatgtattctaaattatcatcttaaatggaagattaatttaatcttgagtaaagaaactttacggttattgttctgagcactggttattccctccatagcacaccatgccctcagtgatatttgaggtgtgtgggattccttgcccacttactcaatagctgtggattctcacactgtgaattctcattacaatttaaaagaaaatgtttcccctgggctttgtctgtgctttagccagcatgggctcgtggactgatagagctcagcctgatagagctgagccatttgtctaaaggttgaaatacaccacactcatcagtaaatacctgctcctctgccctcaggccctgccctgggcaccccacactcccagatcctcactactccacaagagcacctgcctgcccagcctgtttgtcagtttgactctcttcaacggtttttgacttagagaaacagcagtttcgtatggttgagcataattttcattgctgtttttagaatgtgctttatgcttttggcatagatctgggtgctttatatacgtaatctcatttaatcttcaaaacatccctataaagttagttcagttacacccattttacagataaagaaagaaggttccaagtaattaaattcacatggttagtgagcagcccagctctgtctgtctggtttcaaattcagcatccttttcaaccacacgatattgtccctcctgtcttctaatatgcagttgtcaatttctgcagtctataaagtcagacaaccaaacttactcggatgatgtttaaaataacaaaaaagaccagaatacttggattttgatctctgtcttccagagaccttccttcagggcacagtagttggtgatactgttcttgagtactcaatcatggatgtttcttttatatgaaaaaaa

SEQ ID NO: 720505 - DNA, 2480 bp, Homo sapiens
ggaagaattatgatccaatttaaaaaggaaattaatattgtaaattgatatagtaagtctgcaattaaaataaaatccaaggagaatctttttcttttttaatgagctttcttcccatttctcataaggctttaagaaaatgatgagagagaaataataatgaagactggtacaaatgcattttcaaattattgtcttggaaagtgagtatttgaacttcagaagagatagatggacagctttgatactttctctttatgcttgttatgcattaggaagtttggggctggagggagaaagcctagaattgtagcaccatgggtgatctcctgaggcttctggaaactgttcagtgaggtcttgggttctaagattgattgacttgatgctggtgaccaattgtaacctgttctcccctcctcttttctctttcagaattgaatgacagtgtgaatgaaaacagtgacactgttgggcaaatcgtccactacatcatgaaaaatgaaggtgtgaacattttagtgttccaaaacaattcagtattcctatcctttattaaaaacctgcttcgaagagtcaagatttatatagactctcttactgacttcacctaagctttctaacacctcagcttccagcattattcagctaygcaagtttcacatgagtgagttttctaagcgtgagtcggtctaagcgttgcagagacccagccctggaggcgctgtcagctggtgttcaaatcctggcctcactgcttactggttgtgtgcaatttggggaaactatattgccttgtttcatgaggtagagtttcttcctgtaaaatgaggataataatatttacctcagcctggcacggtggctcacatctgtaatcccagcactttggaaggctgaggtgggaggattacttgaggccaggagttcaagaccagcctgggcaaaatagtgagaccccatctcttcaaaaaaagtaaatagccaggcatggtggcacattcctatgttcccagctacttgggaggctgacgtgggaggatcacttgagctcaggatttcaaagctgcagtgagctgtgatcacaccactgcactccagcatgggtaacagagcgagactctgtcaaaaaaagaaataataagaaacaataataataataatatttacttcacagcattgttgggacatagcacacatagagtgctcagtatggtaagtactcaaatattgtctgttcctttttcatgcgcttaaaaaaattgtggtaaaatacacataaaatttagtactgttaccattttaaagtgcacccttcagtgggattaagcacattcacagtgttgtacatgcatttccactgtctagttccagaactttacatcttcccaagctgaagctctggacactttaggcagccactccccattccctcctcccccgtccactggcagctgctgctgtgcttctgtttgtctactctatgtcatcctttctccagtgttaacacttttacaaagttgaacttttatgaaatttagtattttttcaccctgaaatgtattctaaattatcatcttaaatggaagattaatttaatcttgagtaaagaaactttacggttattgttctgagcactggttattccctccatagcacaccatgccctcagtgatatttgaggtgtgtgggattccttgcccacttactcaatagctgtggattctcacactgtgaattctcattacaatttaaaagaaaatgtttcccctgggctttgtctgtgctttagccagcatgggctcgtggactgatagagctcagcctgatagagctgagccatttgtctaaaggttgaaatacaccacactcatcagtaaatacctgctcctctgccctcaggccctgccctgggcaccccacactcccagatcctcactactccacaagagcacctgcctgcccagcctgtttgtcagtttgactctcttcaacggtttttgacttagagaaacagcagtttcgtatggttgagcataattttcattgctgtttttagaatgtgctttatgcttttggcatagatctgggtgctttatatacgtaatctcatttaatcttcaaaacatccctataaagttagttcagttacacccattttacagataaagaaagaaggttccaagtaattaaattcacatggttagtgagcagcccagctctgtctgtctggtttcaaattcagcatccttttcaaccacacgatattgtccctcctgtcttctaatatgcagttgtcaatttctgcagtctataaagtcagacaaccaaacttactcggatgatgtttaaaataacaaaaaagaccagaatacttggattttgatctctgtcttccagagaccttccttcagggcacagtagttggtgatactgttcttgagtactcaatcatggatgtttcttttatatgaaaaaaa

SEQ ID NO: 720506 - DNA, 1413 bp, Homo sapiens
tgtataatttgaaggtatttactctaacttaagaaaaatacataattagcgagctttaaccattaatgaacactccttggctttcacaccaccaagccatcaagactatatactttttttttctttttttttttttttttttttgagacagggtttcactctgtagcccaagctggagtgcagtggcactatcacagctcactgcagccttgcacctctgggcttaagtgatcctcctgcctcaacctcctgagtagctgggatgaaaggcacatgccaccatgcccagctaatttttgtcctatttttgtagagacggggtcttgctatggttttcgggctggtcctgaactcctggcctcaagcgatcctcctgcctcagcatcccaaagtgctgagattacaggcgtgagccaccacactaggccaaaactatatacttagcacttacttcatgattctcatttctcagcactccttaaactttgaaaaattgtttctatctgcatatcatatggattgcattaaatctattctgctgcatagatcctatttgtgttacttacaaaggactgtattatgtttgatggctcaccctctgcctccctaccacctacacttctgcagataaggaaatgggaatggcaatctgaactgccctgctgacagcacagggccctgtctcctttcggctcagcctctggggctcttctatcacatggaaatgcatgggggcctcttgttgtcccctatcctccgcaactacacagtaaagtgcagtttcaggggctctgtcgcctaacctcagtctcccctctgcagcctcatctcacatgacttccactgaggagtctctgccacacccagtctgcattaacttctctattcccacctccatgcctttgcacacaggctgtttcctttgctcagcacaccattccatacactcccttttaaggtccactgaaaatgccaagtttcaggctatgaatgaagtcttttccatcgcccttatcagaaggaaagtctccctccctttgatcccacacagcactttgtctgtagttctctgattacaccaaacacattctctactatactatagtgatttgtattcatagcttatctcccccttctcaatcacaagtttgtggagaacaaaaaagaagtttgttattcattttacatacctacatagcacctgacgatatctcaaataagagaaacctcatttttaaattaactgcacactgtamagaatgatctacaagttttacctgcaatgactattaaaaagggctgagttgacaatcacgactgtgaaatgagtttcaccttcaaaacccagcttcttggctctatcacatagctttaaacaatatccaatgcttccctttttcttttggtggttgt

SEQ ID NO: 720507 - DNA, 1638 bp, Homo sapiens
  misc_feature 2, 3, 4, 5, 6, 7, 8, 9, 10, 11, 12, 13, 14, 15, 16, 17, 18,19, 20, 21, 22, 23, 24, 25, 26, 27, 28, 29, 30, 31, 32,33, 34, 35, 36, 37, 38, 39, 40, 41, 42, 43, 44, 45, 46,47, 48, 49, 50, 51, 52, 53, 54, 55, 56, 57, 58, 59, 60,61: n = A,T,C or G
  misc_feature 62, 63, 64, 65, 66, 67, 68, 69, 70, 71, 72, 73, 74, 75, 76,77, 78, 79, 80, 81, 82, 83, 84, 85, 86, 87, 88, 89, 90,91, 92, 93, 94, 95, 96, 97, 98, 99, 100, 101: n = A,T,C or G
tnnnnnnnnnnnnnnnnnnnnnnnnnnnnnnnnnnnnnnnnnnnnnnnnnnnnnnnnnnnnnnnnnnnnnnnnnnnnnnnnnnnnnnnnnnnnnnnnnnnngcagagaaaatacattaaggtctttgttagtgtgtgtgtgtrtatatatatatatatatatattttgaggcagggtctcactgtgtctccccagctggagtccagtggtgtgaactcggctcactgcagccttgacctcctggactcaagtgatcctcctacctcagcctcctgagtagctggactacaggcatgcaccagtatgtccaactaatttttgtatttgtgtgtgtgtttgtgtgtgtagatggtatttcactatgttgcccaggctggtctcaaactcctgagctcaagggatctgcccacctcaacctctcaaactcctggaattacaggcatgagctacgatgcgtagccagtgtatatattcttaaaatggagttatgcgggcaagaatctgcatgttactgcacccagaaatttttaaaggatacatatcaatcagtcttagatgttaactattagtattgttaaattggcggtatgagttatataaataaccatccttgtgtatgtgtgtgtgtgtgtatatatatatatgtatatggtctgcccagggtcaggccagcatcagaggcagggtctagaccaaggccagcaaactttttctgtaaagggccagcaagtaaacattttaggctttgtggaccacgtggtctctgccaatgttgagtgtaagtgaccgcagacagtacatcactgagggcagtagaacatggcttgcttttaccatgatgccttttcttttgtggcttttctatttcatctcctgctggttctcccaccctggcaaacagatgtgggcttctcttgtagctcttctccatgagcaagctgagacttttctctctggaccccagatttgatatcaggctgaaaatatttcctccatggtgttccgtaaaattctagccgaacaaccttagcatcacattcacagaaatcatcatagtgttctggtttcagcgctccagacacgcctccctgcagccttagtcagagaagcctcggattttagctggttttcccgaggtctctgttactgccattctgcccttgcaggctttctagaagcctctttttcccccatgccaaaccccccctctagtttctctttcttgggttctgctatctggatgagctatttttttctaataattttaacctgtagaagatgtgatatgcatgaaatcccgtttctgcaatgattcttcctgttctggtcacagaatctgcctgtggggagattctcagtgtggggagtgcatgcaccccgggagccccatctcacccaaatgtggggaggccattgactcctgtatgttgtgtgtccgctacctttccatagcaaacatttagatggattacctcttagagtgggtttctggttttgatttcaagctgttgaggattgagcttaagtgccttctgccttgaatcagaaggtactaaactcatgatacttgaccaaaattaaagtgaaattcctgccgggcacagtggctcatgcctgcaatcccagcactttgggaga

SEQ ID NO: 720508 - DNA, 1130 bp, Homo sapiens
agaggagagcaataggctgcttatatcccgtgatcctcaagtgatgacaaatcgaagatatttacagtgaacagtggtgcatgtgcccagcaccataaacatgaacctacttacttttttgctttttcattgttcctttttaacacttggaatatctttcctacagcaatactctctgttacttaaactaccaaacccattatctcctgatgaagcaatgtgcttcccaaacgtagtaattcaaggctgtgtctttacagccttgaacaatcttttaaaaatctgagacatagcaaccagatgttgatagagattacttctcttgatccaaagataactggcacttggagttctaagaaagtcaggagttcaaagaatgagaatctaagtgagggaaaatgaactccttgaacacacgttttttgcactgttatcaagtcatttcttaggattgattgtcagaatgaaatggttgttaaaaaattgtactctaggccgggcgcggtggctcatgcctgtaatcccagcactttgggaagccgaagcgggcagatcacctgaggtcaaggttcgagaccagcctgaccaacatggagaggccctgtctctactaaaaatacaaaatcagccgggcttggtggcacgtgcctataatcccagctactagggaggctaaggcaggagattcgcttgaacctgggaggcggagattgcggtgagccgagatcgtgccacagcactccagcctgggcaagaagagcgaaaccccatctcaaaagaaaaaaaaaaaattgtactctaaagatagagctctgtttccacaaattgtatcagaaacgagaggtaacatttcaacatttaagctttcatatgcatttatttttcaaattcyaacaaacattttcaagtttgttagaactaaacagaacctactagaatcaattctattgatgtcatttcttttaacatagcaacttatcacacaataagtactcaatgtctgggttttaattgaccaagtaagtaaattgaagaaagtttggaaaactttctcttcctctgacacaattcttcactgttcttttttttggggggcggggggatgaagctttgaaaaatttatttttgca

SEQ ID NO: 720509 - DNA, 582 bp, Homo sapiens
gcagacacacatatgacatactctgctctatgctttcttatccctttgcctttgctgattcaatcctctttgtctggactgcccaatgcccattatatcagctcaaaccctcttcatccctgtgggcctgtctcagaggctgctttttctaggaagccttctgtgatcacctcaatgagaagtaagcccttattcttttgaatgatgatggtagtgtattagtctgttctcacactgctatgaagaactgcctgagactgggtaatttataaaggaaagagatttaattgactcatagttctgcatggctggggaagcctcaggaaacttatgatcatggtggaaggggaagcaaacacactcttcttcacatgctggcaggagaaagaagtgcagagtaaagggggaaatccccttataaaaccatcagatcttgtgagaactcactcactatcatgagaatagcataggggaactgcccccatgatccartcacctactatgaggtccctcccccagtgcgtggtaattacaattcaaaattacaattcaaaatgagattgtgggtgaggggagagccaa

SEQ ID NO: 720510 - DNA, 1245 bp, Homo sapiens
atgaatactgtatttttgatccctgtttggttgaaaaatatctgtgtataagtggtcttgtgaagttcaaactgtgttgttcaaggaggtcaactgtacttcatttcattttaaagatccccaaagaagctgaacagatctcaggaagagcaggaacaagtacatggttctgatttcaaggtggcagaatgggcaagaggagcagaagaaatttgtgtgtctttctttcatcactagaagtccaatgtgctattcattgcaccacaaagccatctgtttgtgtgtctttcttctattgtttgaccattaagtgaatcagcagctctgtgtatctgctccttacttggctctctaccaataccttatacttccccagtactctatttttgttgactttatagcttctgcttactcttcctcatcttatttatcatttctgtttccttataactttggctgccaaggcttaagttttatctcactgacattctttcagatagagccaccaytaggggtttagggccctgtttacataaacaatttaaagcactctggaatgatcaggtgagaacctcttaaaatctttgccttcataaaagcaacaggaactctggaaaaaaatagtcaaaattaatttttcaaaattctggaaattaaccaaaaacttgcaataatttgaaaatgttttatttaagaaatgactaaatgttagtaagaatagcacatttttgtagcatttaaacttatcctatccttcttacgagctactcagtaatcttggaaaccagctagcctcagaactgtgctatgaaaaccaggagcctagtggccactgaagaaaacagaatgagtctggagctcttcagaaagcctcatacccagaaaagggtcactatttgacctgcctggcagatccctggagaagatccattctcaatgcttgtctttattatagccaactcagagcttagacttgcaggaaatcaagttaccaacatagcttatgtgagtcccagaagaagaatgagagaaaaggacagaaagaatatttgaaggagtaatgactaaagtctttccaaattcaataaaaacattaatttacacacaccagaatgtcaacaaactgatagcaggataaacctaaagagatccatacctagacacattatagtcaaaatatcaaaagccaaagccaaagagaatcttgaaagcagcaggagagaagtaactcatcacctacaaagg

SEQ ID NO: 720511 - DNA, 581 bp, Homo sapiens
ttttttttttttttttttttgagatggagtttcactcttgttggccaggctggggtgcaatggcgcgacctcagctcactgcaacctctgcctcctgggttcaagcgattctcctgtctcagcctccggtgtatctgggattacaggcacccaccaccatgccccactagtttttttgtgtttttagtagagactgggtttcatcatgttggccaggctggtgtcaaactcctaacctcaggtgatcctcccccgcctcggcctcccagagtgctgggattacaggcgtgagccactgcacccagcctcaaacacaaattaaatacatacctctctttaacctaaatagaaaaaccgtaaagcccagattgcaagatttttaaatacaataagaatatcctgaattataaaactgctttgctaaagcctaatccaggatttatcctcctagaggactacaaggaaagcacagccttgggagagataaacattttgacaaaacaatgataaaattccacatcctaaaaaaayagaaatgacgaaacatgccctccttgattgagaataagaaggaagggctc

SEQ ID NO: 720512 - DNA, 909 bp, Homo sapiens
cagctactcaggaggctaaagcaggagaatggcgtgaacccgggaggtggagcttgcagtgagctgagattgtgccactgcactccagcctggtgacacagtgagactccagctcaaaaaaaaaaaaaagaaagaaagaaaattattgcttccttataattattttatggagcamataaaattaagcatataatattaagaagtcgagatatctaagttctagtttatatcatgcatggcttaaaaacagttttgtaagactgaattatattaaatagaatcaaaagaataagaataagtaaaggcaagttgtagagcctcaagtaagacttctgtagaagacatgaagccaccatctctcttgtaagctatttgctaatttgtctgtttatttcctactgtgttccaaaaagggaacaactaatattaatagattgatgtatatagcacaatgcaaagcagtcagatcccacctgcaactagaatttctcaaatactctacttgggtatattttggaacctcaactgatttggaggaatacacatgaaaggcataattcccagaatgctagaattacagagcaacttcagaaaaagtttaattactaccttcctaaggtgtcccaatgctgctgtatgtactcctcctgttactttgcacctaaaattttaaaaataaatatttatgcctgtaaaattcctagtatggatcgtacaccactgttgaccttcatactgtgactgcactgtctgctgaaggaaaaggaaatcatatttgtggaatatacagtgtttggttttggtatttagagttcccaggcctgataggattccctttccatacctgagaggaggcacagatggtttgtgatgttggtgtgtaaggctaccgctgggatctctagataa

SEQ ID NO: 720513 - DNA, 654 bp, Homo sapiens
tgatgattcagacaattctgatgttagttctatttagaaataactctgagaacagttctttttttttttttcttttgagacagagtctgactctgtaccccaggctggagtgcagtgacgtgatctcggctcactgcagcctctgcttcctggattcaagctattctcctgcctcagcctcccaagtagctgggattacagatgtgcaccaagaggaccggctatttttttttttaatttttttttaatttttttttttagtagagatggggtttcgccatgttggcaaggctggtcccgagctcctgacctcaagtgatccatcctcctcggcctcccaaagtgctgggattacaggcatgagccactgcacyggcctgagaacagtttttatattttatttttacattgaagtcagtcagatttgcttcagcctcaaatattgtgtttatgtgaaattaaatgagtgctggcagtgagctgcactttttttttctaaatgggaaaagggttaataagggcttatgttcattcttgtattgctctctaaactttgttccttgtcacagaagaaaaatagtcaccccttttgaggccagagacctgggttacactttttttgtacacaacccttcctaaatagagcactagatt

SEQ ID NO: 720514 - DNA, 654 bp, Homo sapiens
tgatgattcagacaattctgatgttagttctatttagaaataactctgagaacagttctttttttttttttcttttgagacagagtctgactctgtaccccaggctggagtgcagtgacgtgatctcggctcactgcagcctctgcttcctggattcaagctattctcctgcctcagcctcccaagtagctgggattacagatgtgcaccaagaggaccggctatttttttttttaatttttttttaatttttttttttagtagagatggggtttcgccatgttggcaaggctggtcccgagctcctgacctcaagtgatccatcctcctcggcctcccaaagtgctgggattacaggcatgagccactgcactggcctgagaacagtttttatattttatttttacattgaagtcagtcagatttgcttcagcctcaaatatygtgtttatgtgaaattaaatgagtgctggcagtgagctgcactttttttttctaaatgggaaaagggttaataagggcttatgttcattcttgtattgctctctaaactttgttccttgtcacagaagaaaaatagtcaccccttttgaggccagagacctgggttacactttttttgtacacaacccttcctaaatagagcactagatt

SEQ ID NO: 720515 - DNA, 1923 bp, Homo sapiens
caggtgtgagccactgcgcccagcctaaacttttgcaccttgaatataagcagaaggacacaattgatatctgcctaagaggtgtgtcagcctcattctttggtcaatttctccccctctcccaccttcagcccctaccctcattccaaacatgtagcaataaaaagtttataaaaaaggggaaataaaaatgatgtagttagttcagaatgcaaaaacgtacatacctctgtggcacagaaacaaacaaaaattacacagtgaagagagctgaattgcagctgtatacctacttgccttctgttcttatgtccagggctttggctcccacagggtagtgaagagtaacagtagacaacatcacgcagaggctttgaggatggggactagcaatggggctccctcttgtgatggagcctgaaaaaaagttggataccccatggcttaaaggtatggaagcagaagatgggaaaggaattcaaggacagagcctgatgtaatgaaggaatcaaaagaaaaaaatacaacactttaatggaagattttttagaagacaaattaatgcatgtcatagtcctataaatttttctcaaattgacatgtgggtttaattttttggtattcctggcttattttgatattgtaaatgttgtgacaattgtgatattgtgatatttacaatatcaaactaaggcaggaataccaagaaaaaatgctgtgtttctgctctgaactgaggtcccaggctgccatgtggaggtaaaggcaatactgtcaggtaggaaaaagtgagcatggagggaacaggaaacagaaaataaaagactacagctctttctgctcagaatagcctcctgcaaagtaaaattcaaaaccacattaaaatattttacataagaaagaatatgaattccacctccccagttaagagtatgaattcactctagttaaaattaggcctggcatggtggctcttctctgtaatctcagcattttgagaggtcaagggtttgagaccagcctcrgcaacacagcatgaccttgaccttaacctaaaaataaaaaaattagccatgcacagtggctcacttctgcagttccagctactcaggaggctgaggcgggaggatgccttgagcccgggagattgaggctgcagtgagccatgattatgccatcgcactccagcctgggctgcaaagccagactgtctcaaataaataaataaataaaataataattataataattttgtggaactgcttgataaggaattgaaaataaatgtgcttaggatacttaaagagatagagatatttcctccattaaaaaagaacaagcaaataggaagcaaaaaaaaatctattatgcaacaagaaataggtagatctgaaagagaaacaagtagaaatttaaaaatagacattaaaattaaaaaatcaattgaaaaaatgaactctaggctggatacctttgaaaaggggattactgaattggaggggaggacttcacacaatcatggtcaaagacaagaataacatgagagaaccatgaaggagtattgacgttagactgtgaggattccaggagaaaatgaagggaaagttaatttttacaaaagcgtgttacataccaaaaggataaagaagccaaatcattacagaacaattttaaaacatcaagaacaacaagaaaatcttaagggctatcagagataaaagacagattaggagcaaaggaatgacaattaggaatgacaattagtcaactgtcttctcaattgagagattaaatgccacaaagaagccagtgaagtagtatcttcaaggtgctgagggaaaacagtatctacactgctgaactactgcaatgtgggtgcaaaataaaaccatttttcattcttttccacaaaaatatatctaa

SEQ ID NO: 720516 - DNA, 1923 bp, Homo sapiens
caggtgtgagccactgcgcccagcctaaacttttgcaccttgaatataagcagaaggacacaattgatatctgcctaagaggtgtgtcagcctcattctttggtcaatttctccccctctcccaccttcagcccctaccctcattccaaacatgtagcaataaaaagtttataaaaaaggggaaataaaaatgatgtagttagttcagaatgcaaaaacgtacatacctctgtggcacagaaacaaacaaaaattacacagtgaagagagctgaattgcagctgtatacctacttgccttctgttcttatgtccagggctttggctcccacagggtagtgaagagtaacagtagacaacatcacgcagaggctttgaggatggggactagcaatggggctccctcttgtgatggagcctgaaaaaaagttggataccccatggcttaaaggtatggaagcagaagatgggaaaggaattcaaggacagagcctgatgtaatgaaggaatcaaaagaaaaaaatacaacactttaatggaagattttttagaagacaaattaatgcatgtcatagtcctataaatttttctcaaattgacatgtgggtttaattttttggtattcctggcttattttgatattgtaaatgttgtgacaattgtgatattgtgatatttacaatatcaaactaaggcaggaataccaagaaaaaatgctgtgtttctgctctgaactgaggtcccaggctgccatgtggaggtaaaggcaatactgtcaggtaggaaaaagtgagcatggagggaacaggaaacagaaaataaaagactacagctctttctgctcagaatagcctcctgcaaagtaaaattcaaaaccacattaaaatattttacataagaaagaatatgaattccacctccccagttaagagtatgaattcactctagttaaaattaggcctggcatggtggctcttctctgtaatctcagcattttgagaggtcaagggtttgagaccagcctcagcaacacagcatgaccttgaccttaacctaaaaataaaaaaattagccatgcacagtggctcacttctgcagttccagctactcaggaggctgaggcgggaggatgccttgagcccgggagattgaggctgcagtgagccatgattatgccatcgcactccagcctgggctgcaaagccagactgtctcaaataaataaataaataaaataataattataataattttgtggaactgcttgataaggaattgaaaataaatgtgcttaggatacttaaagagataragatatttcctccattaaaaaagaacaagcaaataggaagcaaaaaaaaatctattatgcaacaagaaataggtagatctgaaagagaaacaagtagaaatttaaaaatagacattaaaattaaaaaatcaattgaaaaaatgaactctaggctggatacctttgaaaaggggattactgaattggaggggaggacttcacacaatcatggtcaaagacaagaataacatgagagaaccatgaaggagtattgacgttagactgtgaggattccaggagaaaatgaagggaaagttaatttttacaaaagcgtgttacataccaaaaggataaagaagccaaatcattacagaacaattttaaaacatcaagaacaacaagaaaatcttaagggctatcagagataaaagacagattaggagcaaaggaatgacaattaggaatgacaattagtcaactgtcttctcaattgagagattaaatgccacaaagaagccagtgaagtagtatcttcaaggtgctgagggaaaacagtatctacactgctgaactactgcaatgtgggtgcaaaataaaaccatttttcattcttttccacaaaaatatatctaa

SEQ ID NO: 720517 - DNA, 970 bp, Homo sapiens
tgttaactcacacagtctgcagagcaactccgtgaggtaggcactagtatcatgcacattttaaagtaggactctaagaacagaggtgttaagaacttggctaaggcatgccagctggtgagcagggcagctggggttcaaatcaaggcagagtggcagcagggctggagctctctcatgcctggcatgcctggtgctccacaaaggtttgttttcccctcctctgatccccagtttttcagcccctcaagggcaggaagcccccatacccgtgattacacacacacacatctctctctgtctcatataaacattcacatacacataaggattcgtggttaagtccctttagcaagtagaatggtggaatgattgccatttcagtgaataaatattcagctttggttttcaggctgtgtcctgtctggttattaaagttttcttatgatttctctctacctgggttctgatgcatccacctaactgctacactcttttcgcttttttttttttttttttttaataggttctcgctctgtcactggggctggagtgcrgtggagcaatcatagctcactgcagcctcaaccccctcggctcaagagaccctcctgcctcagcctcctgagtagctgggaccacaggcacagtgcacggtgccagctattttggcttttccactcaaacccgcttgtggctactagtccttattctcggacgtgtcttaacaatgtgtgggccctcccctgctctggtgtggctctgagccccagcattcctctgccctacatacccccacccgactccaggcccagcctcccagagcaaactgctgctctgcctcacgtagtgcagaccctaactgggaaatgacaggagctgtgcccaaatgaaatggaggaagcagcatccaaaatcagcctcttgtcagaatacattcaaatataggtgaattttgaaatcaaatagg

SEQ ID NO: 720518 - DNA, 970 bp, Homo sapiens
tgttaactcacacagtctgcagagcaactccgtgaggtaggcactagtatcatgcacattttaaagtaggactctaagaacagaggtgttaagaacttggctaaggcatgccagctggtgagcagggcagctggggttcaaatcaaggcagagtggcagcagggctggagctctctcatgcctggcatgcctggtgctccacaaaggtttgttttcccctcctctgatccccagtttttcagcccctcaagggcaggaagcccccatacccgtgattacacacacacacatctctctctgtctcatataaacattcacatacacataaggattcgtggttaagtccctttagcaagtagaatggtggaatgattgccatttcagtgaataaatattcagctttggttttcaggctgtgtcctgtctggttattaaagttttcttatgatttctctctacctgggttctgatgcatccacctaactgctacactcttttcgcttttttttttttttttttttaataggttctcgctctgtcactggggctggagtgcggtggagcaatcatagctcactgcagcctcaaccccctcggctcaagagaccctcctgcctcagcctcctgagtagctgggaccacaggcacagtgcacggtgccagctattttggcttttccactcaaacccgcttgtggctactagtccttattctcggacgtgtcttaacaatgtgtgggccctcccctgctctggtgtggctctgagccccagcattcctctgccctacatacccccacccgactccaggcccagcctcccagagcaaactgctgctstgcctcacgtagtgcagaccctaactgggaaatgacaggagctgtgcccaaatgaaatggaggaagcagcatccaaaatcagcctcttgtcagaatacattcaaatataggtgaattttgaaatcaaatagg

SEQ ID NO: 720519 - DNA, 621 bp, Homo sapiens
agagtaacacactggactgtgacacacacatggcaacacacgcagtgtgacacagggaccatgacacaccacagactatgacacatgcaccgcaacacaggaactgtggcacaccatggactgtgacacacacaccacaacacagggattgtgacataccacggactgtgacacatacaccatgacatagggactgygacacaccatgacacagggactgtgacacaccatggactgtgacacacacacacggcgacacgtggagtgtaactctttggtaaatttttttgatacaaggtctccctctgtcacccaggctggagtgcagtggtgcaatcatggctcactgcagcctccgcctcccagtgtcaagcgattctcctacctcagtctcccaagtagctgggactatagacatgcaccaccacgctgggtgaatttttaaattttttatagagatgggcatcttgccgtgttgctcaggctgctctcgaactcatgagctcaagcaatcctcccacctcagcctcccaaagtgctgggattacaggtgtgagcctccgcgcccagccaagtgtcactcatgggcaacacaaggactgtggcacccagactgtgaca

SEQ ID NO: 720520 - DNA, 621 bp, Homo sapiens
agagtaacacactggactgtgacacacacatggcaacacacgcagtgtgacacagggaccatgacacaccacagactatgacacatgcaccgcaacacaggaactgtggcacaccatggactgtgacacacacaccacaacacagggattgtgacataccacggactgtgacacatacaccatgacatagggactgtgacacaccaygacacagggactgtgacacaccatggactgtgacacacacacacggcgacacgtggagtgtaactctttggtaaatttttttgatacaaggtctccctctgtcacccaggctggagtgcagtggtgcaatcatggctcactgcagcctccgcctcccagtgtcaagcgattctcctacctcagtctcccaagtagctgggactatagacatgcaccaccacgctgggtgaatttttaaattttttatagagatgggcatcttgccgtgttgctcaggctgctctcgaactcatgagctcaagcaatcctcccacctcagcctcccaaagtgctgggattacaggtgtgagcctccgcgcccagccaagtgtcactcatgggcaacacaaggactgtggcacccagactgtgaca

SEQ ID NO: 720521 - DNA, 601 bp, Homo sapiens
ttgcaacttgagcgataacacaggagggaagacttgtagtagagagggtaaactgggaaggcttctaagacctcctaagtttgacttccctcctcaactcttagcacccagcaaaacagcctctggagttacatggagactccagttagagaagctctgtatgtggccctgtatcaagtaaaaggtctttatatttttcaaatggatgaagagtggtaggggatcaccagcgtagttcagaataacctcataaagagagcttaaagtctctcagaggtgaaaaaagaatgtctattacttagragaaccagtagtgagtggtgtcagagaagtaaaaggaggggatttcaaagattgtagttattagacccaccattagatcatgttaattgatgttttagtaaagaagcaaatatgttactacatcacaatttacatgtggacaccttccattcttattctcttttctgtctttacatttctctttaccctatcactaacatgctgtatattttagtgatttttctctctgtcctatgagactataaactccctgagggcagagatttttgtctgttttgttcatggctgtatctcagag

SEQ ID NO: 720522 - DNA, 1034 bp, Homo sapiens
aaattgaaagcaactgagaagggcacaaaagagctttatggggtgatcatgatggtaatttttttgggtgggggtgaacaaagtcttactgtcactcaggcgggaatgcagtgatacaatcatagttcactgcaaactcaacctcccagactcaagcaaccctcctgcctcggccttccaagtacctgggattacaggtgtgcaccgtcacacccagcaaatttttaatttttttagagatggggtcttgctatgttgcacagactggtcttgaactcctgggcatcagccatctccctactcagcctacaaaagtgtagcgattacggatgtgagccactgcatccagccagtgatgataacattttatgccttgctaggggtgtgctttacactgggatatacacttttcacaatgaactgaacagtgcacttaagatacatacatttcactgtatgtaaatcttacctgaaagaacaacagtaaacaaatattgaaagttagatgtatgatgaagtcaagttccaccctggaaggttcgccagtgtaagtaagtgcacacacatagtctgcctccaaagggagatcacctatatcctcaccctactttctactagagaggaagccaggggggctactttgggccctcaggtactctttatttaatccccaacttatttggaaatgcattcaaaaatgagatggatagccaggcatggtggctcactcttgtaatctcagcactttaggatgctgaggcagggaggatcacttggggacaggagttcgaggcycccctgggcaacatagtaagacttcatctctatatttaaaaaagaaaaaaatgaaaaaaaaagatggatgcatggatggacagagggatggagagatggatagatgtgataaagcaaatatactaaaatgttatttgtagaatctagatagtggacataggtatgttgactacaattctttcctcttttccatatgtttgaaaatatttatgatgatattttggaaaacataaaattga

SEQ ID NO: 720523 - DNA, 633 bp, Homo sapiens
acataccatgagcctgattgaaaatttgttctttctgaaattttgttaatcttgttaattatatgagagattattaaagtttctcaaggccttagaattttttaacccaatccagrtttccaggcaggtaaaggaaatatgaatatgactaggagctccaatttccatatctgattaacaataacaggcaacttaaagttggaaatgctgttttaaaataaccctgaaaagaaatgctaagtttttgccaatgatatttggagatacaaaaagagaatccaggataacaacttgcatagttggcagaagttgtaaaactgaagagtttgaactgaatttttgataaggttaggtttaattaataggttagaggaagaaaagagcactctaatgcttcttgctttttgcagaattcaaggaggcatttctcctgtttgacagaacaggtgattccaagatcaccttaagccaggtcggtgatgtccttcgagctctgggcacaaatcccaccaatgcagaggtcaggaaagttctgggaaaccccagcaatgaaggtaacccatcaatttttccaagaagtgtggaagtatagggaagtgtgtagcagtgtgtgtgtgtgtgtgtgtgtgtgtg

SEQ ID NO: 720524 - DNA, 633 bp, Homo sapiens
acataccatgagcctgattgaaaatttgttctttctgaaattttgttaatcttgttaattatatgagagattattaaagtttctcaaggccttagaattttttaacccaatccaggtttccagkcaggtaaaggaaatatgaatatgactaggagctccaatttccatatctgattaacaataacaggcaacttaaagttggaaatgctgttttaaaataaccctgaaaagaaatgctaagtttttgccaatgatatttggagatacaaaaagagaatccaggataacaacttgcatagttggcagaagttgtaaaactgaagagtttgaactgaatttttgataaggttaggtttaattaataggttagaggaagaaaagagcactctaatgcttcttgctttttgcagaattcaaggaggcatttctcctgtttgacagaacaggtgattccaagatcaccttaagccaggtcggtgatgtccttcgagctctgggcacaaatcccaccaatgcagaggtcaggaaagttctgggaaaccccagcaatgaaggtaacccatcaatttttccaagaagtgtggaagtatagggaagtgtgtagcagtgtgtgtgtgtgtgtgtgtgtgtgtg

SEQ ID NO: 720525 - DNA, 1210 bp, Homo sapiens
taacaccagcttcactttgaagagtatgtttttttaactgcaaatattcacttcccaatacctgcaggccctggaatggcatttgcagaaggagaaactattctttttggcacagagtctcctacctggaaatttgtagcagaagttgagcaaagctttcacatatttgagaagaaataaaaagataaatcttgaatgaatgagtgagattccttaggcctgcagaaagtcacgaaggtgatggagagaagttaggacgggggtctctggccagtccgcatgccaacactgggtattattattgagtctgcacacccaaaaatgatcggcataggttggcttcttctaaattcagtcccacctcttaggagtagagttgtccatgtggaaatatcacacttccttcctttaatttcctttttataactcatcatacattcagtttcattatccatccttctcagtgctaaatacattatctagttcacacagttgagttcctttgggtttagaggattgaagaccatatgtacccgaatctaaacctgcttgtttggacatgaatggtcaggtctggtgtcccttggctgccccaggatagggcttgatgacctgctccttgagagccaggttaagtgtcagttctgagtttggtaaagggtgagagaacccagagcgaagctgccttggatggaaatgtcagccccctctctctgaccaggggcttgaccttgagcaagatcctgacctgagctaagactcctggtcctctctgtaaaaccgggatcatggtgcctgtggtccagggctgccaagaggagtaaatgagagaatgtaggtaaagggcttggcacacaacagccgctacatggatacaaactgcccygtgtccctgacccctgtgcccctcacccctgtgtccctgacctgacttggtacccacaacattggataaataccagagcatgtgtaatttctagttctgctgtttcaaggctgttatcactcaggacagctcagtaacttcttaggcctcggtcttctcattggtaaaatgggaattaaacactcactgacagaaccagtattggcaccaaaaggatgtcaatatggtttggtcattaagacgtaattcacataccataaaattcacccttttaatgtgcatgattcgcgggttttagtaccttcacacattgtgcaattatca

SEQ ID NO: 720526 - DNA, 1310 bp, Homo sapiens
atgggtttatcgttcccttcttttcttctccttcgtagttccctctttccttgttttctctttcttccaccatctggcgtatgtttacaatgtatctgtcatcagactgtgaggtccctgaaatccttcaggtgcctrccacagagttgacgtgcaaatgaatgtttctttattttttaattaattaatttttttttttttgagacggagttttgctcttgtcgcccaggctggagtgcaatggtgtgatcttaactcactgcaaacctccgccttctgggttctaccgattctcctgcctcagcctccaaagtagctgggattacaggcgtgtgccaccgtgcccaactaatttttgtatttttagtacagacaggatttcactatgttggctaggctggtctcgaactcctgacctcaggtgatccacccgcctcggcctcctagagtgctgggattaccgtggtgagctgctgcgcctggccaaatgaacatttcttaatttgtcttagtatctgtctttcaaagaagtaggtactgcccgtcattagcttgaaaattgtcagattttgtttgtgattgtctgtcctaacttaggtggtttatcttgaagatcttaggtaatttagcctcatagatttagatagatcgagaaatggcaggcttcaatcactgaatagtacagaatgttgggcaataagatggatttggaccattcaagggagcacttatgtcaggcttttagcatatctgctgcatagtttttagagctggaaggtctgagatcatctgggttggacccttcatttttggtggtgaggaacccactcctgagagagaaaggtgcttcttcggtgcccgcctccaggccaggacttgcctcctcctcctctgtgtccttagctgagtgagagttgggatggcggagagcagaggcaatgtgaccgcatagctgctgcgattaactgcctgcctctagacatgttggagaaacagtcaaagtaatcatccttctgcgctccccctcccatggaaacaaatgatagaaggttagggcagttttgagggcaagcggcagacttcctcactgtgaaagtcgggaagctttggttgtgccctagaccctgtccttttggccttggcaccaccaagtgggctgctttaggtgtccatcctgatggtgtttaaccctgcttgaggcttttgaggacactaagaaacacatggtgaaggtgtggaaggattttttgtcattcctcaatgaagatctgccctaggtagaaagggagttaatgaaggaaaagtcggca

SEQ ID NO: 720527 - DNA, 1310 bp, Homo sapiens
atgggtttatcgttcccttcttttcttctccttcgtagttccctctttccttgttttctctttcttccaccatctggcgtatgtttacaatgtatctgtcatcagactgtgaggtccctgaaatccttcaggtgcctaccacagagttgacgtgcaaatgaatgtttctttattttttaattaattwatttttttttttttgagacggagttttgctcttgtcgcccaggctggagtgcaatggtgtgatcttaactcactgcaaacctccgccttctgggttctaccgattctcctgcctcagcctccaaagtagctgggattacaggcgtgtgccaccgtgcccaactaatttttgtatttttagtacagacaggatttcactatgttggctaggctggtctcgaactcctgacctcaggtgatccacccgcctcggcctcctagagtgctgggattaccgtggtgagctgctgcgcctggccaaatgaacatttcttaatttgtcttagtatctgtctttcaaagaagtaggtactgcccgtcattagcttgaaaattgtcagattttgtttgtgattgtctgtcctaacttaggtggtttatcttgaagatcttaggtaatttagcctcatagatttagatagatcgagaaatggcaggcttcaatcactgaatagtacagaatgttgggcaataagatggatttggaccattcaagggagcacttatgtcaggcttttagcatatctgctgcatagtttttagagctggaaggtctgagatcatctgggttggacccttcatttttggtggtgaggaacccactcctgagagagaaaggtgcttcttcggtgcccgcctccaggccaggacttgcctcctcctcctctgtgtccttagctgagtgagagttgggatggcggagagcagaggcaatgtgaccgcatagctgctgcgattaactgcctgcctctagacatgttggagaaacagtcaaagtaatcatccttctgcgctccccctcccatggaaacaaatgatagaaggttagggcagttttgagggcaagcggcagacttcctcactgtgaaagtcgggaagctttggttgtgccctagaccctgtccttttggccttggcaccaccaagtgggctgctttaggtgtccatcctgatggtgtttaaccctgcttgaggcttttgaggacactaagaaacacatggtgaaggtgtggaaggattttttgtcattcctcaatgaagatctgccctaggtagaaagggagttaatgaaggaaaagtcggca

SEQ ID NO: 720528 - DNA, 1040 bp, Homo sapiens
agcgaaaaaggctgtaccttcttgttcatctttgttcggatagaggaaggtttcccatcaaaaccattgtcctcccaactcacactggtcttactttctgaaattccttcaaggctgatttttgagccagtgactaacaagaatgaaattggattcatcaggcccatttctaatgagcccctgatgagttgaatgtggactcagatttttctgagtggcatgggagtacggcaatagaggtgggggtaagggaggagtacctaaataaaactggagttctgtttgaactggcgaagaacgaataaatgckgaataaacatccaaccatgttcacaatgtgaataaatgaagaacatattctttagagcagtttttattttcattctttaggttaactccagtaatgttcaaacaaccaggatttccaatatcaagtttcaaagaatgataaaaagctagtcagtgtgtctctggtaacttgggctaccttttacaattttcatatatataattctaactacatttggtaaaaatagggtatcaatgtattacaataaactacaactgctggtgagcttaagggactgctagataaacaccattaaagtgattgattatggatttagttgaattgacccaattcagtaacagtgtagcatatctgtatacatcaaatcaaatcattagaactataaactatatgtgcagttttatgaatgcttcaaaatattggttagcaatatttttatattccagataaaagtatgccacctagtaaggaaatacactgagggtgatacaaaataatagctacaattatttgagtcagaaacagtaccacacctctcttaaataatttttctgatgacaaacatttaccatttttttaataggatacatgttgtccatgactatatgtattaatagcacattttgatggaatcttgttaatttctattagacatgatgttttaaatttaaaaatataatttaagtcacatctcctatcttaatcccataagtggttagtgaaatacata

SEQ ID NO: 720529 - DNA, 1040 bp, Homo sapiens
agcgaaaaaggctgtaccttcttgttcatctttgttcggatagaggaaggtttcccatcaaaaccattgtcctcccaactcacactggtcttactttctgaaattccttcaaggctgatttttgagccagtgactaacaagaatgaaattggattcatcaggcccatttctaatgagcccctgatgagttgaatgtggactcagatttttctgagtggcatgggagtacggcaatagaggtgggggtaagggaggagtacctaaataaaactggagttctgtttgaactggcgaagaacgaataaatgcggaataaacatccaaccatgttcacaatgtgaataaatgaagaacatattctttagagcagtttttattttcattctttaggttaactccagtaatgttcaaacaaccaggatttccaatatcaagtttcaaagaatgataaaaagctagtcagtgtgtctctggtaacttgggctaccttttacaattttcatatatataattctaactacatttggtaaaaatagggtatcaatgtattacaataaactacaactgctggtgagcttaagggactgctagataaacaccattaaagtgattgattatggatttagttgaattgacccaattcagtaacagtgtagcatatctgtatacatcaaatcaaatcawtagaactataaactatatgtgcagttttatgaatgcttcaaaatattggttagcaatatttttatattccagataaaagtatgccacctagtaaggaaatacactgagggtgatacaaaataatagctacaattatttgagtcagaaacagtaccacacctctcttaaataatttttctgatgacaaacatttaccatttttttaataggatacatgttgtccatgactatatgtattaatagcacattttgatggaatcttgttaatttctattagacatgatgttttaaatttaaaaatataatttaagtcacatctcctatcttaatcccataagtggttagtgaaatacata

SEQ ID NO: 720530 - DNA, 1040 bp, Homo sapiens
agcgaaaaaggctgtaccttcttgttcatctttgttcggatagaggaaggtttcccatcaaaaccattgtcctcccaactcacactggtcttactttctgaaattccttcaaggctgatttttgagccagtgactaacaagaatgaaattggattcatcaggcccatttctaatgagcccctgatgagttgaatgtggactcagatttttctgagtggcatgggagtacggcaatagaggtgggggtaagggaggagtacctaaataaaactggagttctgtttgaactggcgaagaacgaataaatgcggaataaacatccaaccatgttcacaatgtgaataaatgaagaacatattctttagagcagtttttattttcattctttaggttaactccagtaatgttcaaacaaccaggatttccaatatcaagtttcaaagaatgataaaaagctagtcagtgtgtctctggtaacttgggctaccttttacaattttcatatatataattctaactacatttggtaaaaatagggtatcaatgtattacaataaactacaactgctggtgagcttaagggactgctagataaacaccattaaagtgattgattatggatttagttgaattgacccaattcagtaacagtgtagcatatctgtatacatcaaatcaaatcattagaactataaactatatgtgcagttttatgaatgcttcaaaatattggttagcaatatttttatattccagataaaagtatgccacctagtaaggaaatacactgagggtgatacaaaataatagctacaattatttgagtcagaaacagtaccacacctctcttaaataatttttctgatgacaaacatttaccatttttttaataggatacatgttgtccatgactayatgtattaatagcacattttgatggaatcttgttaatttctattagacatgatgttttaaatttaaaaatataatttaagtcacatctcctatcttaatcccataagtggttagtgaaatacata

SEQ ID NO: 720531 - DNA, 1453 bp, Homo sapiens
ccctcatctctgttattcagcaattttgttgaaattgccaaggaagggagtgttaaattatcagctttaggcagctgccctccctactggcttcatagcaaggtaatatgtatcctcagttatagcaaatcatattctgggtctataaagtgagttaaaatgctgcacagaacaaccagtttaaattacagttatggttcattaaaatgggctctattactcatctaaatcaatttggctgcacaaacagatgccatctatgatgtatacgttttcttttcactcttttttttaaaagacttttcttggggaattaagcagaggtatttttaatacttggtattgagtttcttaggcagtagaaactgggccactgatcaacaaaataatgtcaccaaattctttacattgaatgcttcattgcttttgataactttgtccttgcaataacaaatctgacctcattatttacctaaaatcctggtctcttttctaagaccaagcaaaggtaaataatagcccccagtgaggcagagatgactaattgcctccttctctggtatcataattcccttctttctgaatcgttagaactatcccacactcaaccagagttcaaactgggcaggtggctgtccagctagaaattatgttttccagcatcccctggagccaagggtctttttttggatttagtgaatgtgatgtaaacaaaaataatttggccacttccagttcttggcctgaaaatattgaacatgtagacttctgtctctctttctgctctctgaaggccagaatacagatgtggcaacctctaggcatcatctaaggtcacactatacttggcagtgtgacgagatacaggaacttaagtttctgaacaacagaatataggcagagccttcccagcaccatgggctcttcgtgagaaataaataaatttctatcttaattaagccaccgtatttgggggaatatttttgttgtagcaacttaaaatttacctttacatatacagcctgctgctcaattgctacctcgaatagtaatttcagtttagttcataaaaactgtagtttttgtagggacaaaatgtaattattagttaacacaacattggattgagacatatgggaacagaactaagacacaggagaccatggctcaagttcagctctgcaacctgtgtgaacttgagttaattctatatagcatgataaatattttagaaaaaattactgtggcagtcggagttctgtaagtaggaaaggggaggcgggaagaataacacagacttggggtacgaagaggatcctgtagggaattaggcagtgctggtcattgaaatgcaaattattacatatataaaaatagtcataaattgatcacactcttgaaaatagtttacagagctgtcacactctayaaggttaagtcataaaatatctaa

SEQ ID NO: 720532 - DNA, 2128 bp, Homo sapiens
cataatgagatacaaccaagaatgtacattgccagtttataatagccaaatttgagaaatgaataaattatggtatatatataaaatagaataaatgaagcctttgaaatgtatgatctgaatgtatcaagttggaaacataatattgaaaggagaaaagtgatatgcacagtaagatgctatgtatatgaattttttaatacaaaaatatagacataatgcatgctattgtacacaaatacacatattttgcaagatattaggtctttctgtaaagagattggcaataatgattggattaagtgtggcttttaactatattagtaaaattttacttctcttaatttctaccccaaaaatgatctaaagaaacaaaatgacaaaatagtaatgtacattacattttagtgataagaaagtcttagtatctaaactctttggatgtttgcaatgtttcataattttctaaaataataagttatactggatgtgctcaagagatatagataggaaagatagccacattttactggaaattaaatttttggccttcccaaggaagactttcaaaacaaccttatatgaatgaattgagctgattgaaaagttactggctgggcacagtggctcacatctgggaggtggatgctggtggattgcttgagctcaggagtttcagaccagcctaggcaacgtggtgaaaccacatctctaacattgccacttttgaaaacagtctggcagtttctctaaaagctaaagctagagtatgatccagtaatatcactcctagatatatacccaataaaattaaaaacatatgtacacacaataattgtatacaaatatggaaacattatttaaatatccaaaaagtggaaacaacccaaatatccatcaactgatgaatagataaaaagttgtggtatatacatataatagaatactattcagcaataaaaaagattgaacttctgacatatgatacattgtagatgaacctcagatcatgccaagtaaaataagccagatacaagagaccacatattgtatgattccatctatataaaatgtccataaaaagcatgctaatcaagacagagtgtagattaatggttgccttggaatgggcatgagaaaaagattaaatgttaataggcatgagggatattatttaaaggataaaattgttctaaaatttagttatggtgatgtctgacccactcattaaagttaataaaaatcattgacttgtatacatgaaattacggatgatttttataatatgtagactattcctcaataaagctgttttaaacaataaaaataaatttaaaaaaaataccaaaaaagaaaaagccaggtgtgatggcatgtgcctgtggttccagctactcaggaggctgaggtgggaggattacttgagtccaggaggttgaggctgcagtgagccatgatcatgtcactacactctagcctgtatgacagagagagaccctgtctaaaaaacaaaaacaaaaacaaaaaaraagttactgaatgtcctgtgacttgaaatgttgactaggttaaagcaatgtttcccctagtgtgctcctgcaaacaccagttttatatgatttttaaagtattatctgaaaaaggattgcatggccaaataaattgaaaaaactttgggtaagcagataataatacattgtattgttcaagagatctcagtttttgatgtgctatatattgtgcattttcaagaaaaaagcagagcatatagaatgtgcagaattaattgatcatgaggctttgttgtgtgtttgtgatgtctttggaagttttcccaccgaacatatgttgaggcttatgaaacttgaggattacttgtcagggaatgaatagagagaatttcaacaaaggatgtgtaagaattaaagaaaaaggagagaaacacgaaggatggcttttcagtcaacagggacaggtttattttaaataaacctgagacgggcagctggcacaccctcttacagattgtttttaaggatttagggtgggagagtttatcagaggcttggactgcttctgtgtctctttgttgtgcttatctgggagggagagttgtgtgtctgttccc

SEQ ID NO: 720533 - DNA, 2128 bp, Homo sapiens
cataatgagatacaaccaagaatgtacattgccagtttataatagccaaatttgagaaatgaataaattatggtatatatataaaatagaataaatgaagcctttgaaatgtatgatctgaatgtatcaagttggaaacataatattgaaaggagaaaagtgatatgcacagtaagatgctatgtatatgaattttttaatacaaaaatatagacataatgcatgctattgtacacaaatacacatattttgcaagatattaggtctttctgtaaagagattggcaataatgattggattaagtgtggcttttaactatattagtaaaattttacttctcttaatttctaccccaaaaatgatctaaagaaacaaaatgacaaaatagtaatgtacattacattttagtgataagaaagtcttagtatctaaactctttggatgtttgcaatgtttcataattttctaaaataataagttatactggatgtgctcaagagatatagataggaaagatagccacattttactggaaattaaatttttggccttcccaaggaagactttcaaaacaaccttatatgaatgaattgagctgattgaaaagttactggctgggcacagtggctcacatctgggaggtggatgctggtggattgcttgagctcaggagtttcagaccagcctaggcaacgtggtgaaaccacatctctaacattgccacttttgaaaacagtctggcagtttctctaaaagctaaagctagagtatgatccagtaatatcactcctagatatatacccaataaaattaaaaacatatgtacacacaataattgtatacaaatatggaaacattatttaaatatccaaaaagtggaaacaacccaaatatccatcaactgatgaatagataaaaagttgtggtatatacatataatagaatactattcagcaataaaaaagattgaacttctgacatatgatacattgtagatgaacctcagatcatgccaagtaaaataagccagatacaagagaccacatattgtatgattccatctatataaaatgtccataaaaagcatgctaatcaagacagagtgtagattaatggttgccttggaatgggcatgagaaaaagattaaatgttaataggcatgagggatattatttaaaggataaaattgttctaaaatttagttatggtgatgtctgacccactcattaaagttaataaaaatcattgacttgtatacatgaaattacggatgatttttataatatgtagactattcctcaataaagctgttttaaacaataaaaataaatttaaaaaaaataccaaaaaagaaaaagccaggtgtgatggcatgtgcctgtggttccagctactcaggaggctgaggtgggaggattacttgagtccaggaggttgaggctgcagtgagccatgatcatgtcactacactctagcctgtatgacagagagagaccctgtctaaaaaacaaaaacaaaaacaaaaaagaagttactgaatgtcctgtgacttgaaatgttgactaggttaaagcaatgtttcccctagtgtgctcctgcaaacaccagttttatatgatttttaaagtattatctgaaaaaggattgcatggccaaataaattgaaaaaactttgggtaagcagataataatacattgtattgttcaagagatctcagtttttgatgtgctayatattgtgcattttcaagaaaaaagcagagcatatagaatgtgcagaattaattgatcatgaggctttgttgtgtgtttgtgatgtctttggaagttttcccaccgaacatatgttgaggcttatgaaacttgaggattacttgtcagggaatgaatagagagaatttcaacaaaggatgtgtaagaattaaagaaaaaggagagaaacacgaaggatggcttttcagtcaacagggacaggtttattttaaataaacctgagacgggcagctggcacaccctcttacagattgtttttaaggatttagggtgggagagtttatcagaggcttggactgcttctgtgtctctttgttgtgcttatctgggagggagagttgtgtgtctgttccc

SEQ ID NO: 720534 - DNA, 630 bp, Homo sapiens
tagtkcttttagatgaatagcacctccaaattttaatgttctcaaatttattgatttatgaagttgtttgtgtttgaggacaagtaaaacacttcaaaaaactaaaagttttcctcctaagataaggaaaaagacaaggatgtgtactctcagcattcttaacatacctctgaaaattctagtgagtacaataatgcaagaaaatgaaataaaaggcatacaaactggaatataataagtaaaactgtctttatttgtaggtgacaagactgcctacatagaaaattgaaatgaatctaccaaaaaaaatcctcaaaataatatgtgagttcagccaagtcacaagatacaagaaaaataaatatacaaattatttttatttttatatgttagcaatgaccctgtgaaagtcaaaatttaaaataaaataccattttcaatatctaaaaatatgcaatagctgtcaacaacatagacaggacttatatgctgaaaactgtaaaacacagatcaaagaaatcaaagaggatctaaataaatgtggagacagactatgtttatagattgaaaaagtcaaaataataaagattttacttttccccagatggaaaaatttttagcacaattgtt

SEQ ID NO: 720535 - DNA, 2977 bp, Homo sapiens
acctatttatctaatttttactttaaaatgtttgtctacatttcacttctaattaaatagcaaaatactataataaaaattatgttcaagttttatttataactaaatgtacttgaaaatattctatactttctctctatatatatttttacaataagcccattatggattgaatcgtgtctccgcaaagaggtatgctgaaatcctaacctctagcacctgtgattgtgactatttggaaatggggttttgtggatgtaatcaggttatgatgaagatattaaagtgggccttaatgtaatctgactggtgtccttttaagaatagaagtcaaagagggtcagaggggagattgccatgcgaagacagggcagagattggagttaggctgccacaagcccagaaatgtccaaggttaccagaagctgggagagagaaagaatgattctcccccagaggtttctgagggagcctggccctccattgattgattgtagacttccattatctagaactgtgagagagtaaatttctactgttttaagctactcagtttgtgataatttttatagtaggaaaaaaagaacctttaataatttttaaaaatctgttaacagtaactatatctgggttcctttggtatggtagttctcagcctatgcctataaaaaaaatctcagtcagaatctttttttataacaaatattttataactccctttttactaccctaaaatgaaaatcatacataatgtaacttacgtacgtaatttccaaaataccgatattataccatgattgtaagctaatcaatatacaatattaatttttaataaaacaatatatatttcaatctaaatgttttgacaagacttcattagaagacatagtgaaagagtccattgtttgcacctacatatagaatcaccttgagtgaagcacataggttcacacaggttttgttttgattgttttgtactaacaaatctaataccccaagcagtgttactgtttgtattacaattttctgaaataattaacaattttgttgatttccaactaagtgcaatcactccttactttttttttttggggtaactgcatcttttacttgatgaaaccagcaaaattatcaaacctctgattagttgtcactttctcccttgaaatcattaacattgagtcacaattattcctttcttgtattcccttatatgtgagtctgtccatttttatacatggatacatattgtaaaggtacagcctgatgctgaaaatgctctggtaaaaaggtatccagggcattttgttcagtaatagtgagatcccacttttgcaaatatggcagacccctgttaggtatgtgagatgtgtaggaagcaggcctctgccctggggagctttaaattgataatattgacaagggggtattctgtgaatttgcattataagtgtagaagtcttctgggaagaaaataaccaatcttctttgacgccatttccctaggatttagcatgagagtgattcatgataaatgggtggttgggtggtcctggccaaagccattggtaggaaaaggccatggaacattaaagattaagtaaccacaaacacagagaaaaacaaaatcagtgtgctaaacatggcattgaattagagagaaagacagctgaatagtgtttcgaatggagcaaatacctcacattactctccttcagaccctcccaagttcattttatgccctgggaaatagtagtgtttgtgaactccatagtgatttggtaatttagcaatctccaaaagctgtgatacatgaggccctttgtgtaaaaggattgccctgatgtctagcaggatgtgtctatcacagcctgaatctcggtaaaggaactgagaaaatcttgacttttcgagtccagaacctggttccattttcagggatcactcttcatcagagtaaaccaaacccttttgaaaaactgtcggcaccattgtattatgctactggtaacaccagtggtcaggatttgagcaatgggtcaagaacaacttccgtacaggatacagtcacctctctgtagttaaaccaaatgagagagacatttctccctatcctgattattgataactacacaggcaggggtgggtggaggtttcagtacatataaagaggataagaaataaactctggaaaggttaagatttccagctagtatcaaatggtgggatccctgggacttgatcagtccctgttttggttgttaaattatcaatatccctatttatttaaatttttaaattctagttcccttcttttgccttttgtttattcccattttttacattcttttgtataaaaaagatgtttaattttgttttagtctatatagtactcaaacttccccattcctctctttttaattattttaacatctgcgtaactttgacattttagcagccaacaacagtgtgctaaactttgaagtaayagtaataatagctaatacttagtgagcacttagtatggaagggtgctatggtgagtccttcacataagccatctcatttaatcctcataaaaatgaagaagatgagacttagagttttaaacttgctcttagcaacagttggtagtgaaaccggtattaaactcagatatattcaattctgaaatcatacttataatcatttatattgtactgctgacttaagcttaaaaatctaatagaaagaatgagaatgaagttggagaacagagttctagtcctaaatctactattatttaactctgtttctttaatgttttcatcaaaagacgggatgccatgattttcaaacgatgttcaggaaaatcctagaatttgtacagttctctgggatggagaattaaacaggctgacacaaactgacacagtgaagctccacgactttaaactactttgcatattaggatttcaaataagattttgttctattc

SEQ ID NO: 720536 - DNA, 659 bp, Homo sapiens
caatcccaatggtaagacatcttttaaaaatgattagactagaaatggacattataccttcagtatatctgtgttatttctttaaaaacctatcaaaagattgtgttatttatatatatacatatatgagatggagtcttgctctgttgcccaggctggagtgcagtggtgtaatctcagctcactgcaacccccacctcctgggttcaagcgattctcatgcctcagcctcccgagtagctgggactacaggcaaatgccaccatgcttagytaattttttgtgtttttagtagagacagggtttcaccatgttgcccaggctggtctcaaactcctgacctcaggtgatccacccacctcggcctcccaaagtgctgggatgggataacaggcaggaaccactgcacccagccttaatcattattttttttaaaacaacatagcaacatgtcactaatctagagataacatatgacaccaactacaaagaacagagttaggaaccagcataaaaagacctctaaaccaagtaaaagaggttttgaaagttttttgaaacagaaagtattggtttacatgattaaaaacgacaacaataaatagcaaatctttaacgcattattctactaagtttagctacacagctatcatatttat

SEQ ID NO: 720537 - DNA, 659 bp, Homo sapiens
caatcccaatggtaagacatcttttaaaaatgattagactagaaatggacattataccttcagtatatctgtgttatttctttaaaaacctatcaaaagattgtgttatttatatatatacatatatgagatggagtcttgctctgttgcccaggctggagtgcagtggtgtaatctcagctcactgcaacccccacctcctgggttcaagcgattctcatgcctcagcctcccgagtagctgggactacaggcaaatgccaccatgcttagttaattttttgtgtttttagtagagacagggtttcaccatgttgcccaggctggtctcaaactcctgacctcaggtgatccacccacctcggcctcccaaagtgctgggatrggataacaggcaggaaccactgcacccagccttaatcattattttttttaaaacaacatagcaacatgtcactaatctagagataacatatgacaccaactacaaagaacagagttaggaaccagcataaaaagacctctaaaccaagtaaaagaggttttgaaagttttttgaaacagaaagtattggtttacatgattaaaaacgacaacaataaatagcaaatctttaacgcattattctactaagtttagctacacagctatcatatttat

SEQ ID NO: 720538 - DNA, 659 bp, Homo sapiens
caatcccaatggtaagacatcttttaaaaatgattagactagaaatggacattataccttcagtatatctgtgttatttctttaaaaacctatcaaaagattgtgttatttatatatatacatatatgagatggagtcttgctctgttgcccaggctggagtgcagtggtgtaatctcagctcactgcaacccccacctcctgggttcaagcgattctcatgcctcagcctcccgagtagctgggactacaggcaaatgccaccatgcttagttaattttttgtgtttttagtagagacagggtttcaccatgttgcccaggctggtctcaaactcctgacctcaggtgatccacccacctcggcctcccaaagtgctgggatgggataacaggcaggaaccactgcacccagccttaatcattattttttttaaaacaacatagcaacatgtcactaatctagagataacatatgacaccaactacaaagaacagagttaggaaccagcataaaaagacctctaaaccaagtaaaagaggttttgaaagttttttgaaacagaaagtattggtttacatgattaaaaacgacaacaataaawagcaaatctttaacgcattattctactaagtttagctacacagctatcatatttat

SEQ ID NO: 720539 - DNA, 651 bp, Homo sapiens
tcccactatgacgagaaaagctggacaaaacacaaaatcttcattttcttgagcccatcagagagtggaggtcacaaggcgcccaagtgatctgacttccamagagggatgacaatcccttcccacggtatataggactcatggaggagatccctcccttagtggtgatcctaagcacagagacttccagttgctgaggtagcccacgacccagaaaacaagctacctgtatagccaacccaggtccctggccttcctcttcaccataacaggaaagaattaaagtagatatctatcaacagaattctcacttaagctgaaggaattcactgttcaatctggaacagaatttctccctcttggcaccacttggacccatttgggccaaattcattgtggtggaggaccgtcctgtgcattgcagaacatttagcagcatccctggcctctacctactagagaatgcatccacggagatatggtttggctgtgtctccatgcaaacttcatcttgaattgtagctcctatactataattcccacatgttgtgggagggaccagtgggagataactgaatcatggaggcaggtctttcccatgctattctcacgatagcaaataagtctcacaagatctgatggttttataaa

SEQ ID NO: 720540 - DNA, 883 bp, Homo sapiens
taaggttgtacttctgttcccgctagatgaaagtaagctgcttctagtgttctctgctgaatgggaaaaaataacatttggcaaaggaatagctgtatcccaggtgccagggggctatgttgatttgctgtaggaaaacagcatcatctggaatagcagcttcagttcgaatcacagcctgattaattctacaattacccactactaatctccagactagccagatgggttaaataaagatgtgatatgagtaactattcccgtatcttttagggtaccctgttctcactgccagagaaatcgaaattgttcctttcatggaaacccatcttagcttctctgcactctagcctggggagwggagagaatttgaatagcaagtgatttttggcacctgcattccctttgtggcttccccatttattttttgtttaaaatacactttgtttcacagttcattaacttctgtaaatcttataactacaaacttgtgaaaataaatgcctactattacagaagagtttctatctcaatttcatcatgatgagtcaaagtgactatgcatctaacttatttgctatgaaaagaaaatttgaaaagaaaactctggatcatagacaggcaggggaaacagcttcaaatgtgtgtgagagtcagtaatgaggaaaaggactgcaccttcctatatctcccacctcccacccacctcttgatttaataaatctaagaagtatgtgaattaaaggcctggagtgccatggcacaagttcagataggggaacactctttttcctctataggcatccataaacgacttctctatgagttaaaatcatctaattttcatgtggaatatgaaatttgactttattattatcagtga

SEQ ID NO: 720541 - DNA, 585 bp, Homo sapiens
atcaaaagaccttgttaaaaataaataggcaagacactgactcaaacatattatttgagattttatatgtatatgtatgtatatatttttaaaatctcaacatattcatgtatatgacaaaaagcttttattragaatataaaaataatctctatgaatcaataataaaacatcctttttccccagaaaaaaaattaatgaaagcagaagatttgaacaaacaaaacgtataaggacatgtagaaaagacaaataagcacatgaataggtgtttagcatgagtgcaccaggttgaatagcatcactccaaaattctagaactgcagactgtgacctaatttggaaaaacagttttgtggatttaatcagctaggttaagatgaagccattttggataagacaggccccaaatccaaaatgactggcatccttataagaagggagaagagtaagggaagaagagaaggccacatgaccacaggggcagagacagaaggctccatcttcaagatgaaggaaggccagggttgccatcagctgccagacagcagaacaaaggcacagaacctcgtcttccttggagcc

SEQ ID NO: 720542 - DNA, 1815 bp, Homo sapiens
tgcatgccagtgcttctcagcagaaaccgaaacagtgagtactagttagcatcagggcaagcttttcaaaaccctgcctcctgatgagataagatccaaaattacaactacaaaaacacaaacaaactgagacctggaaagccagtttccactgtccatgaactgaggcagaagaacagacccctgtgcttcccatgagctgaccattacctgttccagccaggctgacttctttcccctagggccacctggagaagtcagtgtagtggtcagctcatagggaagcacatttcctctgagcctttagaggcctctatgccctgacctctcaattcattctaccctgacccacacctcatagggttatttattactagactagaaattgtagctaaaccaatagctcaattagaactttgcaatcaatttctgtgtgcctaggagtttaattccataggctagtcatacgaaggaaaaaagacagtcatccaaaactctttcattcatccatttaaaacatttattaagtacatgctgtgtgccaagctccaggctaaaccctaaatataaaggtgcataagagagtctttgttgttaaggtgctcaccatcttgggggaggaaggcacttaatagataatgataacatggtataatgacaaagttatacacaaaatgttaaaatgtttttagttttaggaatttggtctggaaagtaaaatattcagaacttaaagaaaaaaataccattcatcaataataactattttatcttctttattagctaattaatacatcagttgtaatagaaccataaaatgaagataagcaaaaagaaaaatattacctatattcttacctatattatttatttacattctaaatagctactgttaacacttagctgcatggccttctgcaactttaaatatatatctttttctaaacaagatataagaccattttatgcatggtatgataatatgagtttttcacttatcagttgatatggtttgtctgtgtccctacccattatcctaggtgaagtaactcagaaacagaaagtcaaacaccagggtcttgcttataagtgggtgctaacagcgtacacacatggacatacagagtggaataagagacaatggagattacaaaaggtgggagggtaggagcgggggacagttgaaaattacctcttgggtacaacgctcatcatttgggtgatgggtacagtaaaagcccagactttattaatgtgtaatatgtgcrtgtaagaaatccacccttgtatcctctaaatatataaaaattaaaaaaaaataacttgtctgtgtggggaaaatggtgtggagaaggtctctctctgttgccctgttgcccaggctacagtgcagtgatacaatcatagctcacagcagtctcaacctcctggactcaagcaatcctcccatctcagcctccagaataggtgggactacaggcaccagccaccatgcccagctagttttaatttttctttttcttttttttttttttagaaacagggtctcactatgctgcccagactggtcctgaattcctggtctcaagcgatccaactgccttgtcttccaaaagtgctggaaggacttggggcagagcaaggtgacagatagaaggctccactgaccatccactcagcaagcccaccaatttaacatctacaccagcagcattggcgtcagtcactgcacctggctgggattacaggtgtgagtcactgcacctggccaatttatcattttaaatgattgcccagcattctactattgatacc

SEQ ID NO: 720543 - DNA, 1815 bp, Homo sapiens
tgcatgccagtgcttctcagcagaaaccgaaacagtgagtactagttagcatcagggcaagcttttcaaaaccctgcctcctgatgagataagatccaaaattacaactacaaaaacacaaacaaactgagacctggaaagccagtttccactgtccatgaactgaggcagaagaacagacccctgtgcttcccatgagctgaccattacctgttccagccaggctgacttctttcccctagggccacctggagaagtcagtgtagtggtcagctcatagggaagcacatttcctctgagcctttagaggcctctatgccctgacctctcaattcattctaccctgacccacacctcatagggttatttattactagactagaaattgtagctaaaccaatagctcaattagaactttgcaatcaatttctgtgtgcctaggagtttaattccataggctagtcatacgaaggaaaaaagacagtcatccaaaactctttcattcatccatttaaaacatttattaagtacatgctgtgtgccaagctccaggctaaaccctaaatataaaggtgcataagagagtctttgttgttaaggtgctcaccatcttgggggaggaaggcacttaatagataatgataacatggtataatgacaaagttatacacaaaatgttaaaatgtttttagttttaggaatttggtctggaaagtaaaatattcagaacttaaagaaaaaaataccattcatcaataataactattttatcttctttattagctaattaatacatcagttgtaatagaaccataaaatgaagataagcaaaaagaaaaatattacctatattcttacctatattatttatttacattctaaatagctactgttaacacttagctgcatggccttctgcaactttaaatatatatctttttctaaacaagatataagaccattttatgcatggtatgataatatgagtttttcacttatcagttgatatggtttgtctgtgtccctacccattatcctaggtgaagtaactcagaaacagaaagtcaaacaccagggtcttgcttataagtgggtgctaacagcgtacacacatggacatacagagtggaataagagacaatggagattacaaaaggtgggagggtaggagcgggggacagttgaaaattacctcttgggtacaacgctcatcatttgggtgatgggtacagtaaaagcccagactttattaatgtgtaatatgtgcgtgtaagaaatccacmcttgtatcctctaaatatataaaaattaaaaaaaaataacttgtctgtgtggggaaaatggtgtggagaaggtctctctctgttgccctgttgcccaggctacagtgcagtgatacaatcatagctcacagcagtctcaacctcctggactcaagcaatcctcccatctcagcctccagaataggtgggactacaggcaccagccaccatgcccagctagttttaatttttctttttcttttttttttttttagaaacagggtctcactatgctgcccagactggtcctgaattcctggtctcaagcgatccaactgccttgtcttccaaaagtgctggaaggacttggggcagagcaaggtgacagatagaaggctccactgaccatccactcagcaagcccaccaatttaacatctacaccagcagcattggcgtcagtcactgcacctggctgggattacaggtgtgagtcactgcacctggccaatttatcattttaaatgattgcccagcattctactattgatacc

SEQ ID NO: 720544 - DNA, 1815 bp, Homo sapiens
tgcatgccagtgcttctcagcagaaaccgaaacagtgagtactagttagcatcagggcaagcttttcaaaaccctgcctcctgatgagataagatccaaaattacaactacaaaaacacaaacaaactgagacctggaaagccagtttccactgtccatgaactgaggcagaagaacagacccctgtgcttcccatgagctgaccattacctgttccagccaggctgacttctttcccctagggccacctggagaagtcagtgtagtggtcagctcatagggaagcacatttcctctgagcctttagaggcctctatgccctgacctctcaattcattctaccctgacccacacctcatagggttatttattactagactagaaattgtagctaaaccaatagctcaattagaactttgcaatcaatttctgtgtgcctaggagtttaattccataggctagtcatacgaaggaaaaaagacagtcatccaaaactctttcattcatccatttaaaacatttattaagtacatgctgtgtgccaagctccaggctaaaccctaaatataaaggtgcataagagagtctttgttgttaaggtgctcaccatcttgggggaggaaggcacttaatagataatgataacatggtataatgacaaagttatacacaaaatgttaaaatgtttttagttttaggaatttggtctggaaagtaaaatattcagaacttaaagaaaaaaataccattcatcaataataactattttatcttctttattagctaattaatacatcagttgtaatagaaccataaaatgaagataagcaaaaagaaaaatattacctatattcttacctatattatttatttacattctaaatagctactgttaacacttagctgcatggccttctgcaactttaaatatatatctttttctaaacaagatataagaccattttatgcatggtatgataatatgagtttttcacttatcagttgatatggtttgtctgtgtccctacccattatcctaggtgaagtaactcagaaacagaaagtcaaacaccagggtcttgcttataagtgggtgctaacagcgtacacacatggacatacagagtggaataagagacaatggagattacaaaaggtgggagggtaggagcgggggacagttgaaaattacctcttgggtacaacgctcatcatttgggtgatgggtacagtaaaagcccagactttattaatgtgtaatatgtgcgtgtaagaaatccacccttgtatcctctaaatatataaaaattaaaaaaaaataacttgtctgtgtggggaaaatggtgtggagaaggtctctctctgttgccctgttgcccaggctacagtgcagtgatacaatcatagctcacagcagtctcaacctcctggactcaagcaatcctcccatctcagcctccagaataggtgggactacaggcaccagccaccatgcccagctarttttaatttttctttttcttttttttttttttagaaacagggtctcactatgctgcccagactggtcctgaattcctggtctcaagcgatccaactgccttgtcttccaaaagtgctggaaggacttggggcagagcaaggtgacagatagaaggctccactgaccatccactcagcaagcccaccaatttaacatctacaccagcagcattggcgtcagtcactgcacctggctgggattacaggtgtgagtcactgcacctggccaatttatcattttaaatgattgcccagcattctactattgatacc

SEQ ID NO: 720545 - DNA, 1815 bp, Homo sapiens
tgcatgccagtgcttctcagcagaaaccgaaacagtgagtactagttagcatcagggcaagcttttcaaaaccctgcctcctgatgagataagatccaaaattacaactacaaaaacacaaacaaactgagacctggaaagccagtttccactgtccatgaactgaggcagaagaacagacccctgtgcttcccatgagctgaccattacctgttccagccaggctgacttctttcccctagggccacctggagaagtcagtgtagtggtcagctcatagggaagcacatttcctctgagcctttagaggcctctatgccctgacctctcaattcattctaccctgacccacacctcatagggttatttattactagactagaaattgtagctaaaccaatagctcaattagaactttgcaatcaatttctgtgtgcctaggagtttaattccataggctagtcatacgaaggaaaaaagacagtcatccaaaactctttcattcatccatttaaaacatttattaagtacatgctgtgtgccaagctccaggctaaaccctaaatataaaggtgcataagagagtctttgttgttaaggtgctcaccatcttgggggaggaaggcacttaatagataatgataacatggtataatgacaaagttatacacaaaatgttaaaatgtttttagttttaggaatttggtctggaaagtaaaatattcagaacttaaagaaaaaaataccattcatcaataataactattttatcttctttattagctaattaatacatcagttgtaatagaaccataaaatgaagataagcaaaaagaaaaatattacctatattcttacctatattatttatttacattctaaatagctactgttaacacttagctgcatggccttctgcaactttaaatatatatctttttctaaacaagatataagaccattttatgcatggtatgataatatgagtttttcacttatcagttgatatggtttgtctgtgtccctacccattatcctaggtgaagtaactcagaaacagaaagtcaaacaccagggtcttgcttataagtgggtgctaacagcgtacacacatggacatacagagtggaataagagacaatggagattacaaaaggtgggagggtaggagcgggggacagttgaaaattacctcttgggtacaacgctcatcatttgggtgatgggtacagtaaaagcccagactttattaatgtgtaatatgtgcgtgtaagaaatccacccttgtatcctctaaatatataaaaattaaaaaaaaataacttgtctgtgtggggaaaatggtgtggagaaggtctctctctgttgccctgttgcccaggctacagtgcagtgatacaatcatagctcacagcagtctcaacctcctggactcaagcaatcctcccatctcagcctccagaataggtgggactacaggcaccagccaccatgcccagctagttttaatttttctttttcttttttttttttttagaaacagggtctcactatgctgcccagactggtcctgaattcctggtctcaagcgatccaactgccttgtcttccaaaagtgctggaaggacttggggcagagcaaggtgrcagatagaaggctccactgaccatccactcagcaagcccaccaatttaacatctacaccagcagcattggcgtcagtcactgcacctggctgggattacaggtgtgagtcactgcacctggccaatttatcattttaaatgattgcccagcattctactattgatacc

SEQ ID NO: 720546 - DNA, 602 bp, Homo sapiens
taacaggtggtgagtggcrggtgagcaagcaaagcttcatctgtatttatagctgctacccatccctgacattaccgcctgggctccacctcctgtcagaacagtgaaggcattagattcatataggaaaatggaccctactgtgatctgcacatgcaagggatctaggttgtgcaatccttatgagaatctaatgcctgatgatctgtcactgtctctcccatcgcccccacatgggaccatctggttacaggaaaataagctcagggctcccactgattctacattatggtgagttgtatcattatttcattatatattaaaatgtaataataatagaaataaagtgcaaaataaatgtgcttgaatcatcctgaaaccatccccccaacagcccctcatctatggaaaaattgtcttccatgaaattggtccctggagctaaaaagtttggggactgctgctataagggatacaaaaattgaaggacacacagttctttcctcaaggaactcatagccccgtagattcagaatttgcaggtctatgctggctctgatgcccacatcccaggatgcttgatcccacagcagtctcatcat

SEQ ID NO: 720547 - DNA, 609 bp, Homo sapiens
tatcccagacatattctaattacagacagtatttgcagttatccaatattatctgacagataaaagctctaacagtggaattcctgggacaaaggatggacatatttaaagacatttgatacatactaatgtttacttatctaattatattttataaaaactagtttttctgtatgttttgccagccaatatatattttgtcaagttacaatgtacttggagttccaaagggcatttttctaagtgaactccaatttccatgatcaccaaatacacaaaagcaggagaaataaatccaggggtggcacaagctaaggcaaaaccaaaacaagcctgctcttacggcaaagtagttaagctgtcctcttaagctcactctagcagagttattgccgcttattcataagggcaccagcaacagctgttcacctggcctaccaagctctccaaaggaagatctccgtatgttgcsgggagaggcacgtgagctggttcttagtgagaagtgtccttgtttcccagttcgtgagtgatgggaagagaaaagctcagacccaagacgtatggaggagaagcctcttctttgttttacagggttcaaagggctca

SEQ ID NO: 720548 - DNA, 1892 bp, Homo sapiens
tataaacttagttgataaggcagtggtagggcttgagaggattgactccaattttgacagaagctctactgtgcataaaatgctatcaaacagcatcacatgctacagagactcttttgtgaaaggaaagtccattggtgcagcgaacttcaytgttgtcttattttaagaaattgtcatagccaccccagccttcagcaaccaccaccctgatcagtcagcagccatcaacatggaggcaagacccttcaccagcaaaaagattatgacttgctgaagactcagaggatcattagcagtttttttttatcagtaaagtatttttgattaagttatgagcattgttccttagccataatgctattgcacacttaatagactacagtatagtataaatacaacttttatatgcactggaaaatcaaaaagttcatgtgacttgctttattgtgatacttgcttcattgcaatggtctggaactgaacctgcaatttcttcaacatatgcctgtaattctttatatatttctgtttcatttactcattatctcattcactatgggccaccctaaccatgcatggccacgtgccattatttccatgtcacagatgtgaagactgaggctgagggattaaacaacttgctgaagctcacacagccagtaaaagggcttaaaccctgtctggtaagtgcacatcacctctgtcctcagcccccagtactcagtggcctggcctactctgtcctgtcttcttcccacagacctgtcagcccagcctccgcagctgtagatccttacccaccatgtgggaggcaatggtccttaggacccagggatttcccctaaggtactttagctctgtcagtattgtgagtgggcaaaatgccagtgatcaaggctccatcttcccctcccatgtcctctagcaagccccctccttctccctcacctagcacagagccaatgcactcccagtaaattcagtgtttttccattccagtgagtgcagcctttactttgatttgggtgcaagcagctgcaggtgcctcaagtcatcatgtgctctctttccccctcgttccctgcaatgtcatccatgtttacttgctgctctggactttagattctgtcagcatgccagtcggtggggccgccaggcaccacagctgacagtcaaatctgtgatgccgaatccttcttctggaaaaaagggctaaagaggttaatacactcaagtcaggataaacacaccagctgttagagtttctaatatttaatatcattatcaaataaataactcaggaagaaatcacacacatacatacacacacaccacaaacacccacagccgctgcttcatttacagtggttaaaaaagaatattcataaattatcttaaaagcctccacaatggagtaatggttgggacacaattagggaacatttgcatatatgctgctgccggtccctgcccagagacatcctcccccaggtcagccctggagagagaaactgggggagcaggaggaaggaatatgagttcacaactataggcttccctcttgatctggtaagatctcagctcaggcaagctttgcttctgctttcaatggcagatttccctctgttaaaaaaacataccacacttctgtctacctacacaattcaagataaattcgttttgtttcaggaaaatatgtattcagacaaacaacattagtaatcagttttgtggataatggattatttaactgaccagtaaatagtgttttgttgttgtttactcttcaatctactttgtgtgtagatattagccagatcttgtagatctagccttctgattccctaaacactaatactaaggctgagcaggacagaattttaacagcc

SEQ ID NO: 720549 - DNA, 1938 bp, Homo sapiens
gaatagtactcttggaggtgggcaatgaaatgcaagtggaggcattaatggactggagtattttaccttatgctttagagagaaatttgacttttacaattatgcatattcattattttaagtaaaaggtaaagttcacggggttgacaaatgcattaactatggattgaaaaattagtttggcattcctgaactaaaaagttaagctatttcaacatctatttcttaattcttcttctgatatactttgttttgtccaacttttctcctattgctttagctgagacataataatctagaaaagagacaggttattttttcatttctttttaacagatggccctggattgatttgccaaagatccacccaggaatcctgactcattaaagaagggtggagattttctgagctaagcgagagayctttcctcagaggtcattttctcttcgacttcttctgaggcaactcctgcagccagcccccaaagacagaatcagataataggaattcaaaaacctaacttaactgtgagccatgttacaaggttcaagaccttcagcaacagccagttttactaagttactaatagtcaaggaggtaaaaaatgtttttctgttttgtcttttattgatgactaaatgagaattatcgatacctcattatgaagtttctttcttttcagaagtaaagtgcatatttagtcttttggatttttagtagttggcaaaaatttaagtgctgaacactgaagtaatttaccatgttatcatattgctctgtaatactataatacatccttttctgtgtgtagctgagactatatatttcctgaaaatagatactccagctctttcatctctgtgctacattttctagccacagaatgctgggaattataacatttaatatttttacacaaataataatgttaatggatggccataaatgaatgtcagaaaccccaaattcttgtcctcattttaatacagaattccaaatctgcattttcacaaagtccattcttggtaaaaggtgccctaagtgtatttactattatgacttttattgtgagagtttcaaacagcagtgcagttggggataggaagggaagaaacttatctgaggccaggtagaactgcttcactcctcacaaatcacactgcaacacttgtactctagcttaccccaactgatgatcaccactttctagcagaatcgcatatatgtagttatattcttacacatgctctgtcccatcaatcccaacttagtcccttcaataaaaggcactacagtagttgttttgctaaacatctgctatataaatatatatttattaaactttcaaattggcaagaaatttaaaaaccattaaatctaaccacttacctttttgaattaaataaacataacccactcagaaaattaaaataaatctctcaagtaaacaggggcagaattggcacttcaaatggatcccctgatttttagtgccaatctcattatagcccatggatatatttttttcctggacttaagtgaaatgcattttctctgttgataaacttgaaatcaaagcagaataaatgatttgtggattatattatcccatttatattgtacacataaaatgtcaattctggctgatgaaaaaagaagccaacatactagtaagttaataacagataacttccaaagagcaataagcaataattgtattcaagaaatgaaaatgaaatgataaataactacttttcattagaataaagacagcaattttcctattatatttaaaacatcaaaaaatcaaaaaattataaatttttaaaaatgtgttaaatccatgattaggtgaaatctggtttcaatagcaatagcaataacaatatttctgcaacaattaagagctggcagtccatacattcaagaatactccc

SEQ ID NO: 720550 - DNA, 1938 bp, Homo sapiens
gaatagtactcttggaggtgggcaatgaaatgcaagtggaggcattaatggactggagtattttaccttatgctttagagagaaatttgacttttacaattatgcatattcattattttaagtaaaaggtaaagttcacggggttgacaaatgcattaactatggattgaaaaattagtttggcattcctgaactaaaaagttaagctatttcaacatctatttcttaattcttcttctgatatactttgttttgtccaacttttctcctattgctttagctgagacataataatctagaaaagagacaggttattttttcatttctttttaacagatggccctggattgatttgccaaagatccacccaggaatcctgactcattaaagaagggtggagattttctgagctaagcgagagatctttcctcagaggtcattttctcttcsacttcttctgaggcaactcctgcagccagcccccaaagacagaatcagataataggaattcaaaaacctaacttaactgtgagccatgttacaaggttcaagaccttcagcaacagccagttttactaagttactaatagtcaaggaggtaaaaaatgtttttctgttttgtcttttattgatgactaaatgagaattatcgatacctcattatgaagtttctttcttttcagaagtaaagtgcatatttagtcttttggatttttagtagttggcaaaaatttaagtgctgaacactgaagtaatttaccatgttatcatattgctctgtaatactataatacatccttttctgtgtgtagctgagactatatatttcctgaaaatagatactccagctctttcatctctgtgctacattttctagccacagaatgctgggaattataacatttaatatttttacacaaataataatgttaatggatggccataaatgaatgtcagaaaccccaaattcttgtcctcattttaatacagaattccaaatctgcattttcacaaagtccattcttggtaaaaggtgccctaagtgtatttactattatgacttttattgtgagagtttcaaacagcagtgcagttggggataggaagggaagaaacttatctgaggccaggtagaactgcttcactcctcacaaatcacactgcaacacttgtactctagcttaccccaactgatgatcaccactttctagcagaatcgcatatatgtagttatattcttacacatgctctgtcccatcaatcccaacttagtcccttcaataaaaggcactacagtagttgttttgctaaacatctgctatataaatatatatttattaaactttcaaattggcaagaaatttaaaaaccattaaatctaaccacttacctttttgaattaaataaacataacccactcagaaaattaaaataaatctctcaagtaaacaggggcagaattggcacttcaaatggatcccctgatttttagtgccaatctcattatagcccatggatatatttttttcctggacttaagtgaaatgcattttctctgttgataaacttgaaatcaaagcagaataaatgatttgtggattatattatcccatttatattgtacacataaaatgtcaattctggctgatgaaaaaagaagccaacatactagtaagttaataacagataacttccaaagagcaataagcaataattgtattcaagaaatgaaaatgaaatgataaataactacttttcattagaataaagacagcaattttcctattatatttaaaacatcaaaaaatcaaaaaattataaatttttaaaaatgtgttaaatccatgattaggtgaaatctggtttcaatagcaatagcaataacaatatttctgcaacaattaagagctggcagtccatacattcaagaatactccc

SEQ ID NO: 720551 - DNA, 1795 bp, Homo sapiens
ttttaaaatttaaaacagcatgaaagaaatgactacattatttttgcaatcttctctctcgaggacttcgcccagtaaatatttatttgaataaatgaatatataatacaaggaacaaaggagccaagaagagccaattctctcattgatttctgcttccttcaatctctcagcaaatgtctccagagttctatcatcagatcttttctcttctagttgtcttcaagaaggatttacttccatcacttcaacttcctcttatatgatmatttctcccgaatttatgtatcaatcttggcatttctcttatgtgtcaaactcactcaggtgtttctgctataacacaatatttgggttactgaacacacttcataattcataaaatcacgcattgaaagtaacaggacttaaggtaaaactgtgactgaagtggactactaaaaagctatattactttgtaccagggcactaacaaaataataaaaatagctagcagtttaaaagagatgtcaaattcccaataaataaagtattccagaaaatgtaacatttggccttaaaaatggtagaggcaattttacagtagtataagaaaaggttgactttgctgaattatggagacatcaaaacttacaaacatagtagagaacgcttaccataaacactctaagaaagatcttgtgggccaaaggagaatagagtgaatggacatcatgtacagtatttagttgtgttagtgcacattgtatttagttgtgccttctttgtgatggaaaacattactatgctagggaaatttgcttataagtcaaagcaattctgcattgtaatggtatatatcctacttaagcaattgagtgcacactaatatgcattacagacagtcattgtaatagagcagataggatttctaactttgtatgaaaaaaaaaatccagctagatatttcataggcttctcaaacataaaggagcacagggtgaaacttattattatcccttccagacatactatttctcatttgccacatgcttggcttaatggcagtgctgttatctaggcttgaaatggtgcaatagcaacagtggcaaccactatttgagagtctctgaggtttgactgtggtcaacttccagcaattccactgttcaataatgaacaaataatttcatgtttacaattaatattcacatctactaaaataaaaggatagtatttatatcatttttattgttatcactaagtaaaatgatgcttgaaaatattttggtacaatgccctacacttacatgttcaataaatgatagccattattaagatcatctcaactccacttcatcctttacatgacttgaagtacaatgtgtcattcgctctgcttccactgtcacaactataatcctgatcctcattatatctcctgaacttattacaataagtttccaaacttttttgtcataatgatttctaccactccaatgacatattttcattattttttacattttcctttaaaaaaaaaaccaacaatctgaacctgattgcaaatggtctacctatattataatatttatgcatataatgttcacattataaagtcacctaacacaagaataatttacaaaatatattctttcatgttttgaaaatcacagtaaaacaataatttattttaagaacaagttattaaaatataattaagatttccagatgtctattgagattaaaaccagatggttttgaaatatgtgcaactatacttagctacaagttattcttttatcttctcattaat

SEQ ID NO: 720552 - DNA, 1795 bp, Homo sapiens
ttttaaaatttaaaacagcatgaaagaaatgactacattatttttgcaatcttctctctcgaggacttcgcccagtaaatatttatttgaataaatgaatatataatacaaggaacaaaggagccaagaagagccaattctctcattgatttctgcttccttcaatctctcagcaaatgtctccagagttctatcatcagatcttttctcttctagttgtcttcaagaaggatttacttccatcacttcaacttcctcttatatgataatttctccygaatttatgtatcaatcttggcatttctcttatgtgtcaaactcactcaggtgtttctgctataacacaatatttgggttactgaacacacttcataattcataaaatcacgcattgaaagtaacaggacttaaggtaaaactgtgactgaagtggactactaaaaagctatattactttgtaccagggcactaacaaaataataaaaatagctagcagtttaaaagagatgtcaaattcccaataaataaagtattccagaaaatgtaacatttggccttaaaaatggtagaggcaattttacagtagtataagaaaaggttgactttgctgaattatggagacatcaaaacttacaaacatagtagagaacgcttaccataaacactctaagaaagatcttgtgggccaaaggagaatagagtgaatggacatcatgtacagtatttagttgtgttagtgcacattgtatttagttgtgccttctttgtgatggaaaacattactatgctagggaaatttgcttataagtcaaagcaattctgcattgtaatggtatatatcctacttaagcaattgagtgcacactaatatgcattacagacagtcattgtaatagagcagataggatttctaactttgtatgaaaaaaaaaatccagctagatatttcataggcttctcaaacataaaggagcacagggtgaaacttattattatcccttccagacatactatttctcatttgccacatgcttggcttaatggcagtgctgttatctaggcttgaaatggtgcaatagcaacagtggcaaccactatttgagagtctctgaggtttgactgtggtcaacttccagcaattccactgttcaataatgaacaaataatttcatgtttacaattaatattcacatctactaaaataaaaggatagtatttatatcatttttattgttatcactaagtaaaatgatgcttgaaaatattttggtacaatgccctacacttacatgttcaataaatgatagccattattaagatcatctcaactccacttcatcctttacatgacttgaagtacaatgtgtcattcgctctgcttccactgtcacaactataatcctgatcctcattatatctcctgaacttattacaataagtttccaaacttttttgtcataatgatttctaccactccaatgacatattttcattattttttacattttcctttaaaaaaaaaaccaacaatctgaacctgattgcaaatggtctacctatattataatatttatgcatataatgttcacattataaagtcacctaacacaagaataatttacaaaatatattctttcatgttttgaaaatcacagtaaaacaataatttattttaagaacaagttattaaaatataattaagatttccagatgtctattgagattaaaaccagatggttttgaaatatgtgcaactatacttagctacaagttattcttttatcttctcattaat

SEQ ID NO: 720553 - DNA, 669 bp, Homo sapiens
cacagttctttacatttattacttactgctcatgtcaataaaatatgggtatatatttatttggatttctatatatttgtatatcatgcatatatatttaatcatgtcactatctgtcatttaaaatccaatcaacatgaaacaatctgttatatttatcctcttttgttttatcagtactttcttatattctttatggtacttttttgtttttgttgaatatccttgaatccttgtctttcattgtttcaatatactgcaattagaaatgcatattattttgttattatcatgatttctttggcactcagaatgtcacagcttcaccaggaaaaattccataagttgactcctttagtctctgcccttatcatttgtagaggctttgatgttttctagacacaacagaatgtgggargcacatgttatttattttcttacttggaaatgtagattcagctatcttctaagaattccctattcttttaggggggcaataatattgggggtacaaacctatgtccaaggcatgcacatgcataatattaagaagcacataggattgtcttcttttagcatggaaagattttggtctggtgtctccaccctgtttcatagcagtaaccagtgagttgtctcactgagcagaaacagaataaactagaaaaa

SEQ ID NO: 720554 - DNA, 2055 bp, Homo sapiens
tctaactgaagagaatgtaataagcagaactagcttagaccaaccaagacttacctctaagtcccaagggggaggagtgaccacctgaacaaaatagacatgtgcccagagaaggcagggagtatggatgaaatgctggaaagtaccagcaatgctgttccaccaacccacagagcaggaacatggaattctccctgccagggtcagtaggggaggtgatctgatttgacctgtccgagagcacatgttctgacttctttttgggggcagggaataggacatttcttctaagtggaggaaatagcacgaataaccctgtggggagctgctttgcacagaaacagaagctgctgtggctgtagcacaggtgtgcattgggtgggggcaaacaggagaaacctgaatgatgatcaggaccagtggagaaaggcctggctgccaggcaacaagcagccgttattttaacccagaggttcagacaaagcaaggtattattggcatagtttctcactcagttaatggaggcattactgtagaaagatcaggtccagaaaatgtttcaagatgccgtgaccaaaaatatgtccttgggggcctgctggagggatgtggctagcctcagagggacatctttggcaggggcattgagtgtgatgggtactggtggtttatcagaatccttaaaagcacagactctggggtcagactgcctggacacacggcctgtcttcgctttctgctgctcaccttgcctcagttctctcacctgtgaagtggggataataattgtaaatattccatagggttaaataagttattcatgctggcatgtggacagccctctgtaattgttagctgttattgttgttaagggctgagaagggagtggagatgcattatcatgaggattctaatgaggaagcaagtggcaatttcgttgtgtggatttaaatttttttcccataaactgtagctgacagttgcttctaaatagaaggcaaaaggcccacagcttccaaytacctgaaaattagcccacataccatctttgcctcaactgccaagtgacattcatggaccttccttttacctacaaagttgagtttgtaggtaactctacagatctaattggtaatctactaatattaattagagaagctcattagtttaagtgattagagctatgacccctacagtaaatattattaaagactaaagacctgattaaccaagattaaagtaagagagttgcaaattttcacctgacctaagaaaaccttttgctctccttctttcctgccctttcagagcttctctgttttccagacactataaaaaaccctaatgcttgcttgcaaaattagatcagtgtgggggttatcaaaatttgaagtccttgtacaattagcatacacagaagggatacaaagggaagatttcaaagaaattgacaactgcatacaatttggaaatgttctcactgattttgatttgcttaatttctaattaggacaaaaatttcaaacacacaaactattgaaagaataatacaaagaatacgcctctgccctacacccagatacccagttccaacaactgttaacaggttaccatatttacttcctctctctctttctggtaatcatttgaaaacaagttgcagatatgttgacactatatagcttcaacctatatctcctgagaatgaagacattctcctacttaatcgtgagatcatcattatgcctaagaaaattaacaagaattccctagtatcatctaaaccaggccttatccagatttctctatttttagaagtatgatccaattatgggtctgctagtattgtttttaatggagagaagtgtgtgtatatctgtcactaagcttatgaaatgtgtgtgtgtatagtgctcatgtatgtttgtgtgtgacgtgtataagtatgaatgcatacatgcatatatgtgtgtgagcagtgttttgtgtccacatgtgtgatgtgtacatgtgcttgtatgtgtacatgcatgtgtgtgtgtgcatgtgtgtatt

SEQ ID NO: 720555 - DNA, 1021 bp, Homo sapiens
tttccatctaagaagtccatttccagtgaggtcaatgcctttagtattcattgcttagctctaaacttgtatgtaaattggagattaaaaaaatccttaatttaaaatagtgatctggwagactctatgcttctaaaatttgtccatgaatcctcctcttttataggtcctcctagcaggtaatataaagtggaaaaacatgtatgtaaattttatactgtgatactccctgttgcacagtttctccaatttaaaatgacttgatgcatgagagaaaggagagctaacatttcatttgtgccttttctcagatgatagaatagatacaaaaagatcatcataataagaacatccatgagaatgaagctgacttatttttacaaaccttacataaaccttgaattttccagggaaacagggagtcacaaaaaggcagtgaggttttgaagaacaaaaatctaatggcctaataaagatataaacaaaaataataaaatattaacttggtttcttcatctttgaagtaaccaagttggatgttgggtcagattatacctctaatgtaatataattttacacttctttgttcactaccaacaatatatgccataaaaatgtctagtcgagaggtatcttaaagaaccactggaaacgagatatagaactttagacttaaccaccatgaattccataaataactgtcaaaacctatacacaggtgatctctttaataaattgagaactgagaattgtttttgatgaaagtttcatgagtctctgtagccccggggttctgagcccatgagtcgaaggactttttgactttacgtaatgctggagcaatacctttagaagaggacaaatccatttaaaataagctctctgcaaatgccacagcctgcattttcaacctgtgggctgtcacacagacatgactgggcctcgtagtatatgccaccagcaaagtgcagcacctgtgaggcacacaccttcagtttatgtgaacctgatcaggcatgag

SEQ ID NO: 720556 - DNA, 1021 bp, Homo sapiens
tttccatctaagaagtccatttccagtgaggtcaatgcctttagtattcattgcttagctctaaacttgtatgtaaattggagattaaaaaaatccttaatttaaaatagtgatctggtagactctatgcttctaaaatttgtccatgaatcctcctcttttataggtcctcctagcaggtaatataaagtggaaaaacatgtatgtaaattttatactgtgatactccctgttgcacagtttctccaatttaaaatgacttgatgcatgagagaaaggagagctaacatttcatttgtgccttttctcagatgatagaatagatacaaaaagatcatcataataagaacatccatgagaatgaagctgacttatttttacaaaccttacrtaaaccttgaattttccagggaaacagggagtcacaaaaaggcagtgaggttttgaagaacaaaaatctaatggcctaataaagatataaacaaaaataataaaatattaacttggtttcttcatctttgaagtaaccaagttggatgttgggtcagattatacctctaatgtaatataattttacacttctttgttcactaccaacaatatatgccataaaaatgtctagtcgagaggtatcttaaagaaccactggaaacgagatatagaactttagacttaaccaccatgaattccataaataactgtcaaaacctatacacaggtgatctctttaataaattgagaactgagaattgtttttgatgaaagtttcatgagtctctgtagccccggggttctgagcccatgagtcgaaggactttttgactttacgtaatgctggagcaatacctttagaagaggacaaatccatttaaaataagctctctgcaaatgccacagcctgcattttcaacctgtgggctgtcacacagacatgactgggcctcgtagtatatgccaccagcaaagtgcagcacctgtgaggcacacaccttcagtttatgtgaacctgatcaggcatgag

SEQ ID NO: 720557 - DNA, 1021 bp, Homo sapiens
tttccatctaagaagtccatttccagtgaggtcaatgcctttagtattcattgcttagctctaaacttgtatgtaaattggagattaaaaaaatccttaatttaaaatagtgatctggtagactctatgcttctaaaatttgtccatgaatcctcctcttttataggtcctcctagcaggtaatataaagtggaaaaacatgtatgtaaattttatactgtgatactccctgttgcacagtttctccaatttaaaatgacttgatgcatgagagaaaggagagctaacatttcatttgtgccttttctcagatgatagaatagatacaaaaagatcatcataataagaacatccatgagaatgaagctgacttatttttacaaaccttacataaaccttgaattttccagggaaacagggagtcacaaaaaggcagtgaggttttgaagaacaaaaatctaatggcctaataaagatataaacaaaaataataaaatattaacttggtttcttcatctttgaagtaaccaagttggatgttgggtcagattatacctctaatgtaatataattttacacttctttgttcactaccaacaatatatgccataaaaatgtctagtcgagaggtatcttaaagaaccactggaaacgagatatagaactttagacttaaccaccatgaattccataaataactgtcaaaacctatacacaggtgatctctttaataaattgagaactgagaattgtttttgatgaaagtttcrtgagtctctgtagccccggggttctgagcccatgagtcgaaggactttttgactttacgtaatgctggagcaatacctttagaagaggacaaatccatttaaaataagctctctgcaaatgccacagcctgcattttcaacctgtgggctgtcacacagacatgactgggcctcgtagtatatgccaccagcaaagtgcagcacctgtgaggcacacaccttcagtttatgtgaacctgatcaggcatgag

SEQ ID NO: 720558 - DNA, 869 bp, Homo sapiens
cctattattctgaaatctgacatccaaattctagataaaaatcttttatatctctgtgttaaatggaataagccaagagtgaaactctgaaatatttctaaaacatttttttctttctcttttaaaacatttctatatcaacccactgattaagatttttatggcaggctgtacaccctgctatgtgtatatgtaactctattgactctagtatatatttatcaatacaggttgagtatcccttatgtgaaatgcttgggaccagaagtgttttggatttcagattctggaatatttgcatatatataatgaggtatcttagggatggtacccatggctaagcataaaactcatttatgtttcatatataccttataaacatagtctaaaggtaattttatacaatagttttattaattttgtgcataaaaaattgtgttaagtacttacatgtggaattttctgcttgtggtatcatgtcagatttctaaggctttgaagwttgaagcattttggatttcagattttcagattagggatgctcaatcagtatattacaaaaaatctttttcacgtgtcctatgggaattgagacacagcatgtctatatgttcaaatcttgagcttataaatatagttattataagattattgaagagaggagtctgagataactgggcatggctggcatgtcttcttccttgaggctctgcaaccatctgtcattgtttgattctggagcatatttcctggggctttgcattacggttctgcaaagaaacagaaccaataggatatacagatctataagaggaaattaattatgggacttggctcatggaattatggatgccaagaattctcacaac

SEQ ID NO: 720559 - DNA, 638 bp, Homo sapiens
ctgcaagtccctcggagttagtgaataactgaatcagcctgataactgcccagagagtcacagctccttcagctttagggtaaatcctacacttgagaagcctttgtattttttgcaaagcaaatgcagaagcgggcttctagagataagaaatagggaccaccttccctcctgtgatgcacagacatggtagcccaacttatatgagatatactatacagtgagccttgcacgaggcaaggctaccacaagttttttaaaaaaactgaatgaagactgagcctcagcactcagttacatagccccaaaaacttacaataaaatggctatttgggtcattcattcatttgacaagcctttattgagcactgaagatgacaagtaccacaacacragatgatggaatgaatgggtgaggcaccccgatcctagccatggtattgctcagccctacaggattgaaagggaatctggcaaagaaatccccctgttctctgaagctccattttaaattaaaaggaccgactcagaaaaacaatcatccttctgtgtcaacagcctgcctctttttatgtttccaccgaacaaactgtccaagggcaaaatctgtagctgagataataagaatgaaggactct

SEQ ID NO: 720560 - DNA, 599 bp, Homo sapiens
aatgcagtgacttaacacaatatttggttttccctctcagtttctgttaagcagaaaacatcaggtacagtggagctcagctcagtcctctgtctggagtctcccaaggccaaaatcaaggtgttggcagggctgtgtttctctctggaggcgcattgaggttgttggccgaattcagcttctaggaactacaaggcatgtttagctgctggcgcctcagggcgtcctgcgttctccatcagattgcccgctccattttcaaaccagcaggagggaccacatcctgctctactttaggtatctctctcataactcttctctttcccttgtgcctcagttgccttctgccttcaggccaacttctctgtttttacaggttcatgtgattacactaggcccactcaaataatccgagatagtgtccctattgtaaagtctaaaaacttaattgcatctgcaagtcttttttccatgcaaggtaacattcacaggttctggacattaagtggacatctttgggaggctattctgcctactctaaagatagtcatcagagcaagttgataagtaayttcctttcaaacttaaaaacttaggta

SEQ ID NO: 720561 - DNA, 630 bp, Homo sapiens
ttttttaagagttttttttcactcggttttaaaaattaattaattaatttacttttttttagaaacagggtctccttatgtcatccaggctggagtgcagtggtaattcacaggcacaaacatagcgcaccgcaatcttgaactcctggactcaagcactcttcccacctcagcctcccaagtacctgggactacaggcacawgcaaccatgccccaaaatcttttgttctttaacccaggtattgctcgttattctacacgtgtggtaatgtatggaattcaaaaagtcacattgatgtcgaagttgaggaactgctgatgcctccattataagaaattttaacatgtacatctgttagccacagtaattctgtcccattgcatgtaatcactaaaattaaaaatgaacatatgaaaatagagtcccagtgcagaagctgaacttaatacctttgacatttaaggcagtcacttaatcagattactctctctggttatagcctatgggaattcacaggtgttaaattagcttcagaaggactctcctattgttttttaatggaaagctaggacacatggagatctgaacatggaaaataaacataaatcacgtataagagatatggagt

SEQ ID NO: 720562 - DNA, 641 bp, Homo sapiens
ctactacaaagaaactttaaacgaatctatgactataggaaatagatatttaaataacttattaataggcacttggaaaaaatgttctagctcaaatgcatgaatgtttttttcaaaagtatttttcacctattaagctgacataggtttaaaaaacaataatgaaaaaaatagatggtactggtgagatgtgagacaagtggttattgtcattgatgtttattttattctattctttttttaataatttcaacttttattttagattcaggaggtacttatgcaggcttgttacatgggtatacagcatgatgctgaagtttgaaatgattgatcctatcacccaggtactgagcatagtattgtgtcmggaatttactccttctggtgggttcttcgtcttgctgacttcaagagtgaagccacgggccctcatggtgagtgttacagctcttaaagatggtgtgtccagagtttgttccttctgatgttcagatgtgtctggagtttctttcttccgatgggtttgtggtcttgctgacttcaggagtgaagccacagaccttcgtggacctttgctgcgagtattacagagtggtgattggtgtgtttacaatcctttagctagacacagagcgctg

SEQ ID NO: 720563 - DNA, 641 bp, Homo sapiens
ctactacaaagaaactttaaacgaatctatgactataggaaatagatatttaaataacttattaataggcacttggaaaaaatgttctagctcaaatgcatgaatgtttttttcaaaagtatttttcacctattaagctgacataggtttaaaaaacaataatgaaaaaaatagatggtactggtgagatgtgagacaagtggttattgtcattgatgtttattttattctattctttttttaataatttcaacttttattttagattcaggaggtacttatgcaggcttgttacatgggtatacagcatgatgctgaagtttgaaatgattgatcctatcacccaggtactgagcatagtattgtgtccggaatttactccttctggtggrttcttcgtcttgctgacttcaagagtgaagccacgggccctcatggtgagtgttacagctcttaaagatggtgtgtccagagtttgttccttctgatgttcagatgtgtctggagtttctttcttccgatgggtttgtggtcttgctgacttcaggagtgaagccacagaccttcgtggacctttgctgcgagtattacagagtggtgattggtgtgtttacaatcctttagctagacacagagcgctg

SEQ ID NO: 720564 - DNA, 641 bp, Homo sapiens
ctactacaaagaaactttaaacgaatctatgactataggaaatagatatttaaataacttattaataggcacttggaaaaaatgttctagctcaaatgcatgaatgtttttttcaaaagtatttttcacctattaagctgacataggtttaaaaaacaataatgaaaaaaatagatggtactggtgagatgtgagacaagtggttattgtcattgatgtttattttattctattctttttttaataatttcaacttttattttagattcaggaggtacttatgcaggcttgttacatgggtatacagcatgatgctgaagtttgaaatgattgatcctatcacccaggtactgagcatagtattgtgtccggaatttactccttctggtgggttcttcgtctygctgacttcaagagtgaagccacgggccctcatggtgagtgttacagctcttaaagatggtgtgtccagagtttgttccttctgatgttcagatgtgtctggagtttctttcttccgatgggtttgtggtcttgctgacttcaggagtgaagccacagaccttcgtggacctttgctgcgagtattacagagtggtgattggtgtgtttacaatcctttagctagacacagagcgctg

SEQ ID NO: 720565 - DNA, 647 bp, Homo sapiens
ggaatgcaaattttgtcaaggaaatggatgtgcaatgcttctttttgagctctgtctttttstaagtatttgtaacaaaaactcttctttatccttgttctgcttactcatctgatcctattctactgtctttttttttttttttttttttttttgagatggagtctcgctctgtcacccaggctggagtgcagtggcgtgatctgggctcactacaacctccacctcccgggttcaagtgattctcctgcctcagcctcccgagtagctgggattataggcgcacactgccatggatggctaatttttgtatttttaatagagatggggatttcaccgtgttggccaggctggtctcgaactcctgacctcagctgatccacctggctcagcctcccaaagtgctgggattacaggcgtgagccaccgcgcccggcctgttctgctgtcttctgacagtgctttgtttttctttcattgcataagggttttgctcttgtgttaggttttcctaggaagctaacaggattatttcatgtggcttctgcagcacctgccagatgttgacttactatgctaatgtatgaagagaaaagtgcacctagattaggtgagctttaaatgaacaaatttgtatttttctctaa

SEQ ID NO: 720566 - DNA, 647 bp, Homo sapiens
ggaatgcaaattttgtcaaggaaatggatgtgcaatgcttctttttgagctctgtctttttctaagtatttgtaacaaaaactcttctttatccttgttctgcttactcatctgatcctattctactgtctttttttttttttttttttttttttgagatggagtctcgctctgtcacccaggctggagtgcagtggcgtgatctgggctcactacaacctccacctcccgggttcaagtgattctcctgcctcagcctcccgagtagctgggattataggcgcacactgccatggmtggctaatttttgtatttttaatagagatggggatttcaccgtgttggccaggctggtctcgaactcctgacctcagctgatccacctggctcagcctcccaaagtgctgggattacaggcgtgagccaccgcgcccggcctgttctgctgtcttctgacagtgctttgtttttctttcattgcataagggttttgctcttgtgttaggttttcctaggaagctaacaggattatttcatgtggcttctgcagcacctgccagatgttgacttactatgctaatgtatgaagagaaaagtgcacctagattaggtgagctttaaatgaacaaatttgtatttttctctaa

SEQ ID NO: 720567 - DNA, 2100 bp, Homo sapiens
tcttttgtgttttctggtaccaagacctcatagtttgacttttatgaatttctagtatatattgtacttgataaacttagatgcctttttttttcattaaaatatatcccattgaaacttgggtttgcttcaattatgcaggtcaatttgaaaatagcttctatctttatagaactattttatttgttcttaaatatgcgtctctgcctattagcttcttgaatgtcctttaatgaaattttgcagatgtctctttcttactctgtctctctgtcttaaatgcttttcattatgtttgttcaaaatattatgttcttttgtttctgttatgaattatatcattttttgccattatgtttctaagtgactctttgttgtattaaagaatttgtcacttgtcttactctgttttctgttgctcagaacagaatacctgaaatttatgagtaaaaagaatttcttttttacggttatagaggctaagtactccaaagttaaggggccatgcatggtgagagccttcttgctggtggggaatttcaacagagttccgaagctgcctagagtatcacatgatgagggggctgtgtgttagctcaggtctctctcacccttcttataaagtcaccagtcctattctcatgataacccattaatccatgagtggattaatccattcatgagggcagagccatcaggacccaatcacctcttaaaggctccacctttcaatactgacacgttggggattaagtttcaaaatgagttttggagtggacaaacattgaaatcatagcatcacccccattcaaagttctttagttctaccaaattttctgagtccttgcttttttttcttgcaaataattatatatgcaaataatgtgggctcctttgcttttcccttatctatattttactttgttttgttagttgtataatgtgacaacaactacttttacaattagttgcataatgttgcaactaataaagtattttatttataattctaataaagtatactttattagttgcacttctgaaacaaatctaagtaactctcagtggtgtggacttctgtggtgttgtttccaggctacagttcagaagtgtgcaaatgtgagcaacatatggaaacatatcatgtgcaggcttgtgtctgcctccagcaggactctcctaagtactgagctgcaaagaaatatatactatattgtatctttttgtatatatttctaaaaaagaatactgaaccatttaaacaattttgtgattaaaaaggtctaacaaaaaggttagttgcctgattgatttttgtctctttaaaaataggcaaagtagaaaagaaaggtagatggcataaaatgcagcaatgtcttcccaggaaagagagcgagaagtgtttctcacttaggctaaggatatctagatggataagtgctaactggagctcagagtacacacttggaatggaagaggttggaaagctgggaagaatggatggcatggtcctagaaaaggctggaagtrgaacacagcagccaccaggaagccaaacacctggataaagtattacaagtagagacctcagtctccctggcacttctacaaccagcagagaactttaaaaaatgggaaattgtctttgggaggccaaggcgggcagatcacgaggtcaggagatcgagaccaccctggctaacacagtgaaaccccgtctcaactaaaaatacaaaaaattacctgggcgtggtggagggtgcctgtagtcccagctactcgggaggctgaggcaggaaaatggcgtgagcctggaaggtggagcttgcagtgagctaagattgcaccactgcactccagcctggggcacaaaccgagactccatctcaaaaacaaaaagggatgttgtgaggttgtgagtattgtctgatttttacttgctttctgaaaatgtaagattttatttattattctgtgttgttattattaaacattctatgaaataaatctcaagaatttctgcaagcaggagtgatggctgtctagtacaatttgttttattgaactttattgtcaatgtgtcaagtaaagtttgcttct

SEQ ID NO: 720568 - DNA, 642 bp, Homo sapiens
ccccccctcttaggattgctttataaatctcatgtgatagcttgtaaaaatgctttgcatataataaaatgctctcccagtgtttcccaaagtgtacttcatgaatcattaataccatgagatgttctaaaaaaagtggggggatccacagtcaaataagttttggaatgctgaataccatatacccccttcctggagattcatggtgtatattagcttattaatggctcacaggaaggcaccctgtttaaccttggtttagtgcagcrtttcgtagacttatttggccacaaagctctttttcagccatagacgctttaacaaatgaggaactattgttctgaaagacacagtttgggaaatactgcagcacacaggtgtaagggactgtttccatctttgctgagctaggcttggtcagcttgctcagtaccattcgatgctgggcctgcagttcaacctccagagtgttcacactgcgtctcagttctatgatctccttttggcagcattgctgctgttgagagctggtcaccacttgttgattcagctcctctatctgaaacacacagccagagactgagaatattatgggaggaaaacatgactttgattaaagggccctagaaatgcagcatcagc

SEQ ID NO: 720569 - DNA, 2000 bp, Homo sapiens
tcttgcgtatgtaaaaagtaatcgctaagagaggaagaggcaaagcttaactaggggtatgaatggcttatccactctaaagtgggagaaagcagattatgcagacattgatattataaactaaacagatacagaagtaggagtttatggaaattctgttatgaatgactgtatgagaaaccggtgttttatggctgtctttgccctacatgatagagataatatgatcctcaaagcctaaaatatctactgtttggacctttttggataaatatttgctaatcttttaaagagactggaactacagagttccagcttagtcatttattcaaaaaatctttaataagcgtctattatataccaggttctttgcaaggtagtaaaataaaaaacactatagaaattgaattacctctgttcttccattcttgttcccgcttgtgatgtctgattgttttcctcaacacacgattaaagcaaagcagctcctgccaagatcattgctgataaatgccctgaacactgtactgtcttgtatcttatttgttcttttggcaaattttgagcatattgacacatatatagactggatggacccacattctaaagaccttaaaatcatccttccatccctcttttcctttctctctctgttttactaatatataataattgtacctatttatggagtgcaagtgatgttttgatgcatgcatacaatgtataatgattaaatttgggtaattaggatatccatcactgcaaacagttatcatttctttgggttggggacatttcaaatcttttcttctagctattttgaaatatacaataaattattgttaactatagtcactgtattgtgttatagaactttcatctctctttatatggacagtttaaacttaactttcaggaaaccaaggatagtcaaggtttcctttacaaattactgagagtttggaagtcatttgcctagatgaaataatggaggaggtgttgagttcacagaaagatgttataaatagtgatttataccagaaagaaatgcaattttaagaatcaatggcagataaatggtaatttaacctacaggagtagaaaaaagtgaaaagcctatggattatttaagaaagttacaaatagccagaagaagacagtgtgtgcaagtcaattcaattcaactaactgatttttccctgagtgctttgtatttgctaggatgggtgtagaatttgagcaaaagattgaaagtcgaaaattaaagaggaagaggwggaaaaccaacctcaaactttttacattactttgcaaaaagaagtgtaatgtgagacttctttgggtgaatttacaaaatgcatttaaccatattttcatcacatttctgtgaatataaattaatacattgtcattattacatttacacagccaagccacccaagcactatttttaacacacaatttattcagaatatcatattccttatctgtatccattattactgcaggctacccaaaagtgaaatctttgttttcatcaggccactttttatcctttacatctgactcagaacatgcccaaactggctatatttgttgaacgatgaccaaaatttgttttaagattacaacattcccttttattttttacgcttaaaatattgttttccatgataacagaatcaaaaggaatgttgccccgtagtaatcttgccttcctgttgtttcaatctatagtgagcaataaaactgtccacctcttaaatcttactcttactcatttctctctttacaaccataaatttcacatatgatgggggaagctgttagttgcccggttggtgaactgggtcctcagaagcctacagttttatggagaaagccgactttgggtttttctccccaacattttttaaaaatcctactcctttcaaataagagcaagaaaagcagctaaacatgtgaccaatctgattagaaaattgaaaatcaaatggcac

SEQ ID NO: 720570 - DNA, 663 bp, Homo sapiens
catctcaaaaaacaaaacaaaacaacaaaactccacatatccatcaaaccaaattatagctcctatgttccacatccttttcctgtctcatcttcctaaaacaggatttgctttcttctttctgtaagtttccataacrctttttttttttttctggttaattgttacaggtcatgttccctgaaaagggcactcagacatggagatttatatgaaagaagtttagtgggtcattcgctacagagcaacaggtctgaagaaatgaaggaggtaggattgggcaaaacaggagtttggctgcaatgctgtctctgcaagggcacagccaaccccatggagggctctggagctggaatgcccttttagaattgtcctaaatcattgcaagtggagctgggcctttacatctctctgtctaccagtcactagatatgaggaccttgggtaaggtgcctgtctcctatttagtgcagtagcagagaggaaggatttagctgggaattgtcagctgtcaacactcccagtatccgggggaatgagtgcttctttcctgaaaaagatgggaggtgggagtagaaatgtaagtgccacaccacagtatcttctacatcaatgtacatggaatttggcatactctgttttgtcagtcctgtttttatctcc

SEQ ID NO: 720571 - DNA, 615 bp, Homo sapiens
taaataccattacacactatttgtaagatccctcataaatgactatgttatagctgagacctgcaacggaactcccaccaccaaatgttgtggtagtgtaaggaccattgttattttcacttgcaaatattcctgagaggtcgtattttaagctgctaaaaactaaaacaggaataaggtgacaaccagcaaaagaaaaaaaatgagctaatgcactcgagagagtaaggaaggctcacggaagaggagggctgtggtgatcagagtccacggacgtccaaaaatgtgacttggctggycctaacagaggggagcagctcttctaaaaacaaaatcaccccctggaaattatgttggttggttccttggggcatctacagttctttttcaagttatttacttgctcattaccgccagtcccagctttcttgggagacctaaacatatttggggaatggaaataatgtgcttgctgccacagaccaggccagtaagatgagaagataaagagtttctagagtttttattattcaaaatgagtttcatttcaattcaggtacttgaaagaaggttctagtctgttactttgacacagcacaagatcaatagtttatt

SEQ ID NO: 720572 - DNA, 2254 bp, Homo sapiens
gaacatatggagtgttctttaaattgtctataattcgtctaggctgcatctaggattgctatgtttgaagtaattttaccaccatgtctacaaggttckatctatagttgaaaataaataccacttggtttatttctaaatatcgtcccgctatatagttatgtgggttttttaggtcatatcttaaaaaacttcatccagggctcctcttaatctcacctacttttatttaacaacataatggtttggactaaggcaaataatatgcttcaaaatagagtatgcaaatagaaccatgtgcatgaaatgcaactagctttttccctattataaatattatactaaattctggatttatcaatgagttgtacatatatttgtgagagaatgatgaaatgccattggataaaattttaagttgcatagcgcataaaactatagacttcattcaaaaccaattttaagtaaaagaattattttaagtaaaagaattattctcttcagactatggcattatcagattgcataaaagcatgcttttaatattatttttgttatagagaaattatttttgttatagagaaatatgttaagagaacatatttagtaaccattgattaaagatcatgaacttagtgaagttgcacaagttataggtttttgtaaaaaaatattcaaataatttctttctgatagaaaaataactccagatattatggttaattgcctcaaagaaattaaccagctatgtaagttcctttcagtattcatatgactgaccatagaaatctctatttcttgaattatcttttgaacattttcctttttctttaagaagttcaataaaacattttacttatgttcaactttatacatgaaacaaatgttttcattattttgaaaatatgcagttgatttttgttatttgcaatagttgtattctacaaagtcagtatgaaaactgaattagtgaaccattgcacctaggggaaaggcagggttagcttcttgcaagtctctggtcacaacattttcatcaactgagaaatatttgtaggtatgtttctgtataaaaacacctttttaaatacatattgttgatctgttaactttgaaattacaactaagaaaactatgattgtacaaaacttatctaacaagtgtattttctccataaggcacatcacaaccttcttgtgctgagaaacatgatagcaattcaacactataaatagggccattgtcagcaatggaatcagcaagagaaagcacaaaaatgtgaaaaatctggcactaaacagagcatcttcttgtttgacttcagctggaaatgtatacatggagccatttcacttttttgctctgaataaccattgtagcatcaccaatactgattttggagttatgaatatattttagcaaataggcaaaaactcacaaaaacagaatccaaaaataatggcaattggatctgtatacacacacacacataaactaaaaactgtcacattcagtcaaatcgtcacatttattatgaaagaaaaaacaaaataataaaaaattctaaagcattttataaataatatgtatccccaaaacaaaagaagcaacaatgttaataggaattttatattttaagataaattattactttttaatatggttcaaatgtacccacttttaaaagaaaaaaatgcagacatttttctcttctgcttagtaaaatacataataaaacacatctacctacaaaatgaaaaatggggttgtctgagtcattttatcaacatgattctctaagtaatcttagctgtgttggtacgtaatgacagatggaaatgctttggctttgttggtactgagttcacaccagggaaacatacatgcttcctttgtgtaaaagctatgagtgtttctgtgtagaaaaaaggctaagaatactttacaagaagaaagcagttaaagcctcacctaatgttggtgtgatatacagataatgcatcagagagtgtttacgaaaaaagggacgtgcttaccaaataaaattttaactaagactatgtatccactggaacactagctcataatttaatttcaaaattttatattgatttgtaaaatatttctgagctagaaaagcaaaggaagagtaacatggattcaatagaggctttccttttattgccagaagtttttgaagaaaactttttcaacccacaatattcttgaccacccaagacgactacatataact

SEQ ID NO: 720573 - DNA, 2254 bp, Homo sapiens
gaacatatggagtgttctttaaattgtctataattcgtctaggctgcatctaggattgctatgtttgaagtaattttaccaccatgtctacaaggttcgatctatagttgaaaataaataccacttggtttatttctaaatatcgtcccgctatatagttatrtgggttttttaggtcatatcttaaaaaacttcatccagggctcctcttaatctcacctacttttatttaacaacataatggtttggactaaggcaaataatatgcttcaaaatagagtatgcaaatagaaccatgtgcatgaaatgcaactagctttttccctattataaatattatactaaattctggatttatcaatgagttgtacatatatttgtgagagaatgatgaaatgccattggataaaattttaagttgcatagcgcataaaactatagacttcattcaaaaccaattttaagtaaaagaattattttaagtaaaagaattattctcttcagactatggcattatcagattgcataaaagcatgcttttaatattatttttgttatagagaaattatttttgttatagagaaatatgttaagagaacatatttagtaaccattgattaaagatcatgaacttagtgaagttgcacaagttataggtttttgtaaaaaaatattcaaataatttctttctgatagaaaaataactccagatattatggttaattgcctcaaagaaattaaccagctatgtaagttcctttcagtattcatatgactgaccatagaaatctctatttcttgaattatcttttgaacattttcctttttctttaagaagttcaataaaacattttacttatgttcaactttatacatgaaacaaatgttttcattattttgaaaatatgcagttgatttttgttatttgcaatagttgtattctacaaagtcagtatgaaaactgaattagtgaaccattgcacctaggggaaaggcagggttagcttcttgcaagtctctggtcacaacattttcatcaactgagaaatatttgtaggtatgtttctgtataaaaacacctttttaaatacatattgttgatctgttaactttgaaattacaactaagaaaactatgattgtacaaaacttatctaacaagtgtattttctccataaggcacatcacaaccttcttgtgctgagaaacatgatagcaattcaacactataaatagggccattgtcagcaatggaatcagcaagagaaagcacaaaaatgtgaaaaatctggcactaaacagagcatcttcttgtttgacttcagctggaaatgtatacatggagccatttcacttttttgctctgaataaccattgtagcatcaccaatactgattttggagttatgaatatattttagcaaataggcaaaaactcacaaaaacagaatccaaaaataatggcaattggatctgtatacacacacacacataaactaaaaactgtcacattcagtcaaatcgtcacatttattatgaaagaaaaaacaaaataataaaaaattctaaagcattttataaataatatgtatccccaaaacaaaagaagcaacaatgttaataggaattttatattttaagataaattattactttttaatatggttcaaatgtacccacttttaaaagaaaaaaatgcagacatttttctcttctgcttagtaaaatacataataaaacacatctacctacaaaatgaaaaatggggttgtctgagtcattttatcaacatgattctctaagtaatcttagctgtgttggtacgtaatgacagatggaaatgctttggctttgttggtactgagttcacaccagggaaacatacatgcttcctttgtgtaaaagctatgagtgtttctgtgtagaaaaaaggctaagaatactttacaagaagaaagcagttaaagcctcacctaatgttggtgtgatatacagataatgcatcagagagtgtttacgaaaaaagggacgtgcttaccaaataaaattttaactaagactatgtatccactggaacactagctcataatttaatttcaaaattttatattgatttgtaaaatatttctgagctagaaaagcaaaggaagagtaacatggattcaatagaggctttccttttattgccagaagtttttgaagaaaactttttcaacccacaatattcttgaccacccaagacgactacatataact

SEQ ID NO: 720574 - DNA, 678 bp, Homo sapiens
tggtgtgtgcctgtattcccagctacacgggaggctgaggaaggagaatcgcttgaccccaggaggcagaggttgtagtgagctgagatcacgccactctccagcctgggcgacagaatgagactccgtcwcaaaaaaaaaaaaaaaaaattgctgaacattattgttaggagtcctctgataacccaaagggatcttcattaacctgaatgatcagacagacaaaaaaaagtagtagacaatgtaatttagctctttgccacgtttttctcgtcattgctgaaggcaccacattctgacatagtgtaaaagaaaaaaaaatggaatgtgaatttcaagtgaagaaaactaaaacactatggtattaaatattcacttatggtgtttacatcaacaaaactaagtgctctgggttagtttgaaaggaaattcatattggggtgtggtatttgattttaggctcataactgcacattggaacaatgaaagacattttcttcccatgaaaaattgtacctgaaagactgatactgaagtactacagagaatttaggaaattggcttgagttatttttgttatattccttcaaaattttgatattatagcttatgctgtatttaaaatagtgtaattcctatttttaaaacaaaatgacacaactttgttttctctatccc

SEQ ID NO: 720575 - DNA, 597 bp, Homo sapiens
gtcatttttaaccacattgatacctggttacggtgtgctctttcaatctctttactctagctccttccagtggtaaatcacagatgtgctgcagacagcagagatctgggattcttttgatgtgacaggagtgcaatggtgagtaaagattttccctgtactttaccagtttctcttgcttccaatttaaaattgaaggtgaggttctaatggagcctggatccattagtttattcaaaatcgtaaggcactttgttcacttggtatagcactttctcaggctgtataaagtggagcagtttctgagatgcatgsataaaaatctccaaaccctggcagaaatccagcagtgcaattccataaagtacatgatatacacatttgcgcaagctgaagcttcctttgggctctagggaaaatagtgcttctaataatggcagcaggtgtttttactaatgatcttttaatggcatttttgatagttttaattaaaccccaaatatttttgttggaaaaaataaaggacaaatggtttctaaggcaaaataaatagtgtttttaagaatgcatttaaaaagaaaaattagaaagaaaagg

SEQ ID NO: 720576 - DNA, 636 bp, Homo sapiens
tcacccaacaagacctattttggagtgacaaacagtaggatattcaaaatctctgcagtccaacacaatgatagaaaaaaatatctcaagacaaaggacaggttcttgcttaatatcaccagtctctgcagaaaatgtgttcttcaccttctcctgtgtgtggtttcagtgcttattggagacgaactggtagtagaagccttgttcattcatcatttatgaaagactttccagtaaaattaaatttggactaggacattaccatggccagcttgcacagttctaataatctgtagcttctgcctttctttatgctgtttcagagccaaccttcaaaagcattattgtcacagtagaaatacttcttagccaccaaaatgggcaacacttctaaaatttattaaaaactataaatgaggtcgagtatcacgtatagggaaaactgctaactttgcatgtggtatccagaaccctccatactgtgacccctatgcactctctgtccacctgtctcccaacaacccaaccctctcaaccacatcaatctccatccaagwtccagcaatagcctactgcctttaatttcagaaaaaaaagatcaagaggttttgtactaatacacatgatataataact

SEQ ID NO: 720577 - DNA, 1003 bp, Homo sapiens
tgaktgattgatttttaactagaggggaaaaattcctaagaaaatgggcaaaaattacagattgtcccatttttgtccagtattatcattggaaagggaggaagatgaagaaagagccagtgtttgtggagtttgtttcaggctagaaatagaaaaaggctgcagttgattaaggaggtggccagagaagcaaagtttgttgaacgctgaagatcaccttgtaaaggtggagttcctcaggctttactccgggagccctccctggggagcaagagaaggcagggtcagtgctgagccatcccgggtgtgtggacctgctacgctaggtctggtctggacggtgctgatgggaccggggatgacagagccaggaggggccagaatgaaagtcgcagaaaaccagaaacaggctacaaacttctccagtctgcccaccctccccttccgtttgtttcatgaaaacccatttccaatcagaggaccacaggccagggaacatggtgagcccagccaaagacactttcaggacagatggtatagaaacgtggtactttggtaaagaaatcaaactttaaagagatcaaaactctgacttcatccctccccagacagcatcttgaaaaggcgtcccagagcatcagcaaaggacatctctgggtcagcggggacagaactgtctcttgaccttgaacttaagtcatttctttgtgatgcctgaaacgtgggcactgagcattcatcgttttgtaaaaagaggggacaaaagagtaatattttggacttttttttttctcaaataaaatgaacaaggatggatgcctgggggtggaatggaattatgtgcaacctcagatgatatagaatctgcaggcagtctctgtgctgtacagaagagcccctgccatgcctccctgccccaaagagtggttgcaaattgagttcacgcgggagagtttagaacactgcttggttcataggcagggttggtcggtgtcattcttgt

SEQ ID NO: 720578 - DNA, 1003 bp, Homo sapiens
tgattgattgatttttaactagaggggaaaaattcctaagaaaatgggcaaaaattacagattgtcccatttttgtccagtattatcattggaaagggaggaagatgaagaaagagccagtgtttgtggagtttgtttcaggctagaaatagaaaaaggctgcagttgattaaggaggtggccagagaagcaaagtttgttgaacgctgaagatcaccttgtaaaggtggagttcctcaggctttactccgggagccctccctggggagcaagagaaggcagggtcagtgctgagccatcccgggtgtgtggacctgctacgctaggtctggtctggacggtgctgwtgggaccggggatgacagagccaggaggggccagaatgaaagtcgcagaaaaccagaaacaggctacaaacttctccagtctgcccaccctccccttccgtttgtttcatgaaaacccatttccaatcagaggaccacaggccagggaacatggtgagcccagccaaagacactttcaggacagatggtatagaaacgtggtactttggtaaagaaatcaaactttaaagagatcaaaactctgacttcatccctccccagacagcatcttgaaaaggcgtcccagagcatcagcaaaggacatctctgggtcagcggggacagaactgtctcttgaccttgaacttaagtcatttctttgtgatgcctgaaacgtgggcactgagcattcatcgttttgtaaaaagaggggacaaaagagtaatattttggacttttttttttctcaaataaaatgaacaaggatggatgcctgggggtggaatggaattatgtgcaacctcagatgatatagaatctgcaggcagtctctgtgctgtacagaagagcccctgccatgcctccctgccccaaagagtggttgcaaattgagttcacgcgggagagtttagaacactgcttggttcataggcagggttggtcggtgtcattcttgt

SEQ ID NO: 720579 - DNA, 1003 bp, Homo sapiens
tgattgattgatttttaactagaggggaaaaattcctaagaaaatgggcaaaaattacagattgtcccatttttgtccagtattatcattggaaagggaggaagatgaagaaagagccagtgtttgtggagtttgtttcaggctagaaatagaaaaaggctgcagttgattaaggaggtggccagagaagcaaagtttgttgaacgctgaagatcaccttgtaaaggtggagttcctcaggctttactccgggagccctccctggggagcaagagaaggcagggtcagtgctgagccatcccgggtgtgtggacctgctacgctaggtctggtctggacggtgctgatgggaccggggatgacagagccaggaggggccagaatgaaagtcgcagaaaaccagaaacaggctacaaacttctccagtctgcccaccctccmcttccgtttgtttcatgaaaacccatttccaatcagaggaccacaggccagggaacatggtgagcccagccaaagacactttcaggacagatggtatagaaacgtggtactttggtaaagaaatcaaactttaaagagatcaaaactctgacttcatccctccccagacagcatcttgaaaaggcgtcccagagcatcagcaaaggacatctctgggtcagcggggacagaactgtctcttgaccttgaacttaagtcatttctttgtgatgcctgaaacgtgggcactgagcattcatcgttttgtaaaaagaggggacaaaagagtaatattttggacttttttttttctcaaataaaatgaacaaggatggatgcctgggggtggaatggaattatgtgcaacctcagatgatatagaatctgcaggcagtctctgtgctgtacagaagagcccctgccatgcctccctgccccaaagagtggttgcaaattgagttcacgcgggagagtttagaacactgcttggttcataggcagggttggtcggtgtcattcttgt

SEQ ID NO: 720580 - DNA, 1003 bp, Homo sapiens
tgattgattgatttttaactagaggggaaaaattcctaagaaaatgggcaaaaattacagattgtcccatttttgtccagtattatcattggaaagggaggaagatgaagaaagagccagtgtttgtggagtttgtttcaggctagaaatagaaaaaggctgcagttgattaaggaggtggccagagaagcaaagtttgttgaacgctgaagatcaccttgtaaaggtggagttcctcaggctttactccgggagccctccctggggagcaagagaaggcagggtcagtgctgagccatcccgggtgtgtggacctgctacgctaggtctggtctggacggtgctgatgggaccggggatgacagagccaggaggggccagaatgaaagtcgcagaaaaccagaaacaggctacaaacttctccagtctgcccaccctccccttccgtttgtttcatgaaaacccatttccaatcagaggaccacaggccagggaacatggtgagcccagccaaagacactttcaggacagatggtatagaaacgtggtactttggtaaagaaatcaaactttaaagagatcaaaactctgacttcatccctccccagacagcatcttgaaaaggcgtcccagagcatcagcaawggacatctctgggtcagcggggacagaactgtctcttgaccttgaacttaagtcatttctttgtgatgcctgaaacgtgggcactgagcattcatcgttttgtaaaaagaggggacaaaagagtaatattttggacttttttttttctcaaataaaatgaacaaggatggatgcctgggggtggaatggaattatgtgcaacctcagatgatatagaatctgcaggcagtctctgtgctgtacagaagagcccctgccatgcctccctgccccaaagagtggttgcaaattgagttcacgcgggagagtttagaacactgcttggttcataggcagggttggtcggtgtcattcttgt

SEQ ID NO: 720581 - DNA, 610 bp, Homo sapiens
atttaaatatttcgtgaatgatcaattctgagcaagtgacgattacaggtcatcactatcccaggagagaaggaggaataaaggcttgagaatacatgacattgaaaaccaaaatcctgaagtgatgctgtaatgttgagtttctgagtccacgcaacactgtcacggactcacagatggacacccaatcatctgcggtgcccagggcatgggtgcgaggtgtcccacgcagaagagaacagcccagcccaagccacacgcagcatattttctaagctggtrtttgtccacatgaacagctccagaagctattttgtggcaaaagatacaaaaacttctgcaaattccaaaaacaccttaaaacaagatttattagaacggattttttaaattatcaggagtttttacacactattgtttgtgcaataaatatttttaaatgagtttaaatcgagggcttagaaaataaacattctccctaaaatgatgacaagaatagctgatgttaaagccacgaaaacatcaacatattacaaaaatatcttaaaataagatggaagtttttagttttctttttctttttattgttttcatgtctgctgggctattt

SEQ ID NO: 720582 - DNA, 610 bp, Homo sapiens
atttaaatatttcgtgaatgatcaattctgagcaagtgacgattacaggtcatcactatcccaggagagaaggaggaataaaggcttgagaatacatgacattgaaaaccaaaatcctgaagtgatgctgtaatgttgagtttctgagtccacgcaacactgtcacggactcacagatggacacccaatcatctgcggtgcccagggcatgggtgcgaggtgtcccacgcagaagagaacagcccagcccaagccacacgcagcatattttctaagctggtatttgtccacatgaacagctccagaagctattttgtggcaaaagatacaaaaacttctgcaaattccaaaaacaccttaaaacaagatttattagaacggattttttaaattatcagkagtttttacacactattgtttgtgcaataaatatttttaaatgagtttaaatcgagggcttagaaaataaacattctccctaaaatgatgacaagaatagctgatgttaaagccacgaaaacatcaacatattacaaaaatatcttaaaataagatggaagtttttagttttctttttctttttattgttttcatgtctgctgggctattt

SEQ ID NO: 720583 - DNA, 665 bp, Homo sapiens
ttacttaaacataaaatatttttctatttccagtgttttcctttttgagaaatgtggtaatgaataatcctgaacaaaattattttcctacatttaaaaatatttccttaggatatgaacatgtttaagactcttgaatgtatgttgacaaattgctttccagaaacccagcagtgaaaattagatataatctgaaataatttgatacattaaaaaatcttgttttacttttttcaatattggttcaactgaacacttataaatatgcttgtttgacatttttttcttctataaattatctgggcatgttgttaaacattttctackggaaatttagtgttttgcttgtgaaatggtaaaataaccccttgcaatatttaatgtaaatatttaactcaatttgtcatgtaacaattttatttataaatttttcttgtctttgttttatttattaatttatttatttgagatggagtctcatctctgtcatccaggctggagtgcagtggtgcaatcttggctcactgcaacctccgcctcccgggtgcaagtgattctcatgcctcagccttctgagtagctgggattacaggcgtgcgccaccacgcccagataatttttgtattttcagtagagacagggtttcaccatgttggccaggctgg

SEQ ID NO: 720584 - DNA, 1274 bp, Homo sapiens
atggtctgcttcacaagaagagtcacaatttgctttttatcaagcccctacagctctaggagaaaaattatgacataaatattagtatctagattcattgctatggtggtaagatcacttcataattctttttccattattttatgagcaaaatgtttatagggaaaacgtatgaaatttcacatataaataccaacaaaatggttggaaaaggaaaggctatcattgttggtaatgttcacatatccttaaatttcaccaaacacaacatatgaaaaaatagttgattatttgccttttgttttcaaacagatattgcagctgtagaagaatggttagtaagaatcactttacatcatggactaaatatttatgctactgaaggaactctattggatgttattcgaggtaaatgccaacagacagaagtaaaatggaattcatatattctttcaacaaactttgacatccgctatatgccagattctgtgctaaggtcctagagattaaaaataaataaataaataggagataatcatgacccttgaggcactcacaatctgataggataaagaattaaatacatgtggataaattattaacaaagatctgcaaagagtgctatagaaatgtggaaatacaggctgggcatggtggctcatgcctgtaatctcagcactttgggaggccgaggtgggcagatcacttgaggccaggagtttgagaccagcctggccaacatggtgaaactccatctctacttaaaaaaaaaaaaaaaaaaagttaaccaggcatggtgatgcacatctgtagtcccagctacttgggagactgaggcaggagaatcgcttaaacccaggaggcagaggttacagtgagccaggattgcaccattgtattccagcctgggcaacagagtgagactgtgtctcaaaaaaaaaaaaaaaaaaaaaaaaaaaaaaaaaaaaaaaaggaagtacatattttactggggccacattgagggtcattataaacaatggcttataaagttgattatatttacttattccaaaaaagtaagtagttttttaggtagcttccaaattaaaaaaaaaatgttactaattattcaatagtaattgcaatactgtctttgggactctgatagtttgatatcctatgctactttttaactactgaaatatcaatataaaattgytatatcaatttttaaaagatctgaaatgctaacttacatttgtttagaatgtactgaggtataattgcagcaa

SEQ ID NO: 720585 - DNA, 828 bp, Homo sapiens
attaaagtcatcccaatcaatctaggaccagagaaaatcttatagagtaaagtatatatatatatcatgaaatgaggggacacaccaaagcatgcatctttctcgctgcatttctaatttcatatacaatgaatatttcattcattcctagtccacatacgatgagaacagaagacttcatctcagggagctacagttgtatgttatatccaaagtaccaaagtaaaatagaacagtaacgtctccaatgtttgcgatttttcactcttcttaaattatacaattttgagggcaggaattatgtctattttgttcacctctccattcccctcctagttcagtggctggcaattagtcgatacyaaatagatacgtattaagagatagctattgtacagatcctccaactcttataatatgttaattccatgtagtgggttgaacagtgtctcccaaaattcatgtctacctggaacctcaaggctactacatttggaaataaggtctttgcagatgtaattagtcaaggtgacactgacacaagcagagaagagaatgtcctgtgaatatggaggcagagataggagtgacaccaaggagctgcaaggattgccagagagaggcatgaagagacccttccccagaacctctggacataagcacccttggatgccttgattctagactcccagcctccacacccctgagagcataaatgtctgttgtttcaagccggtgagtttgtggtacttattacagcagccctgggaagcgaatgcactcaaggaaaacaagagaaatgtaaataggtggttgctgttcatcatc

SEQ ID NO: 720586 - DNA, 685 bp, Homo sapiens
gttgcttgtggttgggtctgccatgtggaagaaccttgagctgggggaagcagcttggcctccaagtccactgaagaccaccattccaagatttcctggggaggcggtacagggcagtgatgaagattatgggagccacactgcccagcttcgcatttgggacactcctggggagagcaaragggaagaatgagaggttagggtgatagtaaagattctacttggccaatattattgtattgtggcattgtggtctctggatttagtgtgagttgatagctgaccttttccttgagtgggtgtttttgtttgttctgcagaagcatcttggtggctcctctacctgaaagtccctcgatggggtcagttccagttctccacttctggccccgtctggtacatgccactgcctctcactgcctgggctctctatccttgacaggctgccttgaagttgagcccacactgactttcttgcctcagaccccactactgtgcctgggactcatgcacctttgactcctatggtaggaaagtgcagtagcttcccaggtgcatttctgctgtcctcacccacataaaggttgtatgagaatcgagttcttaaagattggagaaagaaggaagaatgggagcaagatttttcccaatggactgtgaggtcccccacctaaccttgatgtaa

SEQ ID NO: 720587 - DNA, 2775 bp, Homo sapiens
attaataattatgtgaatattattaactatattaatgtttataattttgaagaccttgaaggactggagacagagaagcatttttgaacaccctctgtagcctatgcactgttgtaggcattgatgggtggtaccaaagatgggacactgttcctacctccagagatcttgcaggctggctgcagagagaaggcagagaggaggtaaaagaaaaataaaggcacatgtgtgtaagtcaccccaatgacagtcagttagtcatgggaggctccccagaggagctgtcctgaagctggctgagagaaggcaacatttcaacttaggacagtaatccttgctacatacaatcacacacacacatacacacacacacacacgtgcacacacagactcacatgcaaaagaaaccttcatgcctttctgtaaactttatgtgggttagatggggatggtgatgaggatgatgatgggaaggatgacatcatgttctaaacattgttcggaataacaatgacgaataactatttgtgccaatcaaggtcttctcagaaaagatctcattctaatgctgaactataccaatttctttgatcacttctccaacaaaataattagaaagcgcttatatttccttgaaaggagagcatcctgtgttgtttactaccacttttgaaacctagaaaaaaaatctaaaagttgtttataattttactgtttaatttcacctttgaaatatcaaaaactcagtgcttggaatttgtcctaaattaattgacaaaattgccaacttggactcaaatgcgacttctttcccaccttgtgccacagcatcctcttcatttgattgtgggaagcctcaagtggagccaaagaaatgtcccagaagcattgtagggggttgtgtggcccacccacattcctggccctggcaagtcagtcttacaacaaggtaagaacaggcccagaaaccaactatattgtccttccacacaagccccacaaaatccttctacatttacacagaacccacacagctgaggcatcagtacctgcctctatgttttctgaaggaggaaaaaatatagaaaaataaaaataattatattattttaggttctctactttgaaaatggccaaaattggaatctttttcttgatctaagtagctacatcaaaatctgtaggcgcagtgatttgcaccaagttycgatattgctggaaaatattgaagatgctctgagggtttctatggatatccattgtctcactgtcagatgaaaagagagggaagtttttagaaatgtgacactttgcagtgagggaggacaagagcaaacttacctacagtctgtcacaggcacgattttttttttacacttttgtgaatcattgaattcaatgccgaggctactcatccattcacaaacacaggaaaaaattataggtcatgatccccataaatgaagagtaatcagtccaatcccacagaacctggaccttttgggtattgtttcagtggaacatgcctttcataagttcagttttcttgggtatctcttaggaaacacgcataggaaacaggcccaaccgcctgcatgttttgcttccttggctcacttctacatcagggtgcctgtgctcaattactgttctcccctaaagagccttcttttcacaggtttatgaaatgccatcgacaaacctgatcacattgcatttcactctgctgttgatttgatttttctttactttattggttagaaactccttgctttacagagctttcaccttccacatatttcagattcattctttcctaaactgcgtggtggtctgtgtcctcatggatttatcaaagtgctgccaacatgcactttttacctgtactcttcattacactctggctccgagtggctcacgccagtattctgagctatcacctgcctatgcagtcctagaaagcaagtgatgttctgggatgctctgacactctaggaaggagagaagggcctttctggctcagcctaaacagtagctgatctctctcgtgctccccagtctcctccccaccatcccagcaaatgtgcaaatacaaggtctccgctcctcatggtcctcagagagctagggtgttctgatggcttgaaaaagcaatttggaaattttgagttttggaggtattctctgataggctgatacattttgagtttagagttcccaccccacatcctcacaccctagagtgctccaccagggaacctgtagactgaggacttctgcaccacagatgtctgttgcccagaagcagaaagtgtgtctgcttcaaagttggtggcaatgatgattctttgtcagaatagggcatttctcatatccagtcctttatccccttgaacttactaaagtagaatcaggtctaaaaaccagagttctaatgtttgagagttcctggaactctaagatatataaatgttctttgacaatgccattttgttcatgcaaggtgcttatttccaatcctctttcatttgatgtctagcattttactggattcttacaaccacggtttagtaacattcacaaggaggaagtggaggatccagatggagcaacttgctctgggcacacaacacatttgcaattttataccctcttgatgatgtctcggccagacattctgcccagtcatcaatgccctcttcaattaatatgaaaggacacacttggcatgagatcccagtcgtgcacagaatatacatgagaagtgcgcctttg

SEQ ID NO: 720588 - DNA, 1069 bp, Homo sapiens
  misc_feature 614: n = A,T,C or G
tttattcacatcagttcaacaggacttgaatgaagaaacagtgatcaaagtccaatttgactatgctccaaagttatatgacaacctagaagtcatattaaggactgcaggagagtcatccacattgtcactatttgatagcacaatgccagagataacgacacactgygacctttcaaccatccacaaatatatttttctattactttctaagggacctttaaaattacaaaagaaatcacctagtaccctgaagtgtcacattacaacaggaaaatggagtaaaaatgcagaaactggctgggcgcggtggctcacgcctgtaatcccagcactctgggaggccgaggcgggcggatcacgaggtcaggagatcgagaccatcctggctaacatagtgaaaccctgtctctactaaaaatacaaaaaattagccgggcgtggtggcgggcacctgcagacccagctactcgggaggctgaggcaggagaatggcatgaacccgggaggcagagcttgcagtgagccgagattgcaccactgcactccagcctgggtgttgtgttttgactccgtcttatggggagggggaaaataatttaaaaaaaatgcanaaactggtgttctataaaatgtatatggatccccacagtagccagcccagtttgactagatgcctgaaactgcagtgaaatcaacagccaacaaatactaagtcttttaaagagacatttaaatatacaaaacaggctgcgtcccaaaaccctcaagtccaaacatcacattttctccacattcatgagagaggaacaatgattgctttccccttgatgcaaaccattgacaaagagattcagaaaagttggctgatgcccatgaaggttgagggggacagtaactagtgtctgaactaggcttaaaagtatggggacggccaggcgcggtgactcacatgggtaatcccagcactttgggaggccgaggcaggcggatcactggacgtcaggagttcaagaccagcctggccaacatagtgaaacccctgcctctactaaaaaaatacaaaaaa

SEQ ID NO: 720589 - DNA, 1276 bp, Homo sapiens
taaaataactaatctaaaaactggttaaagagcaaagcagtgctgctcactgagacacggaattcaagaagaatatggatttgctgggagaaatgacaagctcagtttgcaacatgttgagtttaagactcactatctggccggagatgatcatagggagagatagatagttagacctggagaaaatcatttggagacaaaggartaatagccaaagccatggatgaaatgtctataaactatgggaagaatgagatatcaggttgaaattattaaaggtcaccaagtctaaccatctatataacactttaccctgcttttaagtatttacctgtaacaaataaaaaaaaaaatagaacatcttgtctccaaaaccagtctgttgaaactttttgttatggttcattcaaatcactttttacattgaattattttccttgatattctctttttatccccacccattcatttaaggactccaactacacatattttgtgtgcttgaagttgaagtacaactcacttttgctctctgtatattttttgtgttttttttctctgtttcattttggatagtttctattgctatgacctcaagtcaactaatctttccctatgtaatgtctattttgcagttaaaccaacaaatgtgtttttatcgcagaaagtgcaacgtccatctctaaaagttgaatttgggtctttttttttttaagctttgatgttctacacaacatgctcactctttcctttagttattttatatgtaatgtagttaactgtcttaatgctcttgtctgctaattcttacatctgtgtccattagacattattttcaattaaatagcttttctcattatcttggtcaattttttctttaattttttatttatttatttagttagttatttatttttgcaggactagtaacttttaactggataccagacatcgtatatgttgccttgccaggtgttggatatttttgagtccctatagtcattcttgagctttcttctgggaaacagttaaattacttggaaacagtgtgatcctctagggtcttacttttaagatttgttaggtaataccaatgtagcacatactgaagcgctaatttttcacagggttgccaaatttagcaaatagaaatattgcacatacagttaaatttgaatttaaaataaataatattttagtataagaatatgtttgtgttatatttgggatgtactgcactatagcagcctgcttgtaccccagattccactgtttg

SEQ ID NO: 720590 - DNA, 1157 bp, Homo sapiens
gaattactttgagccatccacacagaggcatgagatctgacactggaagacaggagtctattgtaactgatgtaaaacaaacaaaatcttggggaaaataatatcaggatagtattttgattctggatttattttaagcattgtgcacatcactgatttgcaaagcgtggtcctcacaggtggcattggactccccctgagcttgtgagatatgtaaataaatgggtgccgtgctgacctacttcatcagaatctcaggggatggggctgaggaattgtgcttcagctacttctccaggtgatgcctatgcatgtaaaagtttgaaaacatggtatagatgtggtttgaatctctcgaaacttagaaatcacttaaagtctgcctcagatgaatgtatctgcagcactttgtgtacatgcctgaagtgccatcagatcagctagcgctctctcaatctcaatctctctctctctctctttcctctttaaatatacctcaaytggaaaatattgaaaaagtagcagatagcactgagttcttgataatatctttgtatatttttatataattatttccttacttaaaaatgaactagaaagcaaaagaaaaaatgagcaacaaatataaatatattgtttaaaatgaaggtaaatgtaaacatattttacatgaaaaagtaaagcctttaatggcatttgttatttttaaaaatctaaaaataaaaatgccagtgagaatgatatacccccacctcagagaatggtttctcctggaagcaagaaaaagaaaaagaattagaggataaggttccagttgtattagtaacattttatttttaaagaaaacactatgtaaatcaacatgaaaaaatattacttctgataaagtctaaaaagtgggcagataagaaaatgctgtatcatactccaaattcttgaagtattacaataataaaataactcaggtattttaaaatccaaaataaaatataatctctcaattaaaaaatggttttttttagaacaatgataaagtgaacataaggagccaaacatttttatacactatggataagagtgttaattggtaacacatattatgtaagaaactatagttggaatcatacagacattccagaacagcttctttcacctac

SEQ ID NO: 720591 - DNA, 603 bp, Homo sapiens
ttgagacaggatcttgctttgtcacccaggccggagtacagtggcatggatcaaagctcattgcaaactccacctccctgggctcaagtgatcctctcacctcagcctcttaagtatctgggactacaggtgytgtgccactatgaccagaaaatgtttttattttttgtagggcagtggtctcactgtgttgcccaggttggtctgaaactcctgggctcaagcaatcctcttgccttccaaatgctgggattacaggtgtgagccactgtgcctggccctgtattaaccttttagaaaaggtaatgggggaagagaagagaagggctaatttatgaggaaactatgtctcagtgtgctttaattttgattagttgattactagttagaataaacattgtttgcttttgttacgtaacaactgctgtttgtcttataattttttatgcagtttatgtattaacaatatgaatacttcatcatgcttgttttaaacacttttccagtttgcttacctttacattttattttttaaagtcaagtttattgtggtatactttacacacagggaaattcatcctttttagtataaagttctacgca

SEQ ID NO: 720592 - DNA, 603 bp, Homo sapiens
ttgagacaggatcttgctttgtcacccaggccggagtacagtggcatggatcaaagctcattgcaaactccacctccctgggctcaagtgatcctctcacctcagcctcttaagtatctgggactacaggtgctgtgccactatgaccagaaaatgtttttattttttgtagggmagtggtctcactgtgttgcccaggttggtctgaaactcctgggctcaagcaatcctcttgccttccaaatgctgggattacaggtgtgagccactgtgcctggccctgtattaaccttttagaaaaggtaatgggggaagagaagagaagggctaatttatgaggaaactatgtctcagtgtgctttaattttgattagttgattactagttagaataaacattgtttgcttttgttacgtaacaactgctgtttgtcttataattttttatgcagtttatgtattaacaatatgaatacttcatcatgcttgttttaaacacttttccagtttgcttacctttacattttattttttaaagtcaagtttattgtggtatactttacacacagggaaattcatcctttttagtataaagttctacgca

SEQ ID NO: 720593 - DNA, 1142 bp, Homo sapiens
aactcttttcccattcccctgttgagtgtgggagcccagagcagaaaatagtttcctcccctcaacccatccccctccatcagtgagcctataactcatttcaagcctgctgttgaaacctaactttcctcagccagaacagccacaagaagttatggtttattttccccctcctcccttgctctgctctgccatccccccagtatagaagactatgtctggcttttctatttttgctgttgatgagatagatacagtgctaagggtaagacagtgtgttcaaaatagtgaggatacataggatgaatttgttttaaacaatattttagttatatttccaaataatatgctgaatatttttttcttcaacctccagaccgcctttcaggtgaagcatctctaaaaataatgcaatgggtccaattgttgatctgaaaaaagtacaataaaaacactacaagagcatccagaagtctggaaacacaggtgaaattgtgcacttcttgtttcagatttacarctaaatccactgccttaaatgtagagattcatcacctgaaacatggttgaaaacaaaaatatattgagtattttttaaatgtgaataccataattttaaaatgccattttctcctatgctttgtcctgtaatttaaaaaatttaacaagtggacactatgattggtgtacattcctgcctacaatcttccaagttaattggattaatgtaagagctacttatctacacataaaccatcctatgaaaaaggctgaccatttcaaattaggagtgagcttctaatatttatcagaaaataccaaaactgagcttgatttggagctttgcattatagtgaaatcctgaagcctccaataagagtaggaaagggtcacagtatcctatttctcttttactctgaaaataaaattctaattacataaatattctgtctgtattacacaataaatctaaataactgaaagaaaacttttgcctacaatcttgtcacctcagcaaatccaactttttgtttggccctgatcttttctagccattgtggataatcacagtgggtgccttctgccattttcaattaatacaatttcagaagcatgttccatgttgctgtgtagtccttgta

SEQ ID NO: 720594 - DNA, 1142 bp, Homo sapiens
aactcttttcccattcccctgttgagtgtgggagcccagagcagaaaatagtttcctcccctcaacccatccccctccatcagtgagcctataactcatttcaagcctgctgttgaaacctaactttcctcagccagaacagccacaagaagttatggtttattttccccctcctcccttgctctgctctgccatccccccagtatagaagactatgtctggcttttctatttttgctgttgatgagatagatacagtgctaagggtaagacagtgtgttcaaaatagtgaggatacataggatgaatttgttttaaacaatattttagttatatttccaaataatatgctgaatatttttttcttcaacctccagaccgcctttcaggtgaagcatctctaaaaataatgcaatgggtccaattgttgatctgaaaaaagtacaataaaaacactacaagagcatccagaagtctggaaacacaggtgaaattgtgcacttcttgtttcagatttacagctaaatccactgccttaaatgtagagattcatcacctgaaacatggttgaaaacaaaaatatattgagtattttttaaatgtgaataccataattttaaaatgccattttctcctatgctttgtcctgtaatttaaaaaatttaacaagtggacactatgattggtgtacattcctgcctacaatcttccaagttaattggattaatgtaagagctacttatctacacataaaccatcctatgaaaaaggctgaccatttcaaattaggagtgagcttctaatatttatcagaaaataccaaaactgagcttgatttggagctttgcattatagtgaaatcctgaagcctccaataagagtaggaaagggtcacagtatcctatttctcttttactctgaaaataaaattctaattacataaatattctgtctgtattacacaataaatctaaataamtgaaagaaaacttttgcctacaatcttgtcacctcagcaaatccaactttttgtttggccctgatcttttctagccattgtggataatcacagtgggtgccttctgccattttcaattaatacaatttcagaagcatgttccatgttgctgtgtagtccttgta

SEQ ID NO: 720595 - DNA, 991 bp, Homo sapiens
taaaaatacaaaattagcctagcgtgtcagtgcatgcctgtaatcccaactactcgggaggctgaggcagaagaattgcttgaacctgaaaggcggaggttgcagtgacccgagattgtgccacggcactccagcctggggaacagagcgagactctgtctaaaaaamaaaaaaaaaaaaaatcaagaagacagtttcttaacatgctgattatagttatttgtggtaactgatttagttttatttcttgttggcttctatttcttctttacaataaccccaaaatgttattatgaaagaagcaacctaaggttaagaggactcagcagatatccctgactttgggttaacatcttgaaaattaactacatttttggttttcatcttcaaaaactataagccataacaatttgaaataaacacaatgccattaatgttttgaatatattcatttttcttagaagttaaattatgattctgtttatattctgtagttaaatttcaaaacttttaaatatgatacttaaggctataaaattgcactgtctaatatggtactcactagacaaattcatgggctattgaacacttgaaatgtggctggtcctaattgagaggtgctataagacataccatattttgaaaacttccagtgaaaaattgtaaaatacattcttaataatttttatattgactacatgtaaaaatgacatgtatatataggataaataaaatgtattatttaaattaattttaccttttttttttaactttttccatgtggttacgttaatcagatcagcatgcaacagaaaccacattaggtacctcaaccaaataggtatttctctttctcatgtttctagaggtgggcactcctggactggagtggcagtttcccgacatcatcaacctccagactctttctgcctttcctgtttcaccatccttggggtggggcttttctcttcctggtcactttctagtcaaa

SEQ ID NO: 720596 - DNA, 991 bp, Homo sapiens
taaaaatacaaaattagcctagcgtgtcagtgcatgcctgtaatcccaactactcgggaggctgaggcagaagaattgcttgaacctgaaaggcggaggttgcagtgacccgagattgtgccacggcactccagcctggggaacagagcgagactctgtctaaaaaaaaaaaaaaaaaaaaatcaagaagacagtttcttaacatgctgattatagttatttgtggtaactgatttagttttatttcttgttggcttctatttcttctttacaataaccccaaaatgttattatgaaagaagcaacctaaggttaagaggactcagcagatatccctgactttgggttaacatcttgaaaattaactacatttttggttttcatcttcaaaaactataagccataacaatttgaaataaacacaatgccattaatgttttgaatatattcatttttcttagaagttaaattatgattctgtttatattctgtagttaaatttcaaaacttttaaatatgatacttaaggctataaaattgcactgtctaatatggtactcastagacaaattcatgggctattgaacacttgaaatgtggctggtcctaattgagaggtgctataagacataccatattttgaaaacttccagtgaaaaattgtaaaatacattcttaataatttttatattgactacatgtaaaaatgacatgtatatataggataaataaaatgtattatttaaattaattttaccttttttttttaactttttccatgtggttacgttaatcagatcagcatgcaacagaaaccacattaggtacctcaaccaaataggtatttctctttctcatgtttctagaggtgggcactcctggactggagtggcagtttcccgacatcatcaacctccagactctttctgcctttcctgtttcaccatccttggggtggggcttttctcttcctggtcactttctagtcaaa

SEQ ID NO: 720597 - DNA, 632 bp, Homo sapiens
aggacaccttggtttgctgtgagcagattgaacacctaaggtgaatatgagacccagcttctagacacattaggatgtttgcctaacctccttttgaacaatccagtagtgatcaaggaacccatatattgctttgcagtgtaagcaggctgaaagcagaataccacatatcaatgggtgataaaattaaattgttctttggattataatatggaagtccttctttttctctctatagattccaaatcctttatttgatctggctggaataacgtgtggacactttctggtacctttttggaccttctttggtgcaaccctaattggaaaagcaataataaaaatgcatatccaggtaattataccccctgattcactgcctaatgatgatgaacccatkacaagacaatgaaacatgctcattcctaagtgaattatttagttattctttctgcttttttggttggtagcttacttaggtaataccacatagaatgtcatttggaattagtgatctccttgttttctttcttttcttctttcttcctccctccttccctttcttccttctttccttcctttctctctttctttctttattttttgtcctgtttaactatttatccaggact

SEQ ID NO: 720598 - DNA, 616 bp, Homo sapiens
ttttgagacagggtcttgctttgtcatccaagctggagtgcagaggtgcaatctcgattcactgaaacctctgccccctgggctcaagtgatcctcctaccttgrcctcctgagtagctaagaccacagacacaccaccacgcctggctacttttttgtatttttagtaaagacaaggtttcaccatgttacccaggctggtctcaaattcctgagttcaagtgatctgcctgccttggcctcccaaagtgctgggattacaggcgcaagccaccacacctggcctggcttatccattttcaataaatgaatatttcaaaagtttgttctaacatgttaaacgtgcctgctatctgaaattctgataagccatgcaaaagtaattttctcaatttaacaagtatgaatttgatatgaggggtaagagaatttttatacatttcaaagtaaatcaaaatgaaaggaaattcactattaaagtaatcaagagttaatacaggctaatttctctgtcaatgcttcaatgaattcatgctgagaatgtgtttcattgaactcacttttttagcatataaaacaatcttttggacttgacctgtttctgcaaagcactgaa

SEQ ID NO: 720599 - DNA, 967 bp, Homo sapiens
ccttaacagcatctcatctttgcacagtattttgcaaggctcactctggcacacacacacacagactcccctgtgacttagctagtagagcaaagtcagtttgggcccgctctgcctgcagtagcggtggtataccgttggtaattcctgtggatagcactttggagtctggaagttggcccactggatgtyagaaactgagagaccaccttagtcttcatcagctctaacctaacatcatataggtgagatgactgtggcatctgggggttcctaatgtgatccaattaagaaactaagaacttgagatcaaattccaacctgaagccaaagctaattaaaaatgttttaaacccagaagcaaaattactgaccaatagctctacccttagattcccaggcggtttatatcagggcacctctctctctttaacattcatatcttatctcacatggaggtttggagggcagttcagttctaaactagctgcctgacgtttcctttggaaccagtttatcctctacaagtggaaacagccctgtgtcactgggggccttccttgtgtatgtctgaagaagtccccacagcagaactgccagaaacaaaatgtctttccctgccatggaattctatgaatcgtagaagccatcttggtaaaaatgtccacaggagagggagacagaaggaaaggagggaaggacacaggaacttctttcatctaagaggatctctccagatcattatatattttaggatccaaacttctttgccgatggttctcaccagaggcagtggagggcaggaggtagccccctcacatggccccttcctccaggacccagctccacgcttctcccaacaagggagaaggaacatctcagaccctggaggagggagccctaaggacacagcagagtagaggattgaagctgggtccttcctgttatcatggtagggtggatggaa

SEQ ID NO: 720600 - DNA, 967 bp, Homo sapiens
ccttaacagcatctcatctttgcacagtattttgcaaggctcactctggcacacacacacacagactcccctgtgacttagctagtagagcaaagtcagtttgggcccgctctgcctgcagtagcggtggtataccgttggtaattcctgtggatagcactttggagtctggaagttggcccactggatgtcagaaactgagagaccaccttagtcttcatcagctctaacctaacatcatataggtgagatgactgtggcatctgggggttcctaatgtgatccaattaagaaactaagaacttgagatcaaattccaacctgaagccaaagctaattaaaaatgttttaaacccagaagcaaaattactgaccaatagctctacccttagattcccaggyggtttatatcagggcacctctctctctttaacattcatatcttatctcacatggaggtttggagggcagttcagttctaaactagctgcctgacgtttcctttggaaccagtttatcctctacaagtggaaacagccctgtgtcactgggggccttccttgtgtatgtctgaagaagtccccacagcagaactgccagaaacaaaatgtctttccctgccatggaattctatgaatcgtagaagccatcttggtaaaaatgtccacaggagagggagacagaaggaaaggagggaaggacacaggaacttctttcatctaagaggatctctccagatcattatatattttaggatccaaacttctttgccgatggttctcaccagaggcagtggagggcaggaggtagccccctcacatggccccttcctccaggacccagctccacgcttctcccaacaagggagaaggaacatctcagaccctggaggagggagccctaaggacacagcagagtagaggattgaagctgggtccttcctgttatcatggtagggtggatggaa

SEQ ID NO: 720601 - DNA, 1840 bp, Homo sapiens
  misc_feature 793, 794, 795, 796, 797, 798, 799, 800, 801, 802, 803, 804,805, 806, 807, 808, 809, 810, 811, 812, 813, 814, 815, 816,817, 818, 819, 820, 821, 822, 823, 824, 825, 826, 827, 828,829, 830, 831, 832, 833, 834, 835, 836, 837, 838, 839: n = A,T,C or G
  misc_feature 840, 841, 842, 843, 844, 845, 846, 847, 848, 849, 850, 851,852, 853, 854, 855, 856, 857, 858, 859, 860, 861, 862, 863,864, 865, 866, 867, 868, 869, 870, 871, 872, 873, 874, 875,876, 877, 878, 879, 880, 881, 882, 883, 884, 885, 886: n = A,T,C or G
  misc_feature 887, 888, 889, 890, 891, 892: n = A,T,C or G
tggcttggccttatatgttacattttaggtcactcccactcactttgccataccagctctgtattatgtgtacaaaattccatgtcttattaatgcccccagaattaaaacatccagttggtaaaacagtaccagacacatattaggcactccattcaaaagcatttggtgaagaatttgcattccatcaacaagttctgaacaagtttggcattaccaaagatgaggacatgaaatggtaaaagatgatggtaccatcagaggtgaaatatgggttctttcatgttgagtttaacgatctgtatgcatatatagccatggaaagagtatggtacctaatattaaaatatgtaagatggtcccacattaccaggaatgctttttagaaaaaataatgcacatggtaagtgtctaaacaatgtcactaatgtgtaagtctatgaaaatgtgactccagatttttatctccatccccaatgttaccactttctggtagatgactaacaataaaatgaatgttgtgttctttttgttcattttgttcttttaacttataaaacatcgtatctgtaaagaggaatagttgcattgtctgctctggttaagaagagatatcagaattatcttctgaggaatgaaagggatgcygtgggaggggaggtctaaccatgaatttattttacctgcttggctaacacaatgctccaaatggagccagtcatccttgtgtttttataactcacattagaacttaagttggttcagcatgccagcagagctttgctcaaagctnnnnnnnnnnnnnnnnnnnnnnnnnnnnnnnnnnnnnnnnnnnnnnnnnnnnnnnnnnnnnnnnnnnnnnnnnnnnnnnnnnnnnnnnnnnnnnnnnnnngcagagtgatcatatttatgctctatccattcacttacacagaaattcatatttacagagtacctcctatgtgtgccaggcactatcttaggacatgaaatgcagcagtgaacaaaacacaaaaaatgtattgccttcatagatttttacattaaaatgtggaaagagagtcactcacacacaaaaaggacaaacaaaacatataccatattagagataggcactgtataccatattggtgataggcactattaataaaacgaatgaagtgggtagaaagtgccaagggttcacaatttttaatagggtagtcaggtaaggcctcgggagttgttgacatgtgactaagacttcacagatgagggagtacattatttagatatatgggggaagagcagagggaacaagtgcaaaggcctgaggcaagaaacatcaagtgtgactggagctaagtaagccagatgtgatgtcagagaggaacagagtgaggccgtacccgcagagctttgcaaatcatgaaaagatgttggctttacttgtgagttagtcaatgaagtattcagaacaaaggtgttacatgactttacttgttttttagatggtgtgattctagttgatagggtagaaaaccaattgtaggaaaaataaatgatggaagtaaggagagctactacagtaatgcatccaaaaggtgatgataacagtaattattgaggtggtagctcaatttctggatatttgttcattattgaggtaaaatttacattattcatactgtgtaccaggcactgttttttatgatatattatggtttaaaaaagacttaacatgaggtctacaatcttagcaaatatttcagtgtacagtacagtgttgttaactataggcacaacgttgcatgcagatccctaggacgtattcatcttacataactgaaattttacactc

SEQ ID NO: 720602 - DNA, 533 bp, Homo sapiens
  misc_feature 3, 4, 5, 6, 7, 8, 9, 10, 11, 12, 13, 14, 15, 16, 17, 18,19, 20, 21, 22, 23, 24, 25, 26, 27, 28, 29, 30, 31, 32,33, 34, 35, 36, 37, 38, 39, 40, 41, 42, 43, 44, 45, 46,47, 48, 49, 50, 51, 52, 53, 54, 55, 56, 57, 58, 59, 60,61, 62: n = A,T,C or G
  misc_feature 63, 64, 65, 66, 67, 68, 69, 70, 71, 72, 73, 74, 75, 76, 77,78, 79, 80, 81, 82, 83, 84, 85, 86, 87, 88, 89, 90, 91,92, 93, 94, 95, 96, 97, 98, 99, 100, 101, 102: n = A,T,C or G
acnnnnnnnnnnnnnnnnnnnnnnnnnnnnnnnnnnnnnnnnnnnnnnnnnnnnnnnnnnnnnnnnnnnnnnnnnnnnnnnnnnnnnnnnnnnnnnnnnnnngtgaatatctattgactgcctttcaaaaattgggcatttaattttaacaataggcaattcwtgtcttgtttagggaaatgaatgatttttatatattaattataaaatttgccctttgctggtattatgttagtctaaaaatatatttttattgtttatcttaggctttatttttacctaaacttcctacaaaaagataatttcatctttttcttttaattatctttacttagatttctctctattgactggttgcggtgactattggttccaaaataactgtaataattaatagtggacatctttactttaacaagaatgcttcttattcacaaagcatgcttctagcttttgttttaacatacacctacatgcacctccattcccaccctcaccaccctcaacacttaacacaggacaagtgtgtgctg

SEQ ID NO: 720603 - DNA, 638 bp, Homo sapiens
gcctaaatatagaataagcagcttcaacatgtgccataatttagattctagagatatttaattattggaatttatcttaacctctaaaagcagttactctttgctatttctagatgatcagatttaatttgaattcaatttcttccaagggctgagattaagatgtctatttagatatgagtagccatggacatattttttgaagaaaagatttagctatatacatccatacacacaaatcattttcctgtagtacttctcttgaaattcaatttcttatttagcatacttcatttacttgaaaattcaatagcctatttaacatacttcattttttcctyttaatcttcacagtgttcaataaatatggtcaataaattttttatgataaaatacagtcatcatgatgataaaatttgttagctttatcctgactctatatgtagctttatttgtattatttagttttccacatactacatcctatctttgtaagagaagtccctaaagtatgggtggtgcataattccaagacacagtattgaaaatagcctaatataataatttaaagtgacatctctttcccaaatttcccttttaaatgtacatactttatctgcttaattcttattaagtgc

SEQ ID NO: 720604 - DNA, 638 bp, Homo sapiens
gcctaaatatagaataagcagcttcaacatgtgccataatttagattctagagatatttaattattggaatttatcttaacctctaaaagcagttactctttgctatttctagatgatcagatttaatttgaattcaatttcttccaagggctgagattaagatgtctatttagatatgagtagccatggacatattttttgaagaaaagatttagctatatacatccatacacacaaatcattttcctgtagtacttctcttgaaattcaatttcttatttagcatacttcatttacttgaaaattcaatagcctatttaacatacttcattttttccttttaatcttcacagtgttcaataaatatggtcaataaattttttatgataaaatacagtcatcatgatgataaaatttgttagctttatcctgactctatatgtarctttatttgtattatttagttttccacatactacatcctatctttgtaagagaagtccctaaagtatgggtggtgcataattccaagacacagtattgaaaatagcctaatataataatttaaagtgacatctctttcccaaatttcccttttaaatgtacatactttatctgcttaattcttattaagtgc

SEQ ID NO: 720605 - DNA, 664 bp, Homo sapiens
tctcagatgagaaaactggtgcttatagaggtcaagtcattcacagctggcagacaagaggtgaacttgaatgcagcccccacacgctcatgatattctttctagtgtcaggggctatgtggtacctaacccatcctcaattcttgaaaagttggctgctcccagtgtcccgttcatcctaccaattgtaaatcatcctgtaattcattccttcattcctttttctttcttagacgcagggtcttacrctgttgtccaggctggaatgcctggactcaagcaatcctccagcctcaacctcctgagtagctgggactataggcatgcaccaccacacctggataatttttcaattttttttgtgtgtagatacaggatctagctatgctgcccagcctggtatcaaacttccggcctcgagcgatcctcccaccttggcttaccaaagtgatgagattacaggcatgagccactctatgcccggaccccattccttcttattatcatcttatccattttatgttcttgactgtccctccttttcctgccttttcaacactcataaccccatgcggggaagcatagtacaggtaagagcatagaatcctcacatctgaggcctggctccatgcttttctacctgtgcagcctatagctagatatc

SEQ ID NO: 720606 - DNA, 664 bp, Homo sapiens
tctcagatgagaaaactggtgcttatagaggtcaagtcattcacagctggcagacaagaggtgaacttgaatgcagcccccacacgctcatgatattctttctagtgtcaggggctatgtggtacctaacccatcctcaattcttgaaaagttggctgctcccagtgtcccgttcatcctaccaattgtaaatcatcctgtaattcattccttcattcctttttctttcttagacgcagggtcttacgctgttgtccaggctggaatgcctggactcaagcaatcctccagcctcaacctcctgagtagctgggactataggcatgcaccaccacacctggataatttttcaattttttttgtgtgtagatacaggatctagctatgctgcccagcctggtatcaaacttccggcctcgagcgatcctcccaccttggcttaccaaagtgatgagattacaggcatgagccactctatgcccggaccccattccttcttattatcatcttayccattttatgttcttgactgtccctccttttcctgccttttcaacactcataaccccatgcggggaagcatagtacaggtaagagcatagaatcctcacatctgaggcctggctccatgcttttctacctgtgcagcctatagctagatatc

SEQ ID NO: 720607 - DNA, 1795 bp, Homo sapiens
atcatctggcctttccttgagtctcatatttttgtaggtctcccacacatatgtagacaaataaaattgatttctttccttttaatctgttttagtcattttagtttgtagcccagccaaaaaacctaagagagtagaaggcaacaatttttccctctgttacaatatgtagtttccagtactgagtggatacaaatggtagggaaagaataattttttttcgaccctcataggttcttacttggaatggacccttgtaacaaaaggcagattaacaagagaaaagcaaacagaagtttattatcatgtatatttcatatatacatgggggacatgcaggtaatagttttcaaaaggtggaggctttgaattacagtttgtatatcatcttcaactatgaacaatacatttttagagatgtatcaagacaaaggaaaaggacattaagcctctatgaatagcaacttgtggaaagacaaacaaattacagataaaggctagttagtaaagctgttcaatgcctagtcctcttgtagcaactccaggcccataagtgtctaaagttatcttccgtggttaacctttgttctacttaaccttttgtctttggaaattgatgtcctgtttttaggcaaatagaaggagggtagaaagctttactgtatgtgcttcttctgaattgccttcagctcaatgatctttcatattttgtgttgacatattctggtcttccactattcttaataagttaaataattattgaataaacttataaaaaacaagtaaattcgctctccctgatcaggaatttcaaatactgactttgatawtgccattgaaacactactcagaagataagaacaatacttattattatagttgtaacaatattaaaatatttaacatatagagtttctcccacttttgttttcccccttaccccaataattgatataactagagtatttcatgtattatttctttttcaaatgataaaacaattgtctcaccctgccaactggaaattcaaaagtctcaaaaagccagaattctgtattctttgttttctgaagatattcataaccaccaaagagttaaatgtaatttctattagagaaaagatgagcaaatacattaaattttactatcattaaaaactttttaatgatactattttactatcattaataatactattttactatcactaaaaacttatttactctatggcccttcaaatggagaaatgtaaacagcttccccaaaatgagccacagataatgcagagaagttaaggaaatctacattcagttggccaatctcagaaaagattcatcagctttaatcttattctcttgattactctgaggtaaataaagtacatgaggtaaaggcagaatttgagccatggttggagtaaaggaggcatggtaaggcaaacacaatgtaaatgaaggtacaaatctggtgtggacttagcagagagtagaaacagaattcactcaagaggaggtactaactgaagaaggttctaataggatgtctcgagatgtgccataaaaatatagaaaaaaataagccaataaaatgatgaaacaggtggtatacattatgcaaaactcatttgtctaaaaaagacaaatctctcatctgggagtaaatacatgctacagagaaaggggtttcatattacctgtaataatatgtttgttttacagttttaggaatttaggtctgagagactcctagaaggcaggaaagggtaatcatgaattcttttaaagaaaatatttca

SEQ ID NO: 720608 - DNA, 644 bp, Homo sapiens
aattggtccattgattagccatgaaggtgagggaggtgttgtagacgacggtttacgacatgtttccctcattaaagagatagtgagatatagaatttctatgctattgtcaaggataaagctgagtcaaattcttctcacaaacccagcaactttatagatcttaatcataatgtagtgaaaaattgctcattgtgctaattttaataaagactctcttcagttatctgattaaatttagcaaaaggtagtaaaggagagtggttgctcatgtgtaacatggagccagcattgctgggttcgcatccttttcctgctacttactagctgtgtggtaaatcaatttcattatcatgagagtcctaggctgttttgtgaagaattaataagttaatacataaacccagttaggtagtgtctggctctggcaagctcttaataaatkttagttgtatcattttagtggaaatttattttcactgatgtcaggaagctatattacactttgaacatagaggagtgaaagtcaaactgttctgctgatgaaggagacactactttttctttgtgatttaaaaaaatgttacatgtttacttaacgatgaaaatatattttatggattagcttcacacttcaagatgca

SEQ ID NO: 720609 - DNA, 614 bp, Homo sapiens
cacatctgttctctaaatcagcttctcaaagatacatttcattaaaatcaatcttgccaacccttgtcacttagtcattgactctctgttactcttttactgtcacctttcttgacaggattttgacaagatccagaaggtcagttaagttctttgctgctcttttccattaatggtttattaactaggcaaggctaaatatattcttttctattatgtatctctagccaaaaaccggctctgcagaacagtagatttcttcccaaataccatggaagtatcatctccctcagtcttagaaagagcatgcatgcagatgttttcagttacacttagacatagtttttgttttattaactacagtgggcttgagacgtttttctctttctgataaaatcagcatttttttcagagttcrtttaaattaatttgaaaatatcatctttttcatttttccttccaggttgcttttttcctttctctcagacctggatttagaatatttctcttattgttaattatattccatagaagtcactaaaatatctctctcagttaacacccaattaactgaaggactttagaagtaaccttcctctgaagcatactctgca

SEQ ID NO: 720610 - DNA, 1121 bp, Homo sapiens
ttgaagacacattaaaatatatttttaaaagtaataaattggtctctgagagattccaaagtccaaagtcagggactttggaggccatctgcctaatataatgtgttcaccaatgtccttgtaaaacaagctacattcctcaactttggaaacctactcttccacataaatattttccagagctgagtttaacattttaaacttagcaggcttttaacattttagctgagctggttttaacattttcctgaccctagataacatgaccaaaatttatttggctttcagccttataacaatgctatccattaattttcatctcgtgacaattttagccatgcttccatctttccatagctttatcatacactacaggtgttatttaacacttttttgggatggtatctgtatagattaaataatgtttgctttttttcctggatgyaccataatgttaattcattagcattgaactcatgatcaataggactataactcatccctgaataatgcttctataatacatgtatttcttaaataaggaacagcacagacttcttgctcttaagaaccttagatagcactttaacactatgcttagggttattttaaactgtaaaatcaccaacaaaaagcacaaaaatgtgaaaaatgtggtactgaataggccaccaaaaagaaatatgttgagtattctcaacatatatgaatatatgagagctgaagcaacaagacagaacacagtcttattctccttaagctgggaaagcatgcatccctcaactcaaattctttgctgctttgtgcatgtctgcaagtaatcaggaaaacactatgaatattgattttggggtttcaaatacatttttagcaagtaagaaagttctcagatagggaatctgcaaatattgaggatcaattgtatctcaatttccagtatcttctctcactaaatctttgtctttaactacaccaggtgctactatttctaaactgttttttcagattctccggtgctgaatctctgtttaagcttattcattgtcctaaatgcctttatctgacttactgtgcatcaagtgccttactccaaggtccaattagttaacaatttaccctaa

SEQ ID NO: 720611 - DNA, 597 bp, Homo sapiens
agttatgaagaactctgtaaggtttgtttatccttgtcaagaactaattattttagaaaccaaatatagattacatagagaaatgttataaaatcatcttgggaacatcttgaggatttgagaaatcattcttcacccttatcaggaagaattagaacataacacaaggtaaatattaaagtttcaggttgggaaccaataaataccagagtatagctattctgttccaaccctatttacaatcaagcataatatgctaaatgagtgcacaggtttataagtacacaaaagatgattagaagtaaactgaatccatccaagatgaggctgcacaacatgagaaccagattgagctataggaactgaggctggcagcaaggaagtagaaaaatcacttcacaaatctattctctttaccaaggccagagggatcattatggaacaaaactcagtctcatgttcctccttgaaaccatccaaacgttctycattgtttttaataaaatgcaaagtttctaacatgttccatatgctactttatcctgcatctctgtcttctcaccacaaacccacatgatgtttacttttcctttgttc

SEQ ID NO: 720612 - DNA, 597 bp, Homo sapiens
agttatgaagaactctgtaaggtttgtttatccttgtcaagaactaattattttagaaaccaaatatagattacatagagaaatgttataaaatcatcttgggaacatcttgaggatttgagaaatcattcttcacccttatcaggaagaattagaacataacacaaggtaaatattaaagtttcaggttgggaaccaataaataccagagtatagctattctgttccaaccctatttacaatcaagcataatatgctaaatgagtgcacaggtttataagtacacaaaagatgattagaagtaaactgaatccatccaagatgaggctgcacaacatgagaaccagattgagctataggaactgaggctggcagcaaggaagtagaaaaatcacttcacaaatctattctctttaccaaggccagagggatcattatggaacaaaactcagtctcatgttcctccttgaaaccatccaaacgttcttcattgtttttaataaaatgcaaagtttctaacatgttccatatgctactttrtcctgcatctctgtcttctcaccacaaacccacatgatgtttacttttcctttgttc

SEQ ID NO: 720613 - DNA, 1478 bp, Homo sapiens
actggatacaacagggaatgaacaaatatctgctctcatggacttgactttcaaaagagaaagacaaatatataaacaaaaaactcacctaatatgagacaattaaaactactgtaacaaatttggaatatacattctaaatttgtgatatataagtcactgtgaaacaatactatatgctcctgcactaatattaagttaaaaagtaaaacaatctagaatgtctgaggttacaattattgaatatactatatcatattgaattttgagtgagtcaaatgttttaatgtttgttaacattactttcaataaattcctcaaattcacaattgaaaattgaaaacacttagaaatcgatataaatgttgagattataaatagtatggtaagttaatgaacatcttatttaattgttattgtgggtgttgtgacatcagtaataaagacaagtgtctttaaattatctagttgagtgtgttaattggcaatttgaggggctagctttctgggtacactgctctgttagcatgtcatgatagtcttttaattaaaactcatagattacctctattttttttaaatcacagcctatggtttttgctgatagcaacacaatgacgtcatcaaatgaaatrcattgacgagctgtaagaagtgatagcactttatggcttgttacaagcttctgaaacacatttaaatagtgtgttcaggtagctgctttgtgaggacaacagggagacattgtcatttcagtcctgcctactagcttctgactctgaacgtgcttgctgcaaatactgtggtcatggatgaagtcaaaggccatgcttctggttttgggatggctttaaaggagatgaaataacttacatggaaatttgctctgtatgtttcctcaacaaagaaaattgaatcttcaaagacagtgtatgagggttgaaaaaaatgaaaagtaaaagacaaaaagtctgcagctaaagtagaacaaacacaacttagaattatgagtcgaaagttagtaaatatattgtagttgttttccaaagagctcaactgagataatagttctttaataatgtgtaaagaatagcagtacttacgatttttaaaggctgtcatttgagatggtcaaaacgtaagacgagaatgctgaattaaagcacaccacaaatagcaagcttttcaaaccataaattcaggatacaattttgagtagaggtttatatgttccaagtggtcttttggtgagcctgggcaaagcattcttgggaattgagtccagggcacatctgacttgtcataaattttatatgtttcaaccctactggggttcaaaagtgagaaatttgtttgcattctgttgcaataccaattgtattaacagatgtttaaagatgaatgttccaaactaaaggcatttgtttgatattttcagcatcattttttctattcacatatgtcaaaacaattctgaa

SEQ ID NO: 720614 - DNA, 1478 bp, Homo sapiens
actggatacaacagggaatgaacaaatatctgctctcatggacttgactttcaaaagagaaagacaaatatataaacaaaaaactcacctaatatgagacaattaaaactactgtaacaaatttggaatatacattctaaatttgtgatatataagtcactgtgaaacaatactatatgctcctgcactaatattaagttaaaaagtaaaacaatctagaatgtctgaggttacaattattgaatatactatatcatattgaattttgagtgagtcaaatgttttaatgtttgttaacattactttcaataaattcctcaaattcacaattgaaaattgaaaacacttagaaatcgatataaatgttgagattataaatagtatggtaagttaatgaacatcttatttaattgttattgtgggtgttgtgacatcagtaataaagacaagtgtctttaaattatctagttgagtgtgttaattggcaatttgaggggctagctttctgggtacactgctctgttagcatgtcatgatagtcttttaattaaaactcatagattacctctattttttttaaatcacagcctatggtttttgctgatagcaacacaatgacgtcatcaaatgaaatacattgaygagctgtaagaagtgatagcactttatggcttgttacaagcttctgaaacacatttaaatagtgtgttcaggtagctgctttgtgaggacaacagggagacattgtcatttcagtcctgcctactagcttctgactctgaacgtgcttgctgcaaatactgtggtcatggatgaagtcaaaggccatgcttctggttttgggatggctttaaaggagatgaaataacttacatggaaatttgctctgtatgtttcctcaacaaagaaaattgaatcttcaaagacagtgtatgagggttgaaaaaaatgaaaagtaaaagacaaaaagtctgcagctaaagtagaacaaacacaacttagaattatgagtcgaaagttagtaaatatattgtagttgttttccaaagagctcaactgagataatagttctttaataatgtgtaaagaatagcagtacttacgatttttaaaggctgtcatttgagatggtcaaaacgtaagacgagaatgctgaattaaagcacaccacaaatagcaagcttttcaaaccataaattcaggatacaattttgagtagaggtttatatgttccaagtggtcttttggtgagcctgggcaaagcattcttgggaattgagtccagggcacatctgacttgtcataaattttatatgtttcaaccctactggggttcaaaagtgagaaatttgtttgcattctgttgcaataccaattgtattaacagatgtttaaagatgaatgttccaaactaaaggcatttgtttgatattttcagcatcattttttctattcacatatgtcaaaacaattctgaa

SEQ ID NO: 720615 - DNA, 1478 bp, Homo sapiens
actggatacaacagggaatgaacaaatatctgctctcatggacttgactttcaaaagagaaagacaaatatataaacaaaaaactcacctaatatgagacaattaaaactactgtaacaaatttggaatatacattctaaatttgtgatatataagtcactgtgaaacaatactatatgctcctgcactaatattaagttaaaaagtaaaacaatctagaatgtctgaggttacaattattgaatatactatatcatattgaattttgagtgagtcaaatgttttaatgtttgttaacattactttcaataaattcctcaaattcacaattgaaaattgaaaacacttagaaatcgatataaatgttgagattataaatagtatggtaagttaatgaacatcttatttaattgttattgtgggtgttgtgacatcagtaataaagacaagtgtctttaaattatctagttgagtgtgttaattggcaatttgaggggctagctttctgggtacactgctctgttagcatgtcatgatagtcttttaattaaaactcatagattacctctattttttttaaatcacagcctatggtttttgctgatagcaacacaatgacgtcatcaaatgaaatacattgacgagctgtaagaagtgatagcactttatggcttgttacaagcttctgaaacacatttaaatagtgtgttcaggtagctgctttgtgaggacaacagggagacattgtcatttcagtcctgcctactagcttctgactctgaacgtgcttgctgcaaatactgtggtcatggatgaagtcaaaggccatgcttctggttttgggatggctttaaaggagatgaaataacttacatggaaatttgctctgtatgtttcctcaacaaagaaaattgaatcttcaaagacagtgtatgagggttgaaaaaaatgaaaagtaaaagacaaaaagtctgcagctaaagtagracaaacacaacttagaattatgagtcgaaagttagtaaatatattgtagttgttttccaaagagctcaactgagataatagttctttaataatgtgtaaagaatagcagtacttacgatttttaaaggctgtcatttgagatggtcaaaacgtaagacgagaatgctgaattaaagcacaccacaaatagcaagcttttcaaaccataaattcaggatacaattttgagtagaggtttatatgttccaagtggtcttttggtgagcctgggcaaagcattcttgggaattgagtccagggcacatctgacttgtcataaattttatatgtttcaaccctactggggttcaaaagtgagaaatttgtttgcattctgttgcaataccaattgtattaacagatgtttaaagatgaatgttccaaactaaaggcatttgtttgatattttcagcatcattttttctattcacatatgtcaaaacaattctgaa

SEQ ID NO: 720616 - DNA, 1478 bp, Homo sapiens
actggatacaacagggaatgaacaaatatctgctctcatggacttgactttcaaaagagaaagacaaatatataaacaaaaaactcacctaatatgagacaattaaaactactgtaacaaatttggaatatacattctaaatttgtgatatataagtcactgtgaaacaatactatatgctcctgcactaatattaagttaaaaagtaaaacaatctagaatgtctgaggttacaattattgaatatactatatcatattgaattttgagtgagtcaaatgttttaatgtttgttaacattactttcaataaattcctcaaattcacaattgaaaattgaaaacacttagaaatcgatataaatgttgagattataaatagtatggtaagttaatgaacatcttatttaattgttattgtgggtgttgtgacatcagtaataaagacaagtgtctttaaattatctagttgagtgtgttaattggcaatttgaggggctagctttctgggtacactgctctgttagcatgtcatgatagtcttttaattaaaactcatagattacctctattttttttaaatcacagcctatggtttttgctgatagcaacacaatgacgtcatcaaatgaaatacattgacgagctgtaagaagtgatagcactttatggcttgttacaagcttctgaaacacatttaaatagtgtgttcaggtagctgctttgtgaggacaacagggagacattgtcatttcagtcctgcctactagcttctgactctgaacgtgcttgctgcaaatactgtggtcatggatgaagtcaaaggccatgcttctggttttgggatggctttaaaggagatgaaataacttacatggaaatttgctctgtatgtttcctcaacaaagaaaattgaatcttcaaagacagtgtatgagggttgaaaaaaatgaaaagtaaaagacaaaaagtctgcagctaaagtagaacaaacacaacttagaattatgagtcgaaagttagtaaatatattgtagttgttttccaaagagctcaactgagataatagttctttaataatgtgtaaagaatagcagtacttacgatttttaaaggctgtcatttgagatggtcaaaacgtaagacgagaatgctgaattaaagcacaccacaaatagcaagcttttcaaaccataaattcaggatacaattttgagtagaggtttatatgttccaagtggtcttttggtgagcctgggcaaagcattcttgggaattgagtccagggcacatctgacttgtyataaattttatatgtttcaaccctactggggttcaaaagtgagaaatttgtttgcattctgttgcaataccaattgtattaacagatgtttaaagatgaatgttccaaactaaaggcatttgtttgatattttcagcatcattttttctattcacatatgtcaaaacaattctgaa

SEQ ID NO: 720617 - DNA, 632 bp, Homo sapiens
ggctgaacaagtccagaaacttcacaaaaacttatattcttgttaaatgtatgaatgcataaatgaattaagtgcaagaacatgttttttaaggacccataattaattatatgatttcagggctctttgtagtagactactgattatctatttatttmttcactttccacaaagacaagaaaagaataattaggccccaaaataaaaataaataaaaaatgatattcttagaaaggaaggcatttatttgttcctccaaaataactttaatataggtagttatggtttgaatgtgtccccaaaattcctgtgtggaaaataatccccaatgcaacagtgttaggaggtacggctttttggaaaatgtttaaatcatgaagcttccgtctttatgaaaagattaattgcacaagttacaaaggggactgatggagggaatttggctccttttgcccttccttcccttttttcatgtgaggacatggcatttctctcctccagagaatgcagtaacaaggcaccatcttggaagtacagatcaggctctcatcagacaccaaacctgccagtgctttgatcttggacttctagcttccagaatggtgagaaatgagtttatgctctttaaaaat

SEQ ID NO: 720618 - DNA, 1343 bp, Homo sapiens
tataaataatagtgctagaaacattccagcacatgactgttagtgacttctatatacaattttggtgtttatttaagaataaagatgttcagatgtaatatatcctattgttttacttacccattgttgcatgacaagtcactgcaaagctcaagagttttataagaacaatcattttatattctcttggttctgcagtctggactggactatctaggcagattttctgctagtgtttttgcctcatgtagctacctctaatggtttggttggagcaagacttagctggaagaatggggcagcatgtctgttatcttcatgtaattgtagtttctttatgtggtctctccggaatgatgaatgaacttctaacatgttgcccaaagctcccaatagtgcaaaagcaggagtggccagaccctttttaagcttaacgcactgtattaggacaagcactgcatcattttcactgcactttattgccaaaattattacctaggtccaggycggattcaagaaaatgggactccacaagagcatgaatactgagaatagtcaacacaatagattataacatctaccttaatagttacggaaactgcttgctgagatatttcattcttagactgtgcttttcagatattgaaattgaggttatgctggatttgtgaaaaaagctagaggccgggcaccgtggctcacgcctgtaatcccagcactttgggaggccgaggcgggcggatcaccaggtcaggagatggagaccatcctggctaacacggtgaaaacccgtctctactaaaaattaaaaaataaaaaattagccaggcgtggtggcaggtgcctgtagtcccagctactagggaggctgaggcaggagaatgccatcaacccaggaggcggagcttgcagtgagccgagatcgcgccactgcactgcagcctgggtgacagagcgagactctgtctcaaaaaaaaaaaaaaaaaaaaaaaaaagctagaaagttttctctcttttctattcctggaactattcatgcaatattcatgtttttttctttcttagctagttggaaaaattcaccagtgaagccatatgagcttggggtttctttgtcggaaagttttaaaccaaaggtataatttttaggataaatattggatgattcatatattttgttagtatttgggaagttgtatttttgaaaataatgtccatttaatacatattttaatatttaggaataatttgtatcctcttttactccttttgatatctgagggaatggtgcaagtgtcctctttttcatttctgatattgataagttgttatttatgtatttt

SEQ ID NO: 720619 - DNA, 756 bp, Homo sapiens
ttagacacttcgtgggatccttatttttttaactccaatcatctccaggtaccattcatatattcatatttttgaatcttcttttgcaattgatatattttgtgttttgttgcacaaagcttttctttctctctaattagaatgactaacttgaatctttttttaataaaaattcattaatttggtctcatttctcacatttgccatttctaagagaaacatttgactcactttcacacccatatttgggccttttttctcaagaatattgttcattcgttcagtttttaagaataaattcaatgattttactttcagtttgacttttacattggaatttaatgactcaaagcatttctcaaatttctctctaattatgtctgaaataactggatttttcaatacttcaaggccgtgaatttctggaatttgtctaattcatttcatttctgcttgcaaagtagatgattcatttctgaatccatatgtttattttaatagctatcatatttaaccagcaatattttattttctaaattcttccaataaaatgaaatagctgtgaactaaattatctggagggagactatatgatatgttgctcaaaccagaacacttttgagagaaaaggaaattctataaatggtaatactggkattaactaagactgtactaagcaaatttggatggaagcttaccctaattatctactgtctaaatcatagtagatgagagttttataaaatattttcaagt

SEQ ID NO: 720620 - DNA, 583 bp, Homo sapiens
cagaaaaacagctaagatacctaatacaaaaatagctccattagttaggggcaaaagcctcataatctaaaagaaaaatggacaataataaaaactgaaaattacattcaagttgtctcaaaatggattaaagacttaaatataaagacaaactcgaagaaagcatggagaacctacatggcattaatctgggcagtaattttttagatatgaccctggatgcacaggcaagaaagacaaaaatagaaatatgtaattgcatcaaagyaaaatattttgtacagcaaaggaaataatcgaccaagcgaaaagacaaaccacagactgagagaaaatgtttgcaaaccataaatttgataggggattgatatccaaaatatatagagaattcaactcaatagcaataacctgaagagatattacttaaaacaagaaaaagaaatgtccaacacgtttggtaaaaaagtgctcaacataaataataatcagagaaatgcaaactgaaaccacagtgatctgttagaatagttgtgatgaaacaaatgaaatacaagtgctggtgaggatgtgggaaaaaaagaac

SEQ ID NO: 720621 - DNA, 543 bp, Homo sapiens
aaaattatcaatgtttaattatatattaaaatgggagtttaatctgaagctccttccaatgtgaaatactaaattaatgtgcagttcttttctgtgttctaagaaccaattagatgacttccaaaactctcaaccattttgaaggcttgagaaggcaagtggtggggataagaagaatgagaagaatttcttcagagtgagctattctgcttttcttctaaacaaagggaggagactgccccttctttatttaaaatcaagatgatgctataaggaaacttctagaaatctttgcgtacacggtgaactggtttctaattcatgatagacagctggcagagccaggctaaagtggtgtaagayagtaaaataaaggtatcttttggactctatttgttgaagtaaaaaatacaagatatttttctttgtacctgatataggccatactttcaagaaagtctgcatagggttttcttaaaccctatacatgatagacacctgaaagaattagggaacttttgtagtagaatactgattacctaa

SEQ ID NO: 720622 - DNA, 1406 bp, Homo sapiens
ataggaaaaataaaaaaagaaaagagaaatatgatgaaatgtctgaaatgataaaaataggatacacagaacgtggggatgaggacattaacacatgtctatgagaacatgcagaacattaccaccaggggtatgacaaagttagcacttcatgtgtttaacttaaatttcagataagttcaaaattaccaacacagaaaattaggagcaataaaaataaagaattatggggtagaagaaacagagctacattcaatctttgagtttgccatagaaacaaaatattgaaagatttacagttgaagaggtctcgtaagtgcctttggacaagaccttgtgctatgggacaattatccctcacaatagtgaggttgagtacaatgtctgtaagtgcacaggagagaaatatctttgctgaaagtactgaaaataatggtacaggaggtgactcgcagtgacttttttagtgtattaactagacaagtggaaaataattatggggtaaaagaraagtgcaacaaagcaaggacgcagagaaatgaatggcttgcttgggaaatggcaagcagtttaacctagatgtatcagacagtcttgattatgtcaaacaaagcaaaggtatcaaaaatacattataaattagttctcaggactgtatgaaaaggaaaattataaaagaagatcagggaattttaggcctacatatgaagacattttggtgtattaaaaaatgtgaactctttctaagtgtaaagatcacaagaagactaagacagataatatattatgaaatgcagaatgaagtaagaatgtcgaggactacaaatctaaggtgaatgagcttttaagtaagtgacaggcaatattgaagtttacttcggtgttggcagtgcatataaatgaccagtcattagaattctgtaaattggtttgtgcactggcactgtatcttgaacccaaatggtcagtggaaacctatacacaaagaacgtgaaaacacagcttcccatgtttatttttacagaatggatgtggaggccagaagctttctgcacaggcccattctgttctttcacttcctttccatcacaggaggcaactctgttgagttcagcaagaaaattactgatcatacaaaaaaattagatgttgaactattgtcctccttctagttctaattaacacttacatgatttaatacacttctgactatagcattctttacaacaatgtttcatatgcttttaattaaaagagatgaagaaaagataatagatcacaatgaaaatagtttaaaatttggctgaagatgttatcactatttgttattttatatttctatttccccaaatataaaatggatagattggacaaaatgatgtatatagttcttcccagctttaaaa

SEQ ID NO: 720623 - DNA, 645 bp, Homo sapiens
  misc_feature 2, 3, 4, 5, 6, 7, 8, 9, 10, 11, 12, 13, 14, 15, 16, 17, 18,19, 20, 21, 22, 23, 24, 25, 26, 27, 28, 29, 30, 31, 32,33, 34, 35, 36, 37, 38, 39, 40, 41, 42, 43, 44, 45, 46,47, 48, 49, 50, 51, 52, 53, 54, 55, 56, 57, 58, 59, 60,61: n = A,T,C or G
  misc_feature 62, 63, 64, 65, 66, 67, 68, 69, 70, 71, 72, 73, 74, 75, 76,77, 78, 79, 80, 81, 82, 83, 84, 85, 86, 87, 88, 89, 90,91, 92, 93, 94, 95, 96, 97, 98, 99, 100, 101: n = A,T,C or G
annnnnnnnnnnnnnnnnnnnnnnnnnnnnnnnnnnnnnnnnnnnnnnnnnnnnnnnnnnnnnnnnnnnnnnnnnnnnnnnnnnnnnnnnnnnnnnnnnnngtgttgagaggacctgcagggacagatcatattgaatagctggtccttctgaagaatgttgagatgcaaacatctaccctactttactcaagtttggccaactctaaagggccatcttagtttcagggcttcctgtgggatcaactgaggcctctgtcgttactgcatcacagctcggcctctccatctgcctaaacctgctccctttacttcctcgaaagtgtttctggagcattccccaataaatttcctacatgcaaatttctgtctgggaaccttttacctggcagtcttacctatgcaccactacccaagcaccatccaatgagagggtatgtcagcttcaaacactgaccaagcccagagagttccaatagctgctttttattcacctcatctgtattccacttctgtgaatctagaattaggaaactgggggagtagatgatccaagtggaaaaatagaaaatatrtaactattgattctcttattttactccagatacaatcagtctaaagcagaccagagttgggagagggagaa

SEQ ID NO: 720624 - DNA, 582 bp, Homo sapiens
tcccatcccaccatcaccaccatgttgtcaaactcaaggagagtttctttggtaaaatgaatggacaaattctatttaaaaaccagkacaacaagtgtaaaagaaccaaagataaaactacctgtcaaatatgcaattctaaggtagcagtgtctttgctgagaatgcttaggacgtacattataaatcctaagtctgattataattttatggctcatacatttgttaagtcctgacttcttgtaagaatgaaaataaacacaattgtaaagtagccaaaaggaaaatagggtcaaaaattatctttatgtaaaggtagcctgaatacacagaagacagaatttaggtcaatatgtagtgttcttaattacccatcttaataaagagtaaaattaaagtaaaaatgattatggatgattaaagatactctataatgagacatttctacacaattttaaaagaagataagttgattagatatttttgaaagacaatttagcaatagatgtcaaaaccttaggcatttttcaaccatttaatcttccccctcatttttttttttttggtaaagctatgaaaaca

SEQ ID NO: 720625 - DNA, 582 bp, Homo sapiens
tcccatcccaccatcaccaccatgttgtcaaactcaaggagagtttctttggtaaaatgaatggacaaattctatttaaaaaccaggacaacaagtgtaaaagaaccaaagataaaactacctgtcaaatatgcaattctaaggtagcagtgtctttgctgagaatgcttaggacgtacattataaatcctaagtctgattataattttatggytcatacatttgttaagtcctgacttcttgtaagaatgaaaataaacacaattgtaaagtagccaaaaggaaaatagggtcaaaaattatctttatgtaaaggtagcctgaatacacagaagacagaatttaggtcaatatgtagtgttcttaattacccatcttaataaagagtaaaattaaagtaaaaatgattatggatgattaaagatactctataatgagacatttctacacaattttaaaagaagataagttgattagatatttttgaaagacaatttagcaatagatgtcaaaaccttaggcatttttcaaccatttaatcttccccctcatttttttttttttggtaaagctatgaaaaca

SEQ ID NO: 720626 - DNA, 582 bp, Homo sapiens
tcccatcccaccatcaccaccatgttgtcaaactcaaggagagtttctttggtaaaatgaatggacaaattctatttaaaaaccaggacaacaagtgtaaaagaaccaaagataaaactacctgtcaaatatgcaattctaaggtagcagtgtctttgctgagaatgcttaggacgtacattataaatcctaagtctgattataattttatggctcatacatttgttaagtcctgacttcttgtaagaatgaaaataaacacaattgtaaagtagccaaaaggaaaatagggtcaaaamttatctttatgtaaaggtagcctgaatacacagaagacagaatttaggtcaatatgtagtgttcttaattacccatcttaataaagagtaaaattaaagtaaaaatgattatggatgattaaagatactctataatgagacatttctacacaattttaaaagaagataagttgattagatatttttgaaagacaatttagcaatagatgtcaaaaccttaggcatttttcaaccatttaatcttccccctcatttttttttttttggtaaagctatgaaaaca

SEQ ID NO: 720627 - DNA, 582 bp, Homo sapiens
tcccatcccaccatcaccaccatgttgtcaaactcaaggagagtttctttggtaaaatgaatggacaaattctatttaaaaaccaggacaacaagtgtaaaagaaccaaagataaaactacctgtcaaatatgcaattctaaggtagcagtgtctttgctgagaatgcttaggacgtacattataaatcctaagtctgattataattttatggctcatacatttgttaagtcctgacttcttgtaagaatgaaaataaacacaattgtaaagtagccaaaaggaaaatagggtcaaaaattatctttatgtaaaggtagcctgaatacacagaagacagaatttaggtcaatatgtagtgttcttaattacccatcttaataaagagtaaaattaaagtaaaaatgattatggatgattaaagatactctataatgagacatttctacacaattttaaaaraagataagttgattagatatttttgaaagacaatttagcaatagatgtcaaaaccttaggcatttttcaaccatttaatcttccccctcatttttttttttttggtaaagctatgaaaaca

SEQ ID NO: 720628 - DNA, 1076 bp, Homo sapiens
aggaatgcttgtcaaaagatggtgcctaattgagtggccagatcctttcatgcctttcagtgacagtgcctttgtagtgtcctggatgtcatgtggtgatgtgtgaattgcctggctcagctccactgctgtctgaaatagctcctcacacatggtccgcagggtcagttgccacagagaccacattgcaagagggattttccacgtctgtttaaaagctggaattaatattgttaggtgagaggtgaagcaactcctcttattgtgtcttttaaactcttatcagggccagaaaacaacagcctgcagattcaatccagctcactgcccagtgtaaataaagttttattggaacacagccactcacccactcattcacagtttgtgttggctgctttcacaccacaacaaagctgagaggttgcaacagagacctcagtggcctgcagcacctaaaatattcaccttctggctcttctcagaaaaagtgtgccaactcttggactctatcactgattctgagatgtgttctttttttttttttttttttttttgagacggagtctcgctctgtcgcccaggctggagtgcagtggcgccatcttggctcactgcaagctttgcctcctgggttcacrccattctcctgtctcagtctcctgagtagctgggactacaggtgcccaccactacgcccggctaattttttatatttttagtagagacggggcttcaccgtgttagccaggatggtctcgatctcctgacctcttgatccgccctcctcggcctcccaaagcattgggattacaggcgtgagccaccgcacccggcccatatttcttctttaactgctatgcttccttttgaattttgttggtttgaagtatgttagtggttattggaaaatactattagttttgatttatcaaagatatctttgttttgttcttattgaatgatattttaatcaggtataggctgattattattttcattcagcacattaaaatctgtgcctactgtatgatgtctgccattgctgtttttgaaaggtcccctgccagttaattgca

SEQ ID NO: 720629 - DNA, 609 bp, Homo sapiens
atattcagtagattcttattaagtgatctcataaaatactcttaacaaacccagagaatagtttgtagggaggaagaaattcagtctgttgtaaaaattagagcaacaagtgcctatttctacaagtgtggaagactggcatttccaaagaaccccttaacataaagaaactagatatttaataaaaactaggttttaatgaaagcctagctcacatgactagtgaggactatcaagtccaaacctcagtgatttagcacacatatgcactctctctctcttctttgtctctttctttctctctctctctctcaatacacaagcatgcaggcatatgtacacacatatacacacattcatacttttcaaattctaggcggtaagcaatgaataataaggatagatgctattctgagggcaaatactgataaaagtaatatggtccaaagagtaagagcttgctagaggaagcttcaaggtgcatgtggatgttgagttttcttcattaagccagggactcaagttatgaacaccctttggactccaacaagaaataaaaatctctagaagaaagcacacactttttgagcyagcaatttttcaacccca

SEQ ID NO: 720630 - DNA, 592 bp, Homo sapiens
tcaacagatctctgggttcctgatttactgtagaagtgcatgttccccactgcccccatcacacgggaaggggaggatgttggagaaggaaggagcttccctggagtgggcccaggagttgtggagagtgatgkcagggatgctgtccccagggagcagacccaggacctgatcagagggtagtccctgcccttaggttgttggggcctgacagtgtttttccagtagtgttttgaatttctctggacagttgtggttcttggtctctggataaagaggagctgtggacttgctgtatgcacacagccctggacctcaaggctgacgctgtgattgcgtgaggcttctggagcgtcgggaaaggcatgtgtgtgtctagcatgtgcacaggaagtgatagggcagactgagggaatttagattattattcagcaaacattggctccctctctctcctactggagacgatatatttcccactccatggatatatgctgaccttggccacaggacttgcattaactgatggaatgttggcagttcatggatgagaaaggcttgaaatgtgcttgtggtgtttggtttgtcttct

SEQ ID NO: 720631 - DNA, 613 bp, Homo sapiens
tttctctcccagcatgtacacacagaggaaaagccgtgtgaggatacagcaagaaggcagccatctgcaagctaaggagaaaggcctcaataaaaattaaacctgcccaacaccttgaccttggacttccagcccccagaactgtgagaaaattaaattctatttgtttatgacacccagtctgtggtgctttgttaaggcagccctagcaaactaatgygcctggctttatggatctaccattgctccagtttgctatttatgtcactaaacatgaatataaatacactaactgttggatggcagggatcataaattcagtttctgagagatttaatgttacacccatcaaaatccaaatggcatttttatagagataaaaaattctaaaattcatgtggaaccacaaaagtcaactgtttagccaaagcagtcttgacaaaaaaaagaacaaagctgatggcctcacatttcctgatttcaaaatgtattacaaagctatgataattaaaacaggatggcactagcataaagacagagatatagacaaataaaacagaatagagagctcagaattaaacccatgcatatatgattaactgatcttcaataa

SEQ ID NO: 720632 - DNA, 588 bp, Homo sapiens
ctaagaatgaaatttagctctagcaaggaggctttaattaaaggatccttgcatctatttcagtgacttcctgttagtaattcaaccatctcctggttcactatttctgcagtgctctgaaaatgaagcttgtctacttattttttttttgtgtgtttcgtaagaattgaagaagcactcataagaaagggaaagggaaagagggaaagcaaatggacctaggatatcatgccaagtgtgtggggtgttattcaaataaataaatatatatatatatatatatatatatakagagagagagagagagagagagagagagaaggtttataaaacaaaaattgcagaaagtacatttttactatttgtttaaagaagaacccataaaagaagttttctgagataaagttgaaaaatgcacatagaggcaggtggtgccattagccctgctgttgggactgacagatcagtactgaagtggcatcagggtaggaaggtatcagcttcagtaatggagagatgtccaaaggaaagattgctctatcacagtgatgggatcctagcatgttataaatcgaagattgttctttc

SEQ ID NO: 720633 - DNA, 588 bp, Homo sapiens
ctaagaatgaaatttagctctagcaaggaggctttaattaaaggatccttgcatctatttcagtgacttcctgttagtaattcaaccatctcctggttcactatttctgcagtgctctgaaaatgaagcttgtctacttattttttttttgtgtgtttcgtaagaattgaagaagcactcataagaaagggaaagggaaagagggaaagcaaatggacctaggatatcatgccaagtgtgtggggtgttattcaaataaataaatatatatatatatatatatatatatagakagagagagagagagagagagagagagaaggtttataaaacaaaaattgcagaaagtacatttttactatttgtttaaagaagaacccataaaagaagttttctgagataaagttgaaaaatgcacatagaggcaggtggtgccattagccctgctgttgggactgacagatcagtactgaagtggcatcagggtaggaaggtatcagcttcagtaatggagagatgtccaaaggaaagattgctctatcacagtgatgggatcctagcatgttataaatcgaagattgttctttc

SEQ ID NO: 720634 - DNA, 588 bp, Homo sapiens
ctaagaatgaaatttagctctagcaaggaggctttaattaaaggatccttgcatctatttcagtgacttcctgttagtaattcaaccatctcctggttcactatttctgcagtgctctgaaaatgaagcttgtctacttattttttttttgtgtgtttcgtaagaattgaagaagcactcataagaaagggaaagggaaagagggaaagcaaatggacctaggatatcatgccaagtgtgtggggtgttattcaaataaataaatatatatatatatatatatatatatagagakagagagagagagagagagagagagaaggtttataaaacaaaaattgcagaaagtacatttttactatttgtttaaagaagaacccataaaagaagttttctgagataaagttgaaaaatgcacatagaggcaggtggtgccattagccctgctgttgggactgacagatcagtactgaagtggcatcagggtaggaaggtatcagcttcagtaatggagagatgtccaaaggaaagattgctctatcacagtgatgggatcctagcatgttataaatcgaagattgttctttc

SEQ ID NO: 720635 - DNA, 663 bp, Homo sapiens
tggaaaccctgcttatttttgaattgcagagttcatttctgcatttttcataaagatgctgaaacagaaggatgtctctctcacattgattgatcttttgaaaatagttactgatttgctaagctgctcttcattttttagggttttcttactggcatttctgtattaaaattttgttttgatgttaatattactacacaagaagaaatagaatattaaacccgtcaccttaataggaaatcgaattttcctttctgtggggtctcttgtcctattgtattgttagaaagatacatttttctttataatctgttaggatttggtgaagcagtcttgcttttagaaagatgactttcagttgattttttttttcttttgagatggagccttgctctgtctcmcaggctggagtgcagtatcatgatcttctcggctcactgcaaccactgcaattcttctgccccagccttctgagtagctgggattataggcacctgccatcatgcccagctaatttttgtatttttagtagagacggggtttcaccatgttggccaggctggtcttgaactcctgacctcaggtgatccaaagtgctgggattacaggcgtgagccactgcgcccagcctcagttgatttttatatgtagaaaatataaaaa

SEQ ID NO: 720636 - DNA, 1470 bp, Homo sapiens
acattttccccatgaatttctatattactctactcagcaaaagagggatgtttttgtttgtttgtttgttttgtttttgtttttttgagacaaagtctctgtcaaccaggctggagtgcagtggcacgatctcagctcactgcaacctctgcctcccaggttcaagtgattcttctgccgcacgccaccatgtctgggtaattttttgtattttagtagagatggggtttcctgttgttgcccaggctggtctcgaactcctgagctcaggtaatccgcccaccttggcctcccaaagtgctaagattacaggtgcgagtaactgcacctggactggttttttaaaattacatattctctgtatgtgcctattataaattttctattttgttggcagatttaaaaatattatttaccattcctcctaatttttcaggtatagtaattgtagaatttttgtgggttctgcttttggattttttgttgtttgttatgattaaattttttagtttatttccttggcacaacatttttaaaagtaaatcatttctcttaaagagtagaaaaaaattgagtaaggaaattgggactccaaaatgatttgtttatggatttgttgatttcttttttttttttccttttggcagggagatggctaagaaagacatgtatgcagtatacttctatatttctaataataaatttagaaaaaataactcatcatgagtattaggctacctttacattaaagtttgcttgaagattcactgaaagtatccttgctcatgtatatactaatttaaatatttatgttatgttttaatttagaacaaaggtctatgcttaaatgtagaagaggcagaacagctaacataaatgggtaatcaagaaggtacagggccagaggcaatggtgggaattgggaacttgccattacggcataaaattctgtgtgtgtgtttgtatgtgatcactgtccagcactaagtaaaattgtctattggcagaattagctgagaagtattttaaaagatcttttatataaagctttagaatcccaagatcaaataattccagaattttagaagtgatatttattcttttaaaaaacatttactgatttcttgaagcttttacaaaaactaaattgtgttacttataacatttgcatcaaagaaaaaataaaagcatgaaagctggaatgaattattcacagaattctttcagaacagtatttgttttttacatttactatgatggctttataataagagtaaaaaaccataagaaatatacaactagaaaaayaggaatataagataattcagagtagaaaaatcatagaatcatcatgtagtaaaatcatactcctcatgccctttgactataacaaacctgtgttttccctttctgcctgagcaactcttttgaattcccagataaaaatgtaagcactgtgatagtaattta

SEQ ID NO: 720637 - DNA, 675 bp, Homo sapiens
ttttctattccttccctagcctgtactccctgagctgagcccagggcctgacacccagttggtgctcatgcaatgtctgttgaatgaacgagcaacctgggtactgtttctgaaccatgagggagagaggcctgggaccctctgaccctgggttcagccccctggttgcctacctcgagccagccctgagccaggctgggttttcttgcccctgccaggcccggttgcaggcctggagtaggggctttctgcttgctgcaggcactgggaggggccagggtgtctctccaaacctcaagttagacagccttggttggaagggtttttgttttcttttgttttttgttttgttctgagactgcgtcttgctctgtctcccaggctggagtgcagtggctcratctcagctcactgcaacctcctcctcccaggttcaagcaattctcttgcctcagcctcccggtagctgggattacaggcgcgcaccaccatgcccgctaatttttgtatttttagtagagactgggtttcaccatgttggccaagctggtctccaactcttgacctcgtgatccacccgcctcagcctcccaaagtgctgggattacaggggtgagccaccatgcctggctggaaagattttttttatgtccagctctctcacttgtgaagcca

SEQ ID NO: 720638 - DNA, 618 bp, Homo sapiens
ctttaggatggaagaaggggccgggagccgagaaatgaaagggatgcaactctagaagctggaagagctgaagaaacagatgttcccctggagcttctggaggaggccttgccgacacattgattttggccagtggagctgatttcagacccctgacctccagaactgtaagacagtagatgtgaggcacttctgccaccagctctgtggtcatttgtacaaacaacataaggaaaagaatatgcacctgtccttggctcttccgccatggccttctcacctatgtcagatcaggctgccacggcaaaatcccacagactggacagctgaaacaactgaaatttattcctccctgacgcggaggccaggagtccaaaatcaaggtgccgctgattctgtgaggacccgcttcttggcttgcagttggccaccttctcactgtgtcctcacttggcagagggcgaggggctctctctcttttttttttttttttttttttgagacacagtcttactctgttgcctaggctggagtgcagtrgcaaaatctcggctcactgcaacctctacctccttggttcaagtgatcctccctcctcagcctcccacgtatctggga

SEQ ID NO: 720639 - DNA, 658 bp, Homo sapiens
agactgtctcacaagaaggctgccccccaatccgggctcaaccctggggccgtggagtgccgtaagacctctccagcctcctagctgaygccccaccccgcaaaacacctgacacaggatgcaggtcccagggtctttgggaccctctgtgaccaccccacttacgtctccagcccctgcactcaccagcttcccaaatgtgaataagtctccccaacttccacgactttactgttgtaggtggaattgcggccccccaaagatatgctcaagcctgaagccccagtacctgtggatgggaccttactgggaaacagggtctttgcagatgtcattcagttaagaagaggccatgctggattagggtgggccccaaacccagtggctggggtccttataagaagaggtaagtttgcaaagagagacgcaggagaaggccaggtgaggatggaggcagagattggagtcatgtgtctacggagccaaggaaggccaactatggttggcaaccaccagaaactaggaagaggcagggaaggatcctgccctggagacttcagagagcatggccctgcccacacctggattttagacttccatcctccagcaccatgagaataaactcctggtgttctaagccgcccagcttgtggtgctt

SEQ ID NO: 720640 - DNA, 613 bp, Homo sapiens
ttttttttttttgagacagagtctagctctgtcgcccaggttggagtgcagtggcgccatctcggctcactgccatctccgcctcctgggttcaagcgattctcctgcctcagcctcccgagtagctgggattacaggcgcccgccaccatgcccagctaatttttatatttttagtagagatggggtttcactgtgttggccagactggtctcgaactcctgacctcatgatccacccacctcagcctcccaaagtgctgtatacccatgtcttaatatctgaaaatcccacatttgccccactttatggaagatgtgttggttctccagccctgtttccccctctaagacctgtgatctcctgtcccaggcagtgagcacaggtggagggggccatgtacagttgctccgtcgggcggcagctcagctgacctactgctccctctgtcctcctgacgacctggctgaccggggcctgctgggactcccaggtgctctctatgcccatgatgctttacggctctgggagatcattgccaggtgagtaaggaggagctgagaaatggtggggycggggggggggggggctctggcctgaggccagcatggggc

SEQ ID NO: 720641 - DNA, 613 bp, Homo sapiens
ttttttttttttgagacagagtctagctctgtcgcccaggttggagtgcagtggcgccatctcggctcactgccatctccgcctcctgggttcaagcgattctcctgcctcagcctcccgagtagctgggattacaggcgcccgccaccatgcccagctaatttttatatttttagtagagatggggtttcactgtgttggccagactggtctcgaactcctgacctcatgatccacccacctcagcctcccaaagtgctgtatacccatgtcttaatatctgaaaatcccacatttgccccactttatggaagatgtgttggttctccagccctgtttccccctctaagacctgtgatctcctgtcccaggcagtgagcacaggtggagggggccatgtacagttgctccgtcgggcggcagctcagctgacctactgctccctctgtcctcctgacgacctggctgaccggggcctgctgggactcccaggtgctctctatgcccatgatgctttacggctctgggagatcattgccaggtgagtaaggaggagctgagaaatggtggggcsggggggggggggggctctggcctgaggccagcatggggc

SEQ ID NO: 720642 - DNA, 666 bp, Homo sapiens
tttgcttacgtgatgaagggagttgattgtgtttcacccaatccagaagaaagggtccttgtttgtattggctttttactttcagcccggctagctgttactgtccttattgtttaaaactggtagttgtattcatttacttggtgtttgctttttctgcttgctgtaaaaaaacacagtcccactgccaaacatttctttcagcttcaaacactccagagtgaaaattcgaacctcaggaaacaggccacaaccaatgtatatcaggtgcaaactggttctgagtacacagacacttccaaccactcttccttaaagagacgtccgtctgcccggggcagtaggcccatgtccatgtacgagaccggatcaggtcagaaaccatatctcccaatgggagaagcgagccgccccgaagagagcaggatgagactmcagcccttccccgcgcacgtaagtaacaccactggcgcttctgctgttcactctatgcagcctgtctactctgttccctcttctgaacctacaggtccccacagctctgctttgccaaattggactaagagagttaccattgtgtttgctgtattaacatgtccacagatgcttgcgatattcccacaagcacacagggccatgggctgatggtttcctaaccaagttggg

SEQ ID NO: 720643 - DNA, 644 bp, Homo sapiens
gctttgtgtaaaacagaatatataatagactctgaaattgaataaaacttattggactcattttttatcctttgtgacatttttctagtaaaagagttcagacaaaaggcactgccaccaaggagccaggaatgcaaagtcctgtccaatttaaataatcactcctttctgtcatgttttacaaagagatgtattcaaacatgmtctttgggcatttctatattctgttcttggttttcacaaatatgagcaggcaaagatcccctttactccttttgtatgtttttgccactttaaaaaaagtataatcttggcgattgtctcattataaaaatgagagggcattcttctgagataaataggacagaggcctggctcacatggattttaatttagttccaaatttcacatccctcttcttctcaacaaataaggtaagaaataaagtccgagataataaggagttcatggcgaatccaatcatgccacccacctttctaaaatccttcagtgggatctggcacggtggctcacgcctgtaatcccagcactttgggaggccaaagtaggaggatctctggaggccagaagttcaaggaccagctaggccaacatggcgaaacccatctctactaaaaatacaa

SEQ ID NO: 720644 - DNA, 965 bp, Homo sapiens
aggagatagctatctttggttatgtggtatcgctctgtgagagggtttggtagcactataaatcttcaggacccaattaagaagggaaaggaaaatgtggggtcaggtatgaatcacaattcctcaatcagaataaggttgccatagtaaccacgcctgtttttgctcctaccgctgatctgcttgctggcttgggtgttcaaggtaatttgcacagaattgctccagttctctgatccacacaattttaattttataccacttaattttgtaccattgcttcccttgagcatcaaatgaagaaggcattaagagtttaaaatcaaagcatacatacattttctgaccacagttctccacctgatcaaatgcaagaagaccattcctcatttccccttcttgaagcttcacatttcccctttccttattcttccttccctcagtgtactcacatacaygcaaacataaacacatcccacccccccatctgaacacagtttgtggtatgtttgaagaactactctgaaaataagttatgtatatatacatatgtacataacttattttcatatatattatatatgaatatatatgtgtgaatatatatatatggaatcctaagcatcttgtagacttgtaacctttctacaattaagctaaggaagtttaacaaaaacactggacttggcataatgaaatttaaacttttttcatttgacatgtcttccttgtaaataataaaagagactcactccctttattttcaagcaccaagaaaatagagtgctctttagaggttctgaggggacagaaaactttgtgtgattgtttcagtggtgtatgaagctgtggtgttgctaactctggtttggtaagtgatctttcatgataaagaagcaccaggagctgtagaaagtccaaaagtaacaccacaatgctacagtgagaccagacactagaagcca

SEQ ID NO: 720645 - DNA, 965 bp, Homo sapiens
aggagatagctatctttggttatgtggtatcgctctgtgagagggtttggtagcactataaatcttcaggacccaattaagaagggaaaggaaaatgtggggtcaggtatgaatcacaattcctcaatcagaataaggttgccatagtaaccacgcctgtttttgctcctaccgctgatctgcttgctggcttgggtgttcaaggtaatttgcacagaattgctccagttctctgatccacacaattttaattttataccacttaattttgtaccattgcttcccttgagcatcaaatgaagaaggcattaagagtttaaaatcaaagcatacatacattttctgaccacagttctccacctgatcaaatgcaagaagaccattcctcatttccccttcttgaagcttcacatttcccctttccttattcttccttccctcagtgtactcacatacacgcaaacataaacacatcccacccccccatctgaacacagtttgtggtatgtttgaagaactactctgaaaataagttatgtatatatacatatgtacataacttattttcatatatattatatatgaatatatatgtgtgaatatatatatatggaatcctaagcatcttgtagacttgtaacctttctacaattaagctaaggaagtttaacaaaaacactggacttggcataatgaaatttaaacttttttcatttgacatgtcttccttgtaaataataaaagagactcactccctttattttcaagcaccaagaaaatagagtgctytttagaggttctgaggggacagaaaactttgtgtgattgtttcagtggtgtatgaagctgtggtgttgctaactctggtttggtaagtgatctttcatgataaagaagcaccaggagctgtagaaagtccaaaagtaacaccacaatgctacagtgagaccagacactagaagcca

SEQ ID NO: 720646 - DNA, 590 bp, Homo sapiens
taaactgagagggtgggatgagattttacttgagtttccttttagttctgattctatgaaggagtaacatgtcttgtttgactcagaaaatcctggcgatctctttcaggcttattgtagtgtttattacagcaagctctttagaagcttccgcataagcagacatcagaatgcgcctggacctcccaaagtcatctggttttcttcagttttttaaaagttcagaaatgtgatttgtagaaggagtaatagaagggagtataaattacagtgggaaatgggaaaacattcatcttaaagccatatatttctctgtacccttttgacatgtaatattttcttatttctattgtgttgggcagaatgaaaaatgggtctcgatatattttgtccctttaattgtagcctaatttattaatgccccctgggcttcycctatattattggtggcagtttctctttttagtaagtcattatgcagatctttggggatgactgtcaaaatgcttaataaaaacttgatagctaagctaacttttgatttggggctttgaataggcatccgatgcccctgcaatctcactcctaga

SEQ ID NO: 720647 - DNA, 1409 bp, Homo sapiens
tccttaatgatatgaaatatgcgtaaatgctgctgcctggcagttgctgatgcgatttgaaggaacgcttgctgtttccctaataagggagggcgaatatgcaatggtcattttttagatgctccaattagttttcatgtgtgtgtttaataatcatatcctccgtgaaccttctcttcaccgagaaagccataaagaacttagcagctctcattgatcagcaactccaatccgcatcatgaaagattgtcttactcggaagaaacgaggcactagtgcagtcggagggagtgcgctacctacaaacgctcctggtcgaggagaaatcaaataacaagtggcaaaaatcgtgtacttctccccagaaacctctgcgctaaacaccgggtcccacggaatcccgggtcctgccctgagcccagcgtggagaggggtcgcccgagggacccgggggacagcaaccccccacagacgcacacgtcccgggggtcggcgcgctgcgcgagggatgcccgccctcaggactgttcggcccgcgcgcactgccgccctggcggcgccctgcactcctcccactctcgaaccagcctcgcccgcggagcatccgcgcgctctctgcctctaacctctgctgccagcggacgccaccggcgcgtcccggatcccgcgcgggcgagcgagcgaaatcctctgcctgccctcccctccccgcctcccgcacccggggatggacttcgtcactggggcgccgcgggagacaggttcttcctccagccggggctccgggggcggggccacaacgccgcgctagtgaacctcagctgccggttactaggcgagatctcgccgcttggaaacagcgacgccccggaggactggggccgccccctccctctgcctgtccctgtggcctcttcccccgacgcatcctgggaagtgtagtcctctctgcgccggttagggcggacagcgcgcggaagggaccacaagtcccaggattccgcgcgcccagagggagtcgcagcgagacctgtaccggcgtcagcggagcctgcggctctcggggtgaggagatcccggctcaccaaggacgattgcctgcccacgcgggcgttcccttgtgactgaggcgggagctggcgtgcgtgggtctctgtagagaaaagcggtggagttggaatggagacggtctcccagcccaccactggaatttctccttcatcggtctctgagtgttgctgtaaccgacatcctcaccatgctgtaactgactcaagcttaagtttgtttcctacttaagttttccttytcattcacatggattttaatttgttaaagtgcagttctgccaagtttaagaaaaatgctgggaatgtgagctcacttctgccctaagaaccagcgtcttc

SEQ ID NO: 720648 - DNA, 1546 bp, Homo sapiens
tctggtttaaattttatttctatagtgataagaacactcaatgtgagatctatcgttataataaatttttaagtgtaccatgtggtatcgtcgactacaggtacaatgctatacagcagatctctagaacttactttccttacttaactgaatctttatgtccattgactagtagtaacccccaatttccccttctctccaactcttggagaccaacatgccactcatcaatattatgaaatttatatctcaaataggtggagtcatgtagtatttgattttctgcgactggattatttcactcggcataacatcctcaaggttcatgcatgttactgtatgttgaaggatgtcttttcttcaaagctgaatagtatttcattgtatgtatgtaacatttaaaaaatggtgaagtgattttctaaataagatcaatcctcaatgaaagtcataactattctgtaagtaaattttttttttgaaatcttaagcatgcaaccttaggcaatttctaaattgccaggaagaatgttttaataagaaggtacattcgattatatttactatgtctctccatttttgctcaattcaccattgctagtttattatctgggcttccaatactatgtcagaaatatattcaataattataagataaatgtatcagtcattagttacatcaacagaccaaaagcaggctcttttttcatgtacagttttgggcatcacaaatctaggctacattgaggctttatgtgtctagaacagtctatccattcaaacyctccatatcaaatattgcattttttatttctgggactactaggatgcctataagttcaaaatggaaagctaatttgtgaattatcttaatattccaaggaataattataacacatataatccacagtacacttaaaagctaacaattgatgttattacattgcatttttgtcaactttgctacagtaacaaatgaccagaaagtctccaagggtttatttcttgccctcgttacatatcagtggctctgttttgttccacatttctcttttattgtatgacctagtctggagaagctggcctccttttgggatacaaaattcttacagatttggaaaaaagagccagagagctgaaaggacatgataattttgaagagagtacatcatggctgttaaaattgccatgagaaactggcctattggtccttgtgctcacatatttatggcccaaataatttacatggccaagttcatgtcaaggagctgaagtgcattccttccacaggaaggcgatgcagttgcatggcaacacagcgatgtataatccacttacagggaagaggaaaacataatagtacaaagtataatgtccttcctctaaggcataaatacttacttctctttttttttcctatatgctaaatataaccaactcctccccaaggctaatataccaaaaatccaatccagtcctggcaatcatattcaaatatcagaatttattgataagtctctatattaggtacaaacctggcttttta

SEQ ID NO: 720649 - DNA, 1546 bp, Homo sapiens
tctggtttaaattttatttctatagtgataagaacactcaatgtgagatctatcgttataataaatttttaagtgtaccatgtggtatcgtcgactacaggtacaatgctatacagcagatctctagaacttactttccttacttaactgaatctttatgtccattgactagtagtaacccccaatttccccttctctccaactcttggagaccaacatgccactcatcaatattatgaaatttatatctcaaataggtggagtcatgtagtatttgattttctgcgactggattatttcactcggcataacatcctcaaggttcatgcatgttactgtatgttgaaggatgtcttttcttcaaagctgaatagtatttcattgtatgtatgtaacatttaaaaaatggtgaagtgattttctaaataagatcaatcctcaatgaaagtcataactattctgtaagtaaattttttttttgaaatcttaagcatgcaaccttaggcaatttctaaattgccaggaagaatgttttaataagaaggtacattcgattatatttactatgtctctccatttttgctcaattcaccattgctagtttattatctgggcttccaatactatgtcagaaatatattcaataattataagataaatgtatcagtcattagttacatcaacagaccaaaagcaggctcttttttcatgtacagttttgggcatcacaaatctaggctacattgaggctttatgtgtctagaacagtctatccattcaaactctccatatcaaatattgcattttttatttctgggactactaggatgcctataagttcaaaatggaaagcyaatttgtgaattatcttaatattccaaggaataattataacacatataatccacagtacacttaaaagctaacaattgatgttattacattgcatttttgtcaactttgctacagtaacaaatgaccagaaagtctccaagggtttatttcttgccctcgttacatatcagtggctctgttttgttccacatttctcttttattgtatgacctagtctggagaagctggcctccttttgggatacaaaattcttacagatttggaaaaaagagccagagagctgaaaggacatgataattttgaagagagtacatcatggctgttaaaattgccatgagaaactggcctattggtccttgtgctcacatatttatggcccaaataatttacatggccaagttcatgtcaaggagctgaagtgcattccttccacaggaaggcgatgcagttgcatggcaacacagcgatgtataatccacttacagggaagaggaaaacataatagtacaaagtataatgtccttcctctaaggcataaatacttacttctctttttttttcctatatgctaaatataaccaactcctccccaaggctaatataccaaaaatccaatccagtcctggcaatcatattcaaatatcagaatttattgataagtctctatattaggtacaaacctggcttttta

SEQ ID NO: 720650 - DNA, 1165 bp, Homo sapiens
cagcctgggtgcacagcataagcaagaacaaaactattgttttaagacctggagtggttgggtaagggcaaggttgtgtttaaagatgcatcagaattcagacaaaggaatagcccctaatatcatactcagatactttttctgtcatctgaagtatacgtgtcctcatcctcctcagggctgtgctgttcttggcatctttcacagccactgctatgctcacactggtgtatacacttcctgtggtggctccatcagaagccagcgaagaggtgattctattgtatttcttagagtattacgtgaagccctatgccaatttgggccattccttgtgggcctctttctgagcattgtcatgcaccaaaagcaccaagaaaacactctcagaaccaaggtgcaggccctgctgggtggagatgctcccttgtcagcctatttgctgtgaccactctggcatatgtggtggacgatgcctctgcttcctctctagtggctgcagctctctaccaagccctccaccaaatctgcagctctctaccaagtcctccactggaccccctcaatttccagcgatgaggcttagggttgaggatagacttgagatgctgggatccaagttctcagatgtgtgttttttctaggtgtataacttcatattaaccgtctacaacttgtggatgtctcccatcacttataataaagctctttgtttgcttaaaaaaaaaaagtcctttttgtatgccacagaggctatggaggtctggtgaayttcgtgctttcttgggacatctggattttttggccagcatcagttatgcttgctacttactctggtcatcctctgcaatgagcttcaggaaacacttgctcactgcactgacaagatgttctatcttttctctggacactgtctgctgaccttcattactgggctggccctgacgctattcactgggaaaccatcctgggaactgaagcagttcctggtgggccatgaatgttctggttaaaagccagaagaatggatgggtctttgttggtggtgacaagcaaagaccccgtggccttgtttatgtaatgaatgcttgtgttgctgagaaagggtgtaaatctgattttgtgaaagtctgatatatccaagctctttgtatgtagtatttaa

SEQ ID NO: 720651 - DNA, 1165 bp, Homo sapiens
cagcctgggtgcacagcataagcaagaacaaaactattgttttaagacctggagtggttgggtaagggcaaggttgtgtttaaagatgcatcagaattcagacaaaggaatagcccctaatatcatactcagatactttttctgtcatctgaagtatacgtgtcctcatcctcctcagggctgtgctgttcttggcatctttcacagccactgctatgctcacactggtgtatacacttcctgtggtggctccatcagaagccagcgaagaggtgattctattgtatttcttagagtattacgtgaagccctatgccaatttgggccattccttgtgggcctctttctgagcattgtcatgcaccaaaagcaccaagaaaacactctcagaaccaaggtgcaggccctgctgggtggagatgctcccttgtcagcctatttgctgtgaccactctggcatatgtggtggacgatgcctctgcttcctctctagtggctgcagctctctaccaagccctccaccaaatctgcagctctctaccaagtcctccactggaccccctcaatttccagcgatgaggcttagggttgaggatagacttgagatgctgggatccaagttctcagatgtgtgttttttctaggtgtataacttcatattaaccgtctacaacttgtggatgtctcccatcacttataataaagctctttgtttgcttaaaaaaaaaaagtcctttttgtatgccacagaggctatggaggtctggtgaatttcgtgctttcttgggacatctggattttttggccagcatcagttatgcttgctacttactctggtcatcctctgcaatgagcttcaggaaacacttgctcactgcactgacaagatgttctatcttttctctggacactgtctgctgaccttcattactgggctggccctgacgctattcactgggwaaccatcctgggaactgaagcagttcctggtgggccatgaatgttctggttaaaagccagaagaatggatgggtctttgttggtggtgacaagcaaagaccccgtggccttgtttatgtaatgaatgcttgtgttgctgagaaagggtgtaaatctgattttgtgaaagtctgatatatccaagctctttgtatgtagtatttaa

SEQ ID NO: 720652 - DNA, 663 bp, Homo sapiens
taagttttctgtcttatatgggcatagttcatggcatcccaaaactacaacagtaatatcaaatatcacagatcacagattgccatagcagatataaaaataatttagaaatttgaaatatggtaagaattaccaaaatgtgacacagacataaagtgagctcatgctgttggaaaaatggcaccaatagacaggcttgacacagggttgacacaaaccttcaatttgtaaaaagcataacatctgcaaagtgccataaagcgaggtgagataatacaacttatgcctgtaktttatgcacattttgaacatgtcttgaccagattcttctctttggtggagaggagggagttgttgagaggggaagggtgtttgcagggagaggagtcatggcattttgaggatacagtccaggtgtcagtgatacacattgctagaggattggtctatttggaaacatagatagaaaatatgtctattttatgcaagtatatgagtcatatacttattcttgtacacttagaaacgtaggtttttatttgtccttaataatattatacctgcagctgatttattctacccaaacatgccagcttgctgtaacatcaccacagttatttccattatttcacagtaaagtcaaagcagtctcagaataatgtg

SEQ ID NO: 720653 - DNA, 663 bp, Homo sapiens
taagttttctgtcttatatgggcatagttcatggcatcccaaaactacaacagtaatatcaaatatcacagatcacagattgccatagcagatataaaaataatttagaaatttgaaatatggtaagaattaccaaaatgtgacacagacataaagtgagctcatgctgttggaaaaatggcaccaatagacaggcttgacacagggttgacacaaaccttcaatttgtaaaaagcataacatctgcaaagtgccataaagcgaggtgagataatacaacttatgcctgtattttatgcacattttgaacatgtcttgaccagattcttctctttggtggagaggagggagttgttgagaggggaagggtgtttgcagggagaggagtcatggcattttgaggatacagtccaggtgtcagtgatacacattgctagaggattggtctatttggaaacatagatagaaaatatgtctattttatgcaagtatatgagtcatatacttattcttgtacacttagaaaygtaggtttttatttgtccttaataatattatacctgcagctgatttattctacccaaacatgccagcttgctgtaacatcaccacagttatttccattatttcacagtaaagtcaaagcagtctcagaataatgtg

SEQ ID NO: 720654 - DNA, 1948 bp, Homo sapiens
aaaataatcaattccacgccagtgacgagacaggaggtgattcagctagctggctggcagtaaaggttgtttagcaggtttcacatcctaattgggtgtccagcttgctaagtagcagctggtctttaattagttgaaaaattattaccactaagagttgctttaaaaagaaaaagaacaaaataattaaaatgttaaaatccatatggtgggtgctcatcctcacttgtcaatagctgttttccttctttatcactaataagtttaaaaatattcctaagccacttacttcttaaagtgtaactcatgtaaatgtaaaatccccaaagactcccagaatggcattgcaaaataatagctgctcatcatttaataattctttttgactatgaattatctccaacacccaccccctgccaaagttgaatatgtgattagtaagggaatcttagaacaattctcatagttaaagggactagtacattttctgacctgattcgttataaactataatgacactggagaaaatatcagtaccttacagatgacaggaagatgtcttttgcacacagattcctttcaaggactagcagaaagttaattttgcctgtaataacagaaaacccacatttggtataatattgtaattataattctatcctatttaaatataaagttttgtaaaaatataatatatagtatttagagataaattagcctacatattgaataggttgtgaaattctgcatttattatacacatattacaatcttcctacctcccatattgacaaattagttttcttagaccagctgcttttaaaaaatattttacttttaaatatttgtttattttagagttgagtggtagtacagtagaaagtgtatgaatttggtgctagtacaactggattcaagttttagctcactcttttatgaacctaatgtactgtaaaacatctttggttgtattattccttctacaatataagaataataaaatctaacttacaagattattgtcagctgaacaaagtacctagcattgtttgtggaatgtgtcaatgacttatgcattccaatattttcttttcttacacttatttcagtagacatgttatgcatttcagttttctagaaaaataaatattcggtataccatatgctcttatgatacagtatcagtgacatatgctttatacaggtatgcaatgtcattttgaataaacatatatattcataaatcgttgtgacttgatcaacttttggaaggtgaagatcatctgatttccatgctattcaccctatagttgctagagataatgagactgatttggatggaaactccgatatgaagtttacctttcatccttctgaaatttctaactcacatgaagaaaagagttactatgcaggtatccaagtacaagttttaaggttcacccaaccctatgatcccatgtggttgcttgtagggaaatatgcctgtctctcctaacagaatcacaaacgtcattttttttttttattgatkaaattggaaatcatcattctcagtaaactatcgcaagaacaaaaaacaaacgtcattttttaaaatctttaaattcttcttcaaaccacttctgttctttattttaatgtgcactcttcaagtttattacaggacaataaaatgaataatttccaattaagtttcgcatcagcattcatgcccactttcccgcttgcttttcagcactgtctaaggtctctgcccatgaaatctctccattattatgtcctgcatgttgtcgagttcactgctgaaattcaataaatatcaaattatcatattcattcaatggcaatttggaaaaacactaacatgtggtacagtaagatgcaaatcaggcagtatagattaatagcaaacatttggttgacatctctaatctcacatggattg

SEQ ID NO: 720655 - DNA, 1948 bp, Homo sapiens
aaaataatcaattccacgccagtgacgagacaggaggtgattcagctagctggctggcagtaaaggttgtttagcaggtttcacatcctaattgggtgtccagcttgctaagtagcagctggtctttaattagttgaaaaattattaccactaagagttgctttaaaaagaaaaagaacaaaataattaaaatgttaaaatccatatggtgggtgctcatcctcacttgtcaatagctgttttccttctttatcactaataagtttaaaaatattcctaagccacttacttcttaaagtgtaactcatgtaaatgtaaaatccccaaagactcccagaatggcattgcaaaataatagctgctcatcatttaataattctttttgactatgaattatctccaacacccaccccctgccaaagttgaatatgtgattagtaagggaatcttagaacaattctcatagttaaagggactagtacattttctgacctgattcgttataaactataatgacactggagaaaatatcagtaccttacagatgacaggaagatgtcttttgcacacagattcctttcaaggactagcagaaagttaattttgcctgtaataacagaaaacccacatttggtataatattgtaattataattctatcctatttaaatataaagttttgtaaaaatataatatatagtatttagagataaattagcctacatattgaataggttgtgaaattctgcatttattatacacatattacaatcttcctacctcccatattgacaaattagttttcttagaccagctgcttttaaaaaatattttacttttaaatatttgtttattttagagttgagtggtagtacagtagaaagtgtatgaatttggtgctagtacaactggattcaagttttagctcactcttttatgaacctaatgtactgtaaaacatctttggttgtattattccttctacaatataagaataataaaatctaacttacaagattattgtcagctgaacaaagtacctagcattgtttgtggaatgtgtcaatgacttatgcattccaatattttcttttcttacacttatttcagtagacatgttatgcatttcagttttctagaaaaataaatattcggtataccatatgctcttatgatacagtatcagtgacatatgctttatacaggtatgcaatgtcattttgaataaacatatatattcataaatcgttgtgacttgatcaacttttggaaggtgaagatcatctgatttccatgctattcaccctatagttgctagagataatgagactgatttggatggaaactccgatatgaagtttacctttcatccttctgaaatttctaactcacatgaagaaaagagttactatgcaggtatccaagtacaagttttaaggttcacccaaccctatgatcccatgtggttgcttgtagggaaatatgcctgtctctcctaacagaatcacaaacgtcattttttttttttattgattaaattggaaatcatcattctcagtaaactatcrcaagaacaaaaaacaaacgtcattttttaaaatctttaaattcttcttcaaaccacttctgttctttattttaatgtgcactcttcaagtttattacaggacaataaaatgaataatttccaattaagtttcgcatcagcattcatgcccactttcccgcttgcttttcagcactgtctaaggtctctgcccatgaaatctctccattattatgtcctgcatgttgtcgagttcactgctgaaattcaataaatatcaaattatcatattcattcaatggcaatttggaaaaacactaacatgtggtacagtaagatgcaaatcaggcagtatagattaatagcaaacatttggttgacatctctaatctcacatggattg

SEQ ID NO: 720656 - DNA, 1948 bp, Homo sapiens
aaaataatcaattccacgccagtgacgagacaggaggtgattcagctagctggctggcagtaaaggttgtttagcaggtttcacatcctaattgggtgtccagcttgctaagtagcagctggtctttaattagttgaaaaattattaccactaagagttgctttaaaaagaaaaagaacaaaataattaaaatgttaaaatccatatggtgggtgctcatcctcacttgtcaatagctgttttccttctttatcactaataagtttaaaaatattcctaagccacttacttcttaaagtgtaactcatgtaaatgtaaaatccccaaagactcccagaatggcattgcaaaataatagctgctcatcatttaataattctttttgactatgaattatctccaacacccaccccctgccaaagttgaatatgtgattagtaagggaatcttagaacaattctcatagttaaagggactagtacattttctgacctgattcgttataaactataatgacactggagaaaatatcagtaccttacagatgacaggaagatgtcttttgcacacagattcctttcaaggactagcagaaagttaattttgcctgtaataacagaaaacccacatttggtataatattgtaattataattctatcctatttaaatataaagttttgtaaaaatataatatatagtatttagagataaattagcctacatattgaataggttgtgaaattctgcatttattatacacatattacaatcttcctacctcccatattgacaaattagttttcttagaccagctgcttttaaaaaatattttacttttaaatatttgtttattttagagttgagtggtagtacagtagaaagtgtatgaatttggtgctagtacaactggattcaagttttagctcactcttttatgaacctaatgtactgtaaaacatctttggttgtattattccttctacaatataagaataataaaatctaacttacaagattattgtcagctgaacaaagtacctagcattgtttgtggaatgtgtcaatgacttatgcattccaatattttcttttcttacacttatttcagtagacatgttatgcatttcagttttctagaaaaataaatattcggtataccatatgctcttatgatacagtatcagtgacatatgctttatacaggtatgcaatgtcattttgaataaacatatatattcataaatcgttgtgacttgatcaacttttggaaggtgaagatcatctgatttccatgctattcaccctatagttgctagagataatgagactgatttggatggaaactccgatatgaagtttacctttcatccttctgaaatttctaactcacatgaagaaaagagttactatgcaggtatccaagtacaagttttaaggttcacccaaccctatgatcccatgtggttgcttgtagggaaatatgcctgtctctcctaacagaatcacaaacgtcattttttttttttattgattaaattggaaatcatcattctcagtaaactatcgcaagaacaaaaaacaaaygtcattttttaaaatctttaaattcttcttcaaaccacttctgttctttattttaatgtgcactcttcaagtttattacaggacaataaaatgaataatttccaattaagtttcgcatcagcattcatgcccactttcccgcttgcttttcagcactgtctaaggtctctgcccatgaaatctctccattattatgtcctgcatgttgtcgagttcactgctgaaattcaataaatatcaaattatcatattcattcaatggcaatttggaaaaacactaacatgtggtacagtaagatgcaaatcaggcagtatagattaatagcaaacatttggttgacatctctaatctcacatggattg

SEQ ID NO: 720657 - DNA, 803 bp, Homo sapiens
aaagtgtcaactgtatcttttacttactgaaatgtatctgtagcattgaaagtcaggaggaaaaactggaaataagcttttctaagcctgtaatgccagaaaaattaaggaactttttcaaagttcatctttaatgttttccccacaaaatttttttccccacaagtttactcattagattttatgctgaggtgaatttaatttgagaatgatttcttggttatgatcttttttatttaaatcaggtgatactgtttctaattggttacataacttaagggaacttctgaaaaaagttactcaaaatatttttcatagattcatttggttctttgttaaccttctatactgttaatctgtayagtgatatgacatcataaggccttttattttcaggcttgcatcttcttcactttgtctgtcttttgggatataataatgacctaaattagtacttaattcttggccaaagataattaaaaacttctttttattgtctgccatattccatgaatgacctcacttttatttttctttctaaatttatgttatttgtagttttaatatagctctgacctagtttatcctcaaagttcaattttcaggcatatcttctctttaaaaacgtagcaagccataatttgccttttaaatattggtatcatgcacacattatagcttgaagcaaaacttcatgtgttttgttttcacccctcattttgtttatcctgttaacgtacatgctgatggctcctacaacttctgttgtcacagccagcatatatctattgtagctggattca

SEQ ID NO: 720658 - DNA, 1515 bp, Homo sapiens
ttctcacttataagtaggatgaaatcataagaacttaatgaacacaaagaagcaaacaacaaacactggggtctacttgaggggagagggtgggagaagggagagcagcagaaaaaataattattgggtactgggcttaacacctgggtgatgaaataatatgtatgacaagcccccatgacacgtttacctatgtaacaaaccttcacatgtacctccaaacctaaaatgaaagttaaaaaaaacagacaaaaagaataggtggcttatattttttcaacatgtggcatatgaaaataaaacatttgcaatcctatttcacatgcacattaattatgtaaaattagaagcactaagggtaggtcattaagtgctgattagacaataatattatgtgttctcgcagcattggtagtaaggaactacgtttacttccaaagggcggaaagatcattaaaattttaatttgtttctcaacagttcaattataaaatgcttaatgtgatggactttaaccttatgggacttaacacaattatgggactgttccagtataccttgctctcttgtgtttattttctcaaaagattaggcacttgtaactgttttaagatcattcttgactgtaaaatactttataatgtstttcttttacttcctacactgtttctattttttagatgtctggcaaggtaacttcaaatgaaaagataaatgtttatcttgctgaaaatgaaaactttcaagtataccttttaaatatggttcagtagatacctacttaacatctcctttgtggatatcatgctaatggctccctctggtccagagttcattgggcactcacttactcacttattcatccaatcaataaatccaataaacaaatgcgtttttttcttcttttttttttttttcaaacagggtttcactctgtcacgcaggctggagtgcaatggcacgatcttggctcattgcaacctctgcctcccaggttcaagcaattctcctgcctcagcctaccaagtaactgggattacaggtgcccactaccatgcctgactaatttttgtatttttagtagagacaaggtttctccatgttggccaggctggtctcaaactcctgacctcaggtgatctgcccacattggcctcccaaagtgctgggattacaggtgtgagccaccccacctgcactctctttaaatgtttttatgtactaccatgtgcagacacctatttcttcctggctttacagtctaatcatacccatggttaagtagctttaccatgctaacaaagacatccctagttttcccccaaataaaataattgtaagtttgatcagctaattttcactaatatgaaaaaactgaagaaaaactcagagaactgcatttttcttcccatacttcacttatgtagtttaactagggtcttctgaaaattgccctgtctatgtctcaacatttaaacaggaactttagtcaagatatcggggcaacattcccag

SEQ ID NO: 720659 - DNA, 628 bp, Homo sapiens
cgagatcgcgccactgcactccagcctgggcgacagagggagactccgtctcaagaaaaacaaacaaacaaaacaaaaaaaaacccttctttctttaaaagcatggattcttatcctgtttttaattctcctacagagcttagctccatcagttagtacagtacctgtaccataacatacactaaataaatctttctgggagaaatgcatgaaggtgtggtgccaggggctaccatgatttacatcttatctttttgttttttgagacagagttttgctcttgtctcccaggctggagggcaatggtgcgatcttggctcactgcaacctccgcctcctgggtttaagtgattctcctgcctcagcctcctgagtagctgggattacaggtgcccaccaccacacccagctaatttttgtatttttagtagagacggggtttygccctcttggccaggcgggtctggaactccagacctcaggacatcaacccacctcggcctcccaaagtgctgaaattacaagcgtgagccacagcgccagcctacatcttagtcttttaagaaaatcatattatcaatgcctttgcaaagaaaaataatactgtttgatttggatttatttgtct

SEQ ID NO: 720660 - DNA, 631 bp, Homo sapiens
tgtccttagtgctatagggcatctgggaacagtcctgaatttgaatggcttgtctttttttccctgtaggtagacctgttttttgttttttgttttttwaaaaaaaatcagatttgggtccttgttcctggcttgggcagcatggtcactgagcctgtaagggcattacaccactcaagtctaaatgcctctgagacttgaattatgagactcacccaacatcttggaacaggaagtggagaccctgccactaaccgaagcttcaaacttcatgtaaagtttgtgcccgggttggaatgttgccaggacacctctcctctaacagtaagcaacatggggcccacaggaagctccgcagtcccttatgcattttcatctcatagccaaatccccgcaacactgtcttgtcacatggcccctgtgtgactgggtcagacaaatgagacatcaaccttacttttaactttgccacattttttttttcttttttttgagatggaatctctctctctcacccaggctggagtgcagtggcgtgatctcagctcactgtaacctccgcctccagggttcaagcgatttttctgcctcagcctcccaagtagctgggactacaggtgcctgccaccac

SEQ ID NO: 720661 - DNA, 919 bp, Homo sapiens
tcaaattctttagtgaaccattacttagcatagagtcactttggaatcaattaaatatgaacctttgtcacatcagtattcatagaaaagcacttaggtgattaaagaccgttggcctctaaatatttgactacttaccaacaccagtcatttagaaagccttattagtttttttaataatattttcagggatggcaagcatgaaaaagtaaaacaaaattagaggaaacataactgccttcaaatgcatgttcctggagcatcatcacagcttgtgctattctaaggtgctactattctctctctagctccacttatcttctgctgctaacctctggggcttcccaggctctctgcttctatatcgtggtatttcctcatgtataatagcaatacatgtatagcaatacacatatgaagttataaatcttcatcatcaaatacgcataaataaaatgtgtattttagtctgatcccacttaaatacattttacatttagtaaataaagsaagtcatagcctagttagtatttcagaaactgagttaaatttaaacaaacttttaaaacatatcggaacacacttaaaccatgtatatgcaactgatgttagttttaaataattatttctaatgatactaatcataatagctactatttattaatggaattatatgctgagctatgtggtctatatgagcttatttcatcttcataacgccaatgctatgaggtagatgttctcagccctatttatgcaggagaaaaccatggcttggaaaagtacttataagtcatttcagtaatctgtagaaggttgtacaagtggtctagttgggattagaatccaggtttgcttaacttcaaagcactttttcttgactgccaagcccaaataactcctcacacaggctccctaa

SEQ ID NO: 720662 - DNA, 2981 bp, Homo sapiens
tttttttttttgaatcagagtctggctctgtcccccaggctggagtgcagtggcaccttctcggctcactgmaagctccgccttctgggttcacgccattctcctgcctcagcctcctgagtagctgggactacaggtgcccgccaccacgccctgctaatttttttgtatttttagtagaggcagggtttcaccatgttggccaggatggtctcgaactcctgaactcgtgatccgcccacctcggcctcccaaagtgctaggattacaggcttgagccaccgcgcccagcactctgtgcaacttcttacaccatgttttgttggtttcaagggtagttgcttgctctagctcagttctaaagcctcaacatgctaagtagtaattgttttgcacaataaaaacttattttgaatatttactgaattggtctgtatttggcttaatgtcttgatgccttggtttcctataggacaataactacacaatatatatacctaccttctaggtttgatgggaaagttaaatgagagaatagatataaagggcttagaacaaacaatgtctgggacatagaaattgctccttaagctttctattattacagctgttattgttgtttgtcaacagaagccaagtgtcattagacaggtaagctagacataggaagagtaggcataatactgtgtgtttgctcctttagttgggaattgtaaaagaaaaaggatgacttacacttaggaattaattgtacttctggtgaatcaattcaaagcaagtgcacactgcgtctagaagctgaaaaagacaatctattcttcttgagaaattcagctccagctctgataccatctctgctcttccatctactcaagggttgggtagaaacaaaagcatttttatatagcacatttatcttaactaatgtaaaggaatgtgcacatattttgataagtgagaaagaaatcacttagaaaatcacagctaaaactctggaagatttagaaaaaaacaaattgtagctttaaaaaaaaacataatgcctaaaaatagcttttgttgtaggcaaaaaagtaatacatcctcctcaggaatttgtcacctatatttttcaaattcatgaaactttttttctttgtaaaaagaaaaaaaagcttaatgatattttcctatctgtaaaactttttaattttgtagttcttaataaataacttaatgatggtgtaaaaatccaattttaaggccaggtgcagtggctcacacctgtaatctcagtactttggcagagagaggtggataaattgacctcaggagttcaagacaagcctgggatatgtagcaaaaccttgtatctacaaaaaatacaaaaattaaccaggtgtggtggtatgcatctgtagtcacagctacttgggaagctgaggtgggaggatcactggagcccaggagatcgaggccacagtgagctgaaatggcaccactgccttccagcctgggtgacagagcaagactctgtatcaaaaacaaataaaaaatatcagattttactagaaacatctaaatttgttcttaagattataccatatgagaaaaaattacagcttatttattgagccatgtagcaaacgatgagctcactgaagaacatgagcaaataaggttcaaaaatgtagtataagcttagtagtctttgttctcatacaaaagtcaacttcagtagtatatatttagggttttgttattctgtcttctggtaattgagtatgtgccatagatctataatacgttttcaaatatatcatgactatttccttttggtctgttgactgagatcaagtgttatgtgctgtctctagggactcaagccggcaaagccaagaaatagactgttatctaataagcttttagcatcttttaactaaaatgatggtaaccaatattatgctaagtgttgcattatttatgagcaatctgttgctcaggaaagatgctcaaagcatcagctacaatgagtcttcatcattttcagctatgtcagacaataatcacactccatattttttttcatccttttacctctttcttattttgttccccagttacttgatttggtaaaagaactcagctaagtatatcttaaagccataaattctattggttagaaagtatttcccttttgttttctttctaaaatcagaatattaatggaacacctaatgtactcacagtagcactttttacagattccttatgagaaaggtagctgtatgccatatactgttttcaaaggttactttaaaacagtttcttggtaaatagtccaatgaacaaatacatcaggcatgtgtctggatgggagggtgtatatatatatgcgcatatatataggtgtatatatatatgcgcatatatataggtgtatatatatatgcgcatacatataggtgtatatatatgtatgtgtatatatatatatatatatacacaatatatatatatatatacaggatctcaaagaagacagaggagagttttatttattttaggttcccatatctcagcaagttgtttccctagcaagctgactttctggtctctactctgtccatttaagttttgccctcatccaactatctgcactcatgtgtaacaaattaagatatattcctctatgctattcagagactattaattctttactcactatgcattgtttatgctttgtaagaaaattagattttattagagagaagaagagaaaatacgtccaattaaaaaaataaaatgtatctgctatcatcctttgcaaggaacgttgccattttgcatcatcgtagtctatgaattgtaatgaaaacttgttttattgtacattccaaaacgtacttaaaacacatacacacacacacacacacatgcacatacccagcattgactattggccacttatatttctcctttcttctactattaaagttgcc

SEQ ID NO: 720663 - DNA, 624 bp, Homo sapiens
tcccccgctgtctcaccctctccaaatctgttgtttccacctcctaaacagcaatccatcctactgccttgccttgaatccaggcctccctcacctcttctggactatgcaggaggctcctaactaatctccctgcttgtattcttcctcacttccaatccaccctgcagcctcagccagagtgaactgaaaagttagagttaactgtgtcacccccccgccccctcaagctcacccccactgggtagataggaactctccaaacagctccctttgcctggagggtttgctctcctgccaactccctctgcccraactatcctttcagtgccttcaccccttatgtccctaagaactcagtccaggtgctacttcctccaggaagctttctctgacttttcttcttctcctgtgtgcccctccttgggcctcccacagcctcctgggctctctttcaccacagccctttccccatgtaacccaaaataaagcaccttccttagctgtctattctatgactggaagtttctccaggtcagggctgaggggcagtagatcacagtggctatgagcatgaactctggactcagactgcctggctttgaattctggtactgcgattta

SEQ ID NO: 720664 - DNA, 624 bp, Homo sapiens
tcccccgctgtctcaccctctccaaatctgttgtttccacctcctaaacagcaatccatcctactgccttgccttgaatccaggcctccctcacctcttctggactatgcaggaggctcctaactaatctccctgcttgtattcttcctcacttccaatccaccctgcagcctcagccagagtgaactgaaaagttagagttaactgtgtcacccccccgccccctcaagctcacccccactgggtagataggaactctccaaacagctccctttgcctggagggtttgctctcctgccaactccctctgcccgaactatcctttcagtgccttcaccccttatgtccctaagaactcagtccaggtgctacttcctccaggaagctttctctgacttttcttcttctcctgtgtgcccctccttgggcctcccacagcctcctgggctctctttcaccacrgccctttccccatgtaacccaaaataaagcaccttccttagctgtctattctatgactggaagtttctccaggtcagggctgaggggcagtagatcacagtggctatgagcatgaactctggactcagactgcctggctttgaattctggtactgcgattta

SEQ ID NO: 720665 - DNA, 633 bp, Homo sapiens
tgtgtgtatgtacacacacacatatatatgtatataaatcttggagttatgtaaccaccaaaaaagtcaaaaatagaagtgctacaaaaagacaacttctggtaagttgagcctgtcagtgaaagggagacttttattttttatttttatatttccttccttctgcaaggtttgaattgttttgaaaatcacattttaaatggtcacattaggacacaagtaggccaggaaggagtgacattattaggtagagaaccttgaaaccactgtaattatatcttgaaaagataaatcrtttgcacaatttagtgcttattattgatgaggaatttcttgtaagattgctgtcagctgcttcaaggagctactcaccctgttttctccaactcacagacgaccaagttctgtggatcaggcatgggtgtggcctagaccagctcagagcacagctgcaaagtctccccagatcctccccaagttaagcacacaagtacaggggcttggccacatgctgcagccaccagttcacactgattctgatagctctctttcttgccccactaatccacataacaatatgttgtccatattgctttgcagcatcgtgaaagtgctgactcatgtttcacacca

SEQ ID NO: 720666 - DNA, 633 bp, Homo sapiens
tgtgtgtatgtacacacacacatatatatgtatataaatcttggagttatgtaaccaccaaaaaagtcaaaaatagaagtgctacaaaaagacaacttctggtaagttgagcctgtcagtgaaagggagacttttattttttatttttatatttccttccttctgcaaggtttgaattgttttgaaaatcacattttaaatggtcacattaggacacaagtaggccaggaaggagtgacattattaggtagagaaccttgaaaccactgtaattatatcttgaaaagataaatcatttgcacaatttagtgcttattattgatgaggaatttcttgtaagattgctgtcagctgcttcaaggagctactcaccctgttttctccaactcacagacgaccaagttctgtggatcaggcatgggtgtggcctagaccagctcagagcacagctgcraagtctccccagatcctccccaagttaagcacacaagtacaggggcttggccacatgctgcagccaccagttcacactgattctgatagctctctttcttgccccactaatccacataacaatatgttgtccatattgctttgcagcatcgtgaaagtgctgactcatgtttcacacca

SEQ ID NO: 720667 - DNA, 589 bp, Homo sapiens
cactattaatgggctcatacatgattattttgacttttaatatggtatcctttatacatgctgaatttggtagcaaatacattttggcttaaacaaattagggattttttttttccttctctttatgaataaagaccagaaatactagtgtggtagctccaaaagtttattaaagacttaggccttttccatccttctgctctctcatctgtagtatctgagcttttatcttcaagataaaagatatttgcagaatctccagccaytgttcctatgtttcagacaggaagaggaagagcaaggggcagaaaggggtgagttctagtcttcgtcatcttttaaggagtttcttggacatgttagtcaatgacctctgcttgcatttcattggccagaagttgactctgcatacctagctgcaagggaagctacaaaatgtcaaatcaactgggtacgttggtgatccaaatgaaattggggctttactattaaggataaggggagtgaatatgagggaggcaatttacctaataaatactaggtagatgttctctgtcacatataaactgatgggccaatttaattacaa

SEQ ID NO: 720668 - DNA, 626 bp, Homo sapiens
tattaatttaaaaagtatgccaaatcaattaaaaaccattttaaagggaaggaataaaatttagttctacctaactgcagctcagctctaatttatcttccagccactttcaagggattttacttggttcttaatcgaacattcattggaaagggtaattctcatgaaattacaatggcatctcttgcatcgtttaawgcaaatgttcccattctttggaaatcgagagcagcttctccaataaagactcccttcaaagtgtaaagtgggagagcttggggagctgcttgagaagaataaaacattgcatttcagaagctgctcaaatttaaaactctgcccgcatcactatgacaaattgtattccaaatataggttattcacaacatgtttgttataaggcgaggcatatgaattcctgtcgtgtctttctttacaaacatgtcaagacttgtgaacccttaatgaaatgcagcattttagaggcaagggaagccacaaagacaccagaaagaagagactctctttcctgggactgggaccttcttatgctagtgatggttcccattattagagacactgtatcatctcagaaccaagtggaactttagaggtcattgagtcca

SEQ ID NO: 720669 - DNA, 1187 bp, Homo sapiens
tgaaatcaattcaaagagaactgtcaaatgttaagatgggtgtggaaaagccttctgaccaaaggcttttggtctgatccttgatttttagtctctttagatttctttttttttttttttaaaggtctgtatgtctcagttatttgttctacagaatggagccaaactttactggaaaaaacagggatgccataagagttattaattaacctttttgggtttttaggtagtggaaagctgagagcctaaggaactgaagacatctgtctaagtgagcagaagagactatttctggcactactctgggcttccaaggcaaatcttgagttaattatagctcttggtacattcaacaataatcaacttaataaagttaagctttgtctccaggtgatggacagaacacatttttgtttttgcaaattaaaaacaaataataaaatatagtaagttctatgatcaaaactctattatcaccatccagaattgatcattgttaacattttgtcatacttaccgcaaatctttcttttaattaaagaaatagattgtcttagtccatttgtgctgctatgacaaaatatctgaaactgggtgatttgtaaacaataggagttgctccggaggctaggaagtccaagagcaaggggctggctaatttggtctggtaagagcccattccttatagatggcattgtataagtgtcctcccatgacagaaaggacagaaggacaaagagggactaagttagttccctccagcccttttataaaacactaattcactcatgagggcagaaccctcatgacttaatcacttcccaaaaggttccacttctcaataccactgtgatgggggttacatttcaacatgaattttggaggggacaagaacattcaaaccatagcacagacttcaaagataaagtgaaatgctcagtccgttcctagttccacatgactgctgaatctctctagagccatcccatattacacatttattgtatatctcactagtgcattttttactcttttgttgacatatgtatgaatctttgaactattgttttagktgttctttaaacacttttcacatgcagtttttcatgctgtttattttttcttcaattgcatttaattcaaactgttatgattttgaagcctatccaagttgatacatatacatc

SEQ ID NO: 720670 - DNA, 1344 bp, Homo sapiens
tgggaccatttaaattctgtttttgattttatcctgcctcttcaaattatttgccttgtaagcgctttaactttttggtctttagccctagcttcttagactattaatttttttttttaacctgtgtgaccattgaagcacatttatagaaaatctcactgacagtgagttagctccattctagagaaggaagagaaatgtttggaaggttttyaaatgggagtatttactaaaccttgggtgtgtatatgtgtgtgtgtgtgtgtgtgtgtgtgtgtgtgtgtgtatgtgtttgtgtgtgtcctcttagtgcaggtaaatgaggaaatcatcagctattagagcccattgagtctggtatgtgtagaatgttctctattcaagctttttctctgccacttatttggtgtttggctgccatttcaatgggacggtgtcttagtttcctctaaatccatttgatagagagagaaggagaagaaggaagatgagaaaagagagagagagagagaaagacagagagagaactctttagtacaatgtgcattttgaatggcttatgtatgatacatgaacagaccaacatatcacatcatatcacatcatatttgcttggctattgggtgatttgttaaaatatttttatttctttgttttaaattgtggaggaaattctcaaatctcattttatttgcatctgcttctaagtgagacttctgacggttgttcttacaaattccaaaacactttggagacacattttttctggcctttccttaagaagaaagggggcccaaggcaggcagtgctgggcctctgtggtcccagggcccctctgcagccttgggatccttgtgtggacactctcagtcaactcctgcttgccctagatttccctccatccatctcctcatcacacttacctgtctttgacccctttccttcacgatttgctttctgccagctaaatcaataaatatatgcatgcagatatgttagaagctgctaattagccaaaatgttactacttctaaatagaattatttgcattttagcataatccttctaggacaatgccctgagtcaaaaagatggtgcttgtggtgaggcttttgtttgatcctgtgggtatcttctaatcaggccaggctgaaagctaggttccctgcactagcataagaatgaaactgactctactatgacagtagcagcatgtctttataaattttttaaaaagtatatttatgtattgtgcatccctgtattactatgtgggcagcttattgatcccagcagctgctgaatttttagatgccatttatgattgttcccgtgatatagtga

SEQ ID NO: 720671 - DNA, 1344 bp, Homo sapiens
tgggaccatttaaattctgtttttgattttatcctgcctcttcaaattatttgccttgtaagcgctttaactttttggtctttagccctagcttcttagactattaatttttttttttaacctgtgtgaccattgaagcacatttatagaaaatctcactgacagtgagttagctccattctagagaaggaagagaaatgtttggaaggttttcaaatgggagtatttrctaaaccttgggtgtgtatatgtgtgtgtgtgtgtgtgtgtgtgtgtgtgtgtgtgtatgtgtttgtgtgtgtcctcttagtgcaggtaaatgaggaaatcatcagctattagagcccattgagtctggtatgtgtagaatgttctctattcaagctttttctctgccacttatttggtgtttggctgccatttcaatgggacggtgtcttagtttcctctaaatccatttgatagagagagaaggagaagaaggaagatgagaaaagagagagagagagagaaagacagagagagaactctttagtacaatgtgcattttgaatggcttatgtatgatacatgaacagaccaacatatcacatcatatcacatcatatttgcttggctattgggtgatttgttaaaatatttttatttctttgttttaaattgtggaggaaattctcaaatctcattttatttgcatctgcttctaagtgagacttctgacggttgttcttacaaattccaaaacactttggagacacattttttctggcctttccttaagaagaaagggggcccaaggcaggcagtgctgggcctctgtggtcccagggcccctctgcagccttgggatccttgtgtggacactctcagtcaactcctgcttgccctagatttccctccatccatctcctcatcacacttacctgtctttgacccctttccttcacgatttgctttctgccagctaaatcaataaatatatgcatgcagatatgttagaagctgctaattagccaaaatgttactacttctaaatagaattatttgcattttagcataatccttctaggacaatgccctgagtcaaaaagatggtgcttgtggtgaggcttttgtttgatcctgtgggtatcttctaatcaggccaggctgaaagctaggttccctgcactagcataagaatgaaactgactctactatgacagtagcagcatgtctttataaattttttaaaaagtatatttatgtattgtgcatccctgtattactatgtgggcagcttattgatcccagcagctgctgaatttttagatgccatttatgattgttcccgtgatatagtga

SEQ ID NO: 720672 - DNA, 1233 bp, Homo sapiens
tgtcaaatgttcttctcactttgaatagtgctatatttcttattgtttagtatggaactggaaaacatgtataatagtattgygtttgatagcaagagctcagtgtatttaactatctgcaaatgaatcctacttttcctacttgtcagcgatattattttgggggttatcttagtccactttgtgttgctataaagaaataactgaggctgaataatttataatgaaaacaaagttcattttgttcacgattttggtggctggaaagttcaggattggcatctgcatctgctgaaggtctcgagctgctttcacttatggtggaaggtgaagaggagcaggctatggagggatcacagagtgaaggaggatgcaagagaggtgtgtgtgtgtgtgtgtgtgtgtgtgtgtgtgtgtgtgtggcagtggagggtagagtcaggctttttttaacaaccaactcccatggaaactaatagaataagaagtactccctcccagtgaaaaacattaatatattcatgggggaatcacacatatgacacaaacccctctcattagaccccacctccaacattggggatcaaattttaacatgagttttgggtgaaacaaacatacaaatcatagcaggaaattcatttatcctttcaacatgaatcgtctgaaaaaaattaccaacatatctcatataatagctatgagaattaaatgaaacaatatacatagaagccatgaaacaatgcctggcatatagaaaaactgcacaataaatttaaatctaaatgtatagtaacaaaatgtatagtttttgttaattctatgtctacagaataatacataaaagcttatgaaaattagtgttaattgtcaaaaatagtagagatttttctgacttaattttcaacaattatgttaaaattcttgcttattgaaaataaaacatagatgatgagtgaagaaaacacatgcatccatccagacacttagctgcaggcaacagaatcttaatctggataatttaagcaggagggaatttttaaaaacacgtttggtgagtttatgtcattggtatagatgaacaacctgataaagagctacactatcaggcataacagccaactccattctgcagaatgttgctgcggctgagggctccactgcctccaatcctccctctacatataaaatgtgcatttctgctagtgctttggagaactgaatcttgctgca

SEQ ID NO: 720673 - DNA, 614 bp, Homo sapiens
ccatgttaaaattctgacctataaaagaaaaagaaaataaatttgcattgttttaacccattaaatcagtggtaatttattacagaagaagtataaagctaatataataatctacacatacttttacttcttamaaatcctcaaagtaatcattttattttattcccaagttgtatgaaagggtatttagtcttagatactgtcatctgtaaatagcagcacgagtctaacccacgtttgacatactctaaatcagttcagtttctactgtatcacagtacttcccaatcggattaaatattaaaatgttttgaaaatatgaagcttcacaaggcaataaatattaatatctttagttattaaaagtaataacattaaatagagcaactggtagatcattatatgccataaacatcatgaaatctctgctgcaccggcatgaaataaaataaaaattatttgtcaaaataaataattattccctacagaaatattgttaactcagacaatgatctccatctattagcatttgggggttcagaggaactcttaaaaatatgatacaaaaattttaaaaaataagtaatattggaacttttggattccaggccagc

SEQ ID NO: 720674 - DNA, 642 bp, Homo sapiens
caacagccacaaataaaattaaacaccagggaattaactaaccaaagaagtgaaatatttctataataaaaactataaaacactgatgatggaaattgaagaggacaccaaaaaaaaggagggcagagagggggaaagttctagaaaaggaaacagaagacatttggtacaaggtccaaataaaacaagatccccccccaaaaaaaatgcaggaaaaaaaatcatcaaataagttattcaagaaaatgtctccaaatgataggatatggattataggtttaaaacaaaattaagtgccttgcacagtgagtaaaaagaagagttttactgggcacagtggctcacgcctgtaatccctgccctttgggaggccaaggtgggtggatcatttgagggcaggagttcragaccagcctggccaacatggcaaaaccctgtctctactaaaaatacacaaattagctgggcgtggtggcaggcacctaaagctcccaactatttgggaggctaagccaggagaattgcttgaacctgggaggtggaggctgcagtgagccgagatcgcaccactgcactccagcctgggcaacagagcgagactccatcttaaaaaaaaaaaaagaaagaagagttttaaagttt

SEQ ID NO: 720675 - DNA, 1016 bp, Homo sapiens
taaaatcaaagtgatgggcaggctcactcctccagggggctctgagggaggatttgcccatcctctctcctggcttctggtggttcccagccattcctggtgctccttggcctgtatgcacatcactcacctcagcatccatcttctcatggcttcccctctgtgggtcttctcctcttgtcctctgagaaggacacttctcattggattgagggcctacctaggtcatccaggaagttcttgtctcaagatccttaactcaattacatctgcaaaggccctttttccacataaggttacgttcctaggttgggggtaaatggatcttttggagaccaccattccacccccctcagggggccagggtggacaggggaggatcacttaagagatgcatggcagtggtggcctggactggacaggaggaagcagagtcatgggcaggtttgagaggtaccaggaggtggaatccaagcacttcaccagtgttgacatacacagaattgaggaagatggagatgttaagggtgtctgtcaggcattggcttaagcaactgggtggatcatgattttttaaaaaatctttatttatccaattctataccacaaagcttacctgtctccccaaacccaattgccccagttccttgggttacctccagggcaaacccaacttcttcaaaccaggtctggttctctacagaactccaggaaacatgagaagcccttcatgtgattgctaagtaattgcttttcaactataaaagtaattaaraaatggcaccaatttccctaagtgtataatataattaaatccactggcttggaaaatcatttgtgataaaccgaaacagcaaaagatcaagccactgggaattagggaaacgtctgacatgaagacagagagctctctggggccttttcctggaggggccttggtgggcgtggaatgtggctgggaaaggcagggagagtggaggatgggaaaaccagatccccagctggctgggactgga

SEQ ID NO: 720676 - DNA, 1503 bp, Homo sapiens
tatttttaattaatattatatattattattttgtttattatcttataataataaatatcttaatttattatcaattgggttagctaaaatgaaagccacactgttttaggcatgcctsggtgtaaaagttgtaatggaaaattctaatttattagaaatataattgagaaagtgggactatattcattgtgatataattaactatggatatttcgttaagttctcctacaacaagttgaggacgaagtaaagtacaatttttgtacaccaatttttaaactagacattaaaagagctgtctactcacgtcactgtacttaactaacaaacaagtctataaatcagataccgatattcccatttaacagaccagaaactgaggtaaaaatattctccggtaactggttcaaaaccagccagatgataaattgtaacataggtattacaatactggcttatctgatttcaaagctcatcttcccttcagttctttttatatctttaaaataactgcgttcataaaaacacactatttatagtgtgtacttgcaatagtttcataaacaaggaaaacatatggtttaggagcaaacatttcttcatcgattactatttctccattctaagatcttatctgaaggaatcttttaaagtattctagatttgtttttatagttcttaattattccatcattctctccctcaaggtgaagtcttactgctgcctcttaattttagcaacatattttactaccttgttatttcccacagcagctagcattgtttcttattgtgagtagcctctctgttaatcatagttggttttctaccattgcaaaacaaaccgactcagaacattggattaaaatcatttattatttcttaagattctgtggttacaccaggcagtttttgctttgttttgttttgttttgtttttaccgacacctccttgtctcattcatggagttgcagtctactgtgactcagcagaaaatggatggtttatgatcacctgactcccatatatctggagttgtgctgatggcaattggcaggtcctccctctttcaagctggtctctcatcagttagcagtgtggcttggcttccttaaaggagagaaaaagcatgaacaacaaggactcttggggctattctctagaattcacatagtgtttaatttgcctattcctattggtcaaataagtcacaggaccagcctggattcaggatttggggaaacagtctccaccttttgatagaaggactgtaaaatattgtatccatattttcaatctcccataatcatgcatatttatgttagtattactagaaaaagtactagtattagtattaagagatacagaattgtgtagaactaatatctccaactcgagagcatgatggccctgggttcaaaccccagcactactacttagatctgtgtaaacttgggaaagttaataaatctttctgcatctcagttttcttatatctaaaa

SEQ ID NO: 720677 - DNA, 665 bp, Homo sapiens
tgacaaaaccacagttacttttggatcaacctaatagaatgacaattkaaagtatatgatagcctagagacttttcagtggctaatttattctgagacaatttgcttaacataagtttcaatctaggcaaataaaaatagttgttttttgttgagaacctattgttattattactattttatgataagaaattaaggctctagatgtttatgtgactctccctaggtagaaaggtctgtcattggcaaaggtaaaactgaagcttagattagcttgagactaaagcctgtggcctttccactggctgaacaagaaaaagtgaaacagcaacttagcgtgaagattaagttgaaattctgagattctgattcatggtggaagggggacaaaatcagaaataaataattgatacatataaataaaggaaaccatatttctttttttaaaaaatatagctattaattcaactaaattgatcttgttgagatcaattctttgagtaatatatcatgatagataacttgctgatactatgaaaggtgtattatattttggtccaaaaccaataaacctaggaataaatttaggctaatccttttgttcaaggatttgagatcacatcataaagattgagtgtactattatgagtcatttggtttataaca

SEQ ID NO: 720678 - DNA, 665 bp, Homo sapiens
tgacaaaaccacagttacttttggatcaacctaatagaatgacaattgaaagtatatgatagcctagagacttttcagtggctaatttattctgagacaatttgcttaacataagtttcaatctaggcaaataaaaatagttgttttttgttgagaacctattgttattattactattttatgataagaaattaaggctctagatgtttatgtgactctccctaggtagaaaggtctgtcattggcaaaggtaaaactgaagcttagattagcttgagactaaagcctgtggcctttccactggctgaacaagaaaaagtgaaacagcaacttagcgtgaagattaagttgaaattctgagattctgattcatggtggaagggggacaaaatcagaaataaataattgatacatataaataaaggaaaccatatttcttttttwaaaaaatatagctattaattcaactaaattgatcttgttgagatcaattctttgagtaatatatcatgatagataacttgctgatactatgaaaggtgtattatattttggtccaaaaccaataaacctaggaataaatttaggctaatccttttgttcaaggatttgagatcacatcataaagattgagtgtactattatgagtcatttggtttataaca

SEQ ID NO: 720679 - DNA, 665 bp, Homo sapiens
tgacaaaaccacagttacttttggatcaacctaatagaatgacaattgaaagtatatgatagcctagagacttttcagtggctaatttattctgagacaatttgcttaacataagtttcaatctaggcaaataaaaatagttgttttttgttgagaacctattgttattattactattttatgataagaaattaaggctctagatgtttatgtgactctccctaggtagaaaggtctgtcattggcaaaggtaaaactgaagcttagattagcttgagactaaagcctgtggcctttccactggctgaacaagaaaaagtgaaacagcaacttagcgtgaagattaagttgaaattctgagattctgattcatggtggaagggggacaaaatcagaaataaataattgatacatataaataaaggaaaccatatttctttttttaaaaaatatagctattaaytcaactaaattgatcttgttgagatcaattctttgagtaatatatcatgatagataacttgctgatactatgaaaggtgtattatattttggtccaaaaccaataaacctaggaataaatttaggctaatccttttgttcaaggatttgagatcacatcataaagattgagtgtactattatgagtcatttggtttataaca

SEQ ID NO: 720680 - DNA, 578 bp, Homo sapiens
gtttataatctgatagggacatacaatattaatctctgattatcctcatttaagttcttatgtaagaaagcactggtgactggtagatccctaccttaagtatttttagaaagattgcaaaaatgaactttccaagaagaattataatggagtgattattatgyccaccctatccaaataaggtatctttgtttttatttcaagatggtatacttttaaccgaataaaatggcatttctttattctttcaaagcaaacaaataaaatttttcattgctaaaggtatttgtatttgtatttctttagtaagctctcttgtcatgttcactactttttattaaggtgtatttctgttattgattttaataagacttttatatattgtataccaaaatgttttctaatttgtgccattctgtatttttgctttaaaatatttagttttaaaatgatataaataaaaagttattcaaatttgtataacaaatttttgaaacttttatgttaaaaatgataaccttataccttagctgataatctatttgctttcttttcttgttgacagttgattgacagct

SEQ ID NO: 720681 - DNA, 638 bp, Homo sapiens
tgggaagccgaggcaggtggatcacttgaggtcaggagttcaagaccagcctggccaacatgttgaaaccccatctctactaaaaatacaaaaattagctgggcatggtggcacaaacctgtaattccagctacttaggaggctgaggcaggagaatcacttgaaccagtgaggyggaggttgcagtgagccgagattgcaccactgcactctagcctgagtgacagagtgagactctgtctaaaaaaaaaaaaaaaaaaaaaaaaggtatctaaggaaaggtaacaagtcaattggttattaatccaaaaaatgctagacaattgctaagctgagaaactatggagaaagtagctgaacactgaacactcataaaaattttaagtgtggcaacagaaaatgacattaaaaaagaattcaaaacaaatcagtaaaaaccgaaagatttttgtttaaaatgacaacattctggtgtctaatgaggaaatacactttttgaatattaaagatacccacacacaaagccccatcatttcaacaaactgagtaatccgtaatgcctgcttaagaacaaaatgaaaacccatccactcagacttgttggtgatctccaaaaaccacatgaaaaccttcttgcg

SEQ ID NO: 720682 - DNA, 484 bp, Homo sapiens
acataaataatgtatatacatatatgtatatatattacatagtaagcaactctaaaccacttttaaatgaattacttataactttttcttttctaagttgccrtgatgatcttctctgacaattgttcagtaatctcaccatcctccaaaagatcatgatctaattcaattagacttgataacaaactgatcacaaactgatcacacaaaattttcattaacaaagacccaactaatttagaaaatgctatgtttgatattcattaaaattctgtttagctccaatagcaattctatgttcaaactggtgggtttagcaaataattattaaagggagagtacacttgtgacaagattattattataagtttcccctcagtccttgaagatataaactcctgactcattgtcattttctccagtacatctccagtccaaactcctaatggtttgaattacaataaattactaattacaacatgca

SEQ ID NO: 720683 - DNA, 575 bp, Homo sapiens
tcttaatacacatgtatatttataataatttttattacctagctattgaaacattctatatatgtgagcaactatttggaaaatgtatcaggtggcttggaagaaaataaatctacagaaaataatacaactaccaagaaagtgggacaggctgtaaaatggaacatatgttctgtttcataaagacttgcattctcagaaggactagaaatatctcacaaggacttggttgaaataaaactgtacttcctgaaaagcatatgtatttgtgactcaaccatttctcaggaagaagtgtcaattaaggatagaagtgactatatgtcctttacttgggatatacaagatttaaagaattctagagaaaatacagatttatataagtctttaaatagttgaaagaaaaaatctaaagaacacttgatcaatatttttcatcgttgttttggttcaagaatatatattagtttaaaatagcacaaaatacggaagacacaaaaaacaacaaatttggtaaaatgtaacatattttgggagaaagtggttagtaasaggtgctggaggacttaactaag

SEQ ID NO: 720684 - DNA, 1875 bp, Homo sapiens
gaatattttacatatttcttgtactgggtaataaaacacacacacacaatatgaaaagtttttattaaattccaggatagtaattcttttaaaattattttgatatatttaaactagattaaatatccctgaatcctttttaatgaattgttagctttaaaaagttatataaaatggcttttgtaatgcagaataaaagcatgacatataacttttaataataagtaggtcaaaagtcttgaaaaggtgaataakgagcaaaatgcctcatttaattataaatgttataaaaggtattaatatttaaaaattgtcagatattggcctgagaatacaccatttttaactaaatagtatacaattcaaggaaacctctctctttttctctctctgtcctgctctaagaagatattcgtgtggctctatgtatcatttagggttatggtatgtcaaatatcctgagttttaggtatgattatcaagtcatacgcaaaattgtgggatggattgggaaagagggggcatcaacagatatttattgaacatgattgttaaaacacagagaaaattcaaaatggtataaaatttgacacatataaaataagggagatgtcattgaccgtaattggaaactgagaagtaacaggttttttgaggcgaggaaattaaattttgttacattacatttagtgtgaagtgactatggaattccaagtaaagatgtccagaaagtttagatttgaatgttagctcaatgtttggtcagcttagaagttaaaacatttgaataaacatttgaatgtctttttattatttaagaagaaaaatttcagtaaaaattttttttggaaaaataaatattggtttattacatttttgtatttatattttaaagggaaaatatttactattcataataaaactttgtaaatatccatcatcaaatattatgagcacaattgcttattaaaggtattttgattacccaacttttaaccaagacttaaaataattgttaacagctctgtagaacaccgccatcttatttacaagcatacgagcaattcagaaaacatattcagaaaacattttactttttcctatttacttgtgtctcttctatcatctagggaaattaaaaataactaccttgatgtactttatgaaatacggatgatttagcatgaagtagaatttatgtgtaacgaaaaaaaatcattccaattgtagacttctgatattctttttttcttaatattggtataaactgctaatcagaaaaaaatcaacattggatttactcattttagttcatatattgatcacgaattccatggaacatttttccctttctttattatttaccatatgtgaatattgtatattcatgaaaatttaataaaacttaaccttaaaaatgtaccacaaaagagaaacagctgtaaatgccaaggtttgcactgactaatgtaatgttagtctataatcagagactccaatctgcccccaaacaaattacactgtgacaaaaactgtctgcaaaagaaaagtcaaaatgaatatagtatcggaatcaacttctgtactgtgatccaacaaaatagtcacaaaagtttaaaatgggatctgacgacaaggcaagatacaactcttggatccagaatgcagaggtttattgcaaatgctgagctggaatcctggcctggaaaggagggatgttcagaaggaagccacactggggttggaaagcaggcttttgcccataaaagttagtgatgttgaaacctcaaaaacctcagaggttcagattgggtaagttcatatttcagagtggaagggtggggtgaccagtgtggttctgctgagtagcccaga

SEQ ID NO: 720685 - DNA, 1875 bp, Homo sapiens
gaatattttacatatttcttgtactgggtaataaaacacacacacacaatatgaaaagtttttattaaattccaggatagtaattcttttaaaattattttgatatatttaaactagattaaatatccctgaatcctttttaatgaattgttagctttaaaaagttatataaaatggcttttgtaatgcagaataaaagcatgacatataacttttaataataagtaggtcaaaagtcttgaaaaggtgaataaggagcaaaatgcctcatttaattataaatgttataaaaggtattaatatttaaaaattgtcagatattggcctgagaatacaccatttttaactaaatagtatacaattcaaggaaacctctctctttttctctctctgtcctgctctaagaagatattcgtgtggctctatgtatcatttagrgttatggtatgtcaaatatcctgagttttaggtatgattatcaagtcatacgcaaaattgtgggatggattgggaaagagggggcatcaacagatatttattgaacatgattgttaaaacacagagaaaattcaaaatggtataaaatttgacacatataaaataagggagatgtcattgaccgtaattggaaactgagaagtaacaggttttttgaggcgaggaaattaaattttgttacattacatttagtgtgaagtgactatggaattccaagtaaagatgtccagaaagtttagatttgaatgttagctcaatgtttggtcagcttagaagttaaaacatttgaataaacatttgaatgtctttttattatttaagaagaaaaatttcagtaaaaattttttttggaaaaataaatattggtttattacatttttgtatttatattttaaagggaaaatatttactattcataataaaactttgtaaatatccatcatcaaatattatgagcacaattgcttattaaaggtattttgattacccaacttttaaccaagacttaaaataattgttaacagctctgtagaacaccgccatcttatttacaagcatacgagcaattcagaaaacatattcagaaaacattttactttttcctatttacttgtgtctcttctatcatctagggaaattaaaaataactaccttgatgtactttatgaaatacggatgatttagcatgaagtagaatttatgtgtaacgaaaaaaaatcattccaattgtagacttctgatattctttttttcttaatattggtataaactgctaatcagaaaaaaatcaacattggatttactcattttagttcatatattgatcacgaattccatggaacatttttccctttctttattatttaccatatgtgaatattgtatattcatgaaaatttaataaaacttaaccttaaaaatgtaccacaaaagagaaacagctgtaaatgccaaggtttgcactgactaatgtaatgttagtctataatcagagactccaatctgcccccaaacaaattacactgtgacaaaaactgtctgcaaaagaaaagtcaaaatgaatatagtatcggaatcaacttctgtactgtgatccaacaaaatagtcacaaaagtttaaaatgggatctgacgacaaggcaagatacaactcttggatccagaatgcagaggtttattgcaaatgctgagctggaatcctggcctggaaaggagggatgttcagaaggaagccacactggggttggaaagcaggcttttgcccataaaagttagtgatgttgaaacctcaaaaacctcagaggttcagattgggtaagttcatatttcagagtggaagggtggggtgaccagtgtggttctgctgagtagcccaga

SEQ ID NO: 720686 - DNA, 607 bp, Homo sapiens
tgggaccttgcactgtgaagattaaccatatctgtagtcagaatgagaccagacacgcaatacacaaatagagaaggcatctgcatttttaatcgagtattactattagcccttgggtaagtatatttgtggtagagttttaatttggaagacaaaagtgcccataagaaagtcaagaatttcaaatgcaacttttaatactacatatttcaagagctcccatgttcagtrttcctggagaaggaaagctctttttgtttctaagtatgagaaattgttagcgttccttcctttggtcttcccacacccctcaccacaagaggcaaacaaaaaaaactaaaaaggggacaataagtgcaagataaaaaagaaaatctaaatagtatgaaattagtttttatttttaactaaaaataaatgcttaacatctttccaaaatcaaaactaaagacgaacacttagaaaaaagggtggaagtgtatttttccttccctggggaaaccagtaaggcagacattctaacgaagcttggttttttccataggactagtctatgcaacagaatctctctccagccttttctctatgtcagttttatctacctggc

SEQ ID NO: 720687 - DNA, 1457 bp, Homo sapiens
taatcaaccattatctgctttcatcatttgtttcttcatttgtctatgcattaaccattgattttaccccaacagtagtagcagacacgcttctagaaaatggagatcttgcagaggtttctaaccagggaccattttgcttacaaagaggcattcggaaatactttcagtcggcacagctggaaggggtgggttctattagccttgagtgggtagaggccagaggtgctgctaaacatcccatagtgtacagaacagccaacccctgccgaccccgacacacaaggaggaatgttctggccccacaagtcaggagtgccctggccgagaaaccctgggatacagtgatttgcaagaacccacaatgaaaacccttgaggcacgtacgctctagggaaggagacagctcatgaaatataatgcatgtgccataatgaagaatcagagatagtaggagagagagcaacgggggcgaaggagatggagcagccagggctgtcttctcccaggctgtgataagtgaagagagacgagtaaggggaggaagcagtcctggggaaagaacactggggagtgggcacagcaggtgccaaggccctggggcagaaacacacggagtgcattctgggaaggatgaggagaccaagatggctgaagtcctgttagggagagtcaaggagagaaggaagggatgttggatcaagaaggtccttgtaggtggtaaggacttgggatttataatttagctgttaaaattaggaattatgagcatcatcaatattaactgagcatttactccatgccgggctttctgtagagcactgagattcctagggcctggaagccggcttagctaatgggagagagtggaggaggtcaaacagacagtcacgtagagataaacttcaaagagaacaaatactttgtccagggacactctgggctstgtggccactagggcaggggtggacatgagaggaggctgcgattagggcactagccagggagagaggcagcatggatgtgttttggatggtggaactgttaactgagacaaaggatttttgtatttttagaatcagcagtttcaaatttaggatggggccagggttgccaatagatacaccatcaacattatcattacaatcattacttatttttattttattttatttatttatttattagaggcagggtctttctctgtcacccaggctggagtgcagggctgtgatcatagctcactgcagcctcaaactcatgggctcaagccatcctcccacctcatcacgactatgataatgaagtaattaatatgtattatacttgttctgcacgtagctttctactggatgcccgtggcacggcatatctgcagggcaggcgtgatcaccttcccacattcctgatgaggcctctgaggcacagagaggaaaggggtggcctcctctcattct

SEQ ID NO: 720688 - DNA, 1457 bp, Homo sapiens
taatcaaccattatctgctttcatcatttgtttcttcatttgtctatgcattaaccattgattttaccccaacagtagtagcagacacgcttctagaaaatggagatcttgcagaggtttctaaccagggaccattttgcttacaaagaggcattcggaaatactttcagtcggcacagctggaaggggtgggttctattagccttgagtgggtagaggccagaggtgctgctaaacatcccatagtgtacagaacagccaacccctgccgaccccgacacacaaggaggaatgttctggccccacaagtcaggagtgccctggccgagaaaccctgggatacagtgatttgcaagaacccacaatgaaaacccttgaggcacgtacgctctagggaaggagacagctcatgaaatataatgcatgtgccataatgaagaatcagagatagtaggagagagagcaacgggggcgaaggagatggagcagccagggctgtcttctcccaggctgtgataagtgaagagagacgagtaaggggaggaagcagtcctggggaaagaacactggggagtgggcacagcaggtgccaaggccctggggcagaaacacacggagtgcattctgggaaggatgaggagaccaagatggctgaagtcctgttagggagagtcaaggagagaaggaagggatgttggatcaagaaggtccttgtaggtggtaaggacttgggatttataatttagctgttaaaattaggaattatgagcatcatcaatattaactgagcatttactccatgccgggctttctgtagagcactgagattcctagggcctggaagccggcttagctaatgggagagagtggaggaggtcaaacagacagtcacgtagagataaacttcaaagagaacaaatactttgtccagggacactctgggctgtgtggccactagggcaggggtggacatgagaggaggctgcgattagggcactagccagggagagaggcagcatggatgtgttttggatggtggaactgttaactgagacaaaggatttttgtatttttagaatcagcagtttcaaatttaggatkgggccagggttgccaatagatacaccatcaacattatcattacaatcattacttatttttattttattttatttatttatttattagaggcagggtctttctctgtcacccaggctggagtgcagggctgtgatcatagctcactgcagcctcaaactcatgggctcaagccatcctcccacctcatcacgactatgataatgaagtaattaatatgtattatacttgttctgcacgtagctttctactggatgcccgtggcacggcatatctgcagggcaggcgtgatcaccttcccacattcctgatgaggcctctgaggcacagagaggaaaggggtggcctcctctcattct

SEQ ID NO: 720689 - DNA, 895 bp, Homo sapiens
agctgtcataaatcaacaagtctgaccctaatagaaaagagaggaaagagaacttatgtgcaggaaaaagtaagtgtatatggcgtgttcagaaaaccacatatggatttggttaacatagagttggttagtaaggacatagtagaagtcaggtttgctaccacatgttctcacatatagctgaatgatgagaacacacagacacatggttctcacagacacattggggggatcaacacacactggggcccactggaggtgggtggtagggaaagcatcagggaagaatagctaatggatgstggacttaataactaggtgatgagattatctgtgcagcacaccaccatgacataggtttacctaagtaacaaacctgcacatcctgcacatgtactctggaactgaaaagttgaagggggaaaaaaaaagaagtgaggatgctaagcagaagtgaggccaagagagacactgtcaactatactaaagagtgtggcatctccaacctgtatgagaggaaaactcactgaagggctttaaccaagaatgggaacacagaagaagaatatagtgacagaggaggatagctaagactacaagttcagtccaattgagttttgggcatgctcagtttgaactgaaaataaagagaagactaagaaaactaactgctcaacaatctcagcaaaaaggcagtaaagtcagaacactgttaggtagtcctttgaaactgttttgaacaatctgaacagaaagaaacatccatccgttttatcactccacccctgaaaataacagtttcataaaacatgtttacccttattgtatgatacatcctgatagcttcttttcctttttaaaaaaatgccagtttggatctcataatattatatca

SEQ ID NO: 720690 - DNA, 627 bp, Homo sapiens
aagtggatgaatctcacaaacaatgttaaataagtcaaaagaaaaaaaatgtatgattctagctacataaagtttaaaagcaggcaaagctagggcattcagcaataaacgtttacatagtaaaactatagaaaataaagcaacgttgcaatttctatttttytttgttgctccataatgtaattttgtcaggacctgtttgtttggttctcaaaacctatttacccctttctctactgttcctccaaatgctaaagcaccattggagaaccaaaaattataaaagaatccctgaaaaatgaaagcaggagaaaatttcctgagaagaaactttagccaaaatgtatctgtaagaggatttctgcaaggtggtagccttgggaaacaggacggactgcctaaaatgtggttggtgcagtggtttgtgctctaatagaagcagtgacgggatacagacattctttctgttcctgctagtgcaaagcagtgagcaacagaggcatctgttacagctggagcagtgagtggctcagaatcctagaatcagaaccgtttcattaacccccacaaaactatgtcagcgccctccccccaagaaaaccccacactgttaaccagctgatttta

SEQ ID NO: 720691 - DNA, 627 bp, Homo sapiens
aagtggatgaatctcacaaacaatgttaaataagtcaaaagaaaaaaaatgtatgattctagctacataaagtttaaaagcaggcaaagctagggcattcagcaataaacgtttacatagtaaaactatagaaaataaagcaacgttgcaatttctatttttctttgttgctccataatgtaattttgtcaggacctgtttgtttggttctcaaaacctatttacccctttctctactgttcctccaaatgcyaaagcaccattggagaaccaaaaattataaaagaatccctgaaaaatgaaagcaggagaaaatttcctgagaagaaactttagccaaaatgtatctgtaagaggatttctgcaaggtggtagccttgggaaacaggacggactgcctaaaatgtggttggtgcagtggtttgtgctctaatagaagcagtgacgggatacagacattctttctgttcctgctagtgcaaagcagtgagcaacagaggcatctgttacagctggagcagtgagtggctcagaatcctagaatcagaaccgtttcattaacccccacaaaactatgtcagcgccctccccccaagaaaaccccacactgttaaccagctgatttta

SEQ ID NO: 720692 - DNA, 574 bp, Homo sapiens
ttggtatatgattatttattcattttttatgagaagtaaattgtctttcaacacaggtcgggggattttcacctcaaatccaatataagacaggaagtacagtatctggtgccttcttrgttctggactatgccatttagatatataacatgccaactgattgttgccttcccttcctctccactggacgcctaaggtcctctctagagttcttcattttggcatccattcatgcttgtctacctgggtcagggactctaactactcaaatattctttcaatacttaaatgcctgggtcacttttgatgatgaatcgagggtataggactgggagccccacccaacctgaaaatcagactgcttctttaagggagaccctgatccactcctcatctttggacaggaccttccaaccagggcctccaaccaccaccacccatattctctggctaacagttttgatttctccctggaattgagtgcctgtagggaggggcgggccaccatttttactgtttgggcaactcagccattccatcctgctggctttggagagttcaaacagattgggtg

SEQ ID NO: 720693 - DNA, 574 bp, Homo sapiens
ttggtatatgattatttattcattttttatgagaagtaaattgtctttcaacacaggtcgggggattttcacctcaaatccaatataagacaggaagtacagtatctggtgccttcttggttctggactatgccatttagatatataacatgccaactgattgttgccttcccttcctctccactggacgcctaaggtcctctctagagttcttcattttggcatccattcatgcttgtctacctgggtcagggactctaactactcaaatattctttcaatayttaaatgcctgggtcacttttgatgatgaatcgagggtataggactgggagccccacccaacctgaaaatcagactgcttctttaagggagaccctgatccactcctcatctttggacaggaccttccaaccagggcctccaaccaccaccacccatattctctggctaacagttttgatttctccctggaattgagtgcctgtagggaggggcgggccaccatttttactgtttgggcaactcagccattccatcctgctggctttggagagttcaaacagattgggtg

SEQ ID NO: 720694 - DNA, 804 bp, Homo sapiens
ggaaagaaattctctactttcttaaaattacatattgttcatccaattataaaaggattacatgcaaaagaatacaaaaagaaaacagtcccacatctcagagataaacatccttaatgcggtatatatttttaagcttttaaattcgtattttaaatgccaatgcagaatcttttggcagtacatgatccatgtacttgcaggttttgatgattggaataaactctgaagaacgatttatgtataggttagagaggggctgtaagttgttagctcaagtatagtggggctgctgtaggggatgccagtgactgattttccattttgatgaatttttttcaccagttttaattttttttctctaaatttctgttaatcaaatgagatgtgaactggaacaaccattaagcagacagcagtgatcaaggtgaaatctctttttatatagaactgatgaaattcactccttgcactacatcctctgaactracatgtgctatcagctcaaggtcgcctccggtcaagaaattgactacctgtttaggacacatgctttaattattagggagcagcttcttctacctgatttgcaacacattttctttataatgagctaaaaccaaatgcaacaaatactagagttcactgtcatagctgcatgttgccaaactcttctgcatttcaaggcgttttgcgttttgtcaaatgcgttctgcctcctcatggcctctcagctgctagttcactgtgagattctgcactttgccacaagtgtcttctgaaggtttttactgagacattatg

SEQ ID NO: 720695 - DNA, 980 bp, Homo sapiens
tgcaaggtacaggggagagaagaaaaaaaaagctcatcagaatgggaattccaacaggagatatctaaataaaggtgggaccctatggagctgggttccctgataatggataatcccattttaatacaacttcttcccattagtccttttcccaggtgactacaaaggaagttgccttattcagggcaaaccaggggagaacaaatacatgtatgtatgtttgttctacatacatacaaatacaaatatatttgtgtgtgtgtgtatatatatatatgtaaatatggatagatttacaaccacaagactgtgtttgtgcattgtgaacacttacttatttaatataagtggtccaaaacatctgtggccatacgttgaatttaaagtggttccaatttaagatgtcaataggcaccaggcagagacaaattcaaatgtttcccaactgatgacaccttgtcctgtgccttaaacaatccccacaaataaaattagcagctaagtaattagacgtcaaggaatcaagacacaatgactgatagtaataagaggaaaacagtttaaaaaacagatgtaaaactcttttgatatgatatttatcagacatatatgataaagcaactgtattagtctgttcttacactgctataaagatactaccttagactggrcaatttataaacaaaagaggtttaattgactcacagtttcacatggctggagaggccttaggaaacttacaatcatggtggaaggtgaaggggaagcaaggcacatcttacatggcagcaggaaacagagtgggggaggggtgaagtgccaaacacttttaaaaccatcagatcttgtgagaacttcctgtcataagaacagcatgggggaaactgcccccatgatccattcatgtcccaccagctccctccctcaatccatgaaaattacaattggagataaaatttgggtgaggacataaagccaaa

SEQ ID NO: 720696 - DNA, 1481 bp, Homo sapiens
cgggtgggagtgacccgattttccaggtgcgyccgtcacccctttctttgactcggaaagggaactccctgaccccttgcgcttcccaagtgaggcaatgccttgccctgcttcggctcgcgcatggtgcacgcacccactgacctgcgcccactgtctggcactccctagtgagatgaacccggtacctcagatggaaatgcagaaatcacctgtcttctgcctcgctcacgctgggagctgtagactggagctgttcctattcggccatcttggctcctccccactaatgctgttcttctagacatgtttgaaataggggcattgctataatgaatggctagcaagtaggacaacctataagaaaggtacacaaaattaatactttaaggctatattgcatttggcaatggcaggtaatctattgggtatgggtagaatactacaaataagtgcttcattattttgcatgagtaaaattgtaaaagcagaaaagaagtcttcactgatcagattttagagcatattatattttacttgtttctattttctccttcttgcaggtgagccaagtttatctgtttcgtgaggttacacttgggtagagcattggttggtaagaatctcaatcaattatgctcactggaatgagacaagaacagaagtgtaccttcccctgccttttataaattcaattatgtgtatttgtttcattcctagtccttgtttgaatgtggactattgaatatagggcaacatttaaacaaccaagagagactaaattaatttatatttaaatctaatgacggtcagatagtccacagaatgagagcccaggtttgcatgggctgtgtgaaccgcaggttttctgaggatgagggaaatataggagagacatgaactatttctgtgaagattcagggacattcaggtgaataaaggtgattgtaggtcatttttctgtgagtcataagttgctattttattgagaggcccttggtaaagctgcagttaacatttaagttgctgtttgattcttttgttcgtatcatactggttttcttttgaatgtgatattgtttagagacaggttacaaggtagcccagttttattcaacttagaggaaagtctgtcctcctaggttctgagtataggttatctgttggtctatgtttagggttcttctgagttcctattttgttgtattgtctttatccatcttttaatgaaaactaaagagaggctgttttccaaatgcgattttaaaacacaattttaaagtgttcttctctagcctagatttttttcttgcgatttaaaccataatcacaaaaatctccaaagtccttcgcaaacaaacattgtttattcattttctagttacagaacaaaaatattaatgctactttaaaacacagattttgatttttttttctcaaagcaaagcctattttgcagataccccatcataaatcactgc

SEQ ID NO: 720697 - DNA, 1566 bp, Homo sapiens
  misc_feature 519, 520, 521, 522, 523, 524, 525, 526, 527, 528, 529, 530,531, 532, 533, 534, 535, 536, 537, 538, 539, 540, 541, 542,543, 544, 545, 546, 547, 548, 549, 550, 551, 552, 553, 554,555, 556, 557, 558, 559, 560, 561, 562, 563, 564, 565: n = A,T,C or G
  misc_feature 566, 567, 568, 569, 570, 571, 572, 573, 574, 575, 576, 577,578, 579, 580, 581, 582, 583, 584, 585, 586, 587, 588, 589,590, 591, 592, 593, 594, 595, 596, 597, 598, 599, 600, 601,602, 603, 604, 605, 606, 607, 608, 609, 610, 611, 612: n = A,T,C or G
  misc_feature 613, 614, 615, 616, 617, 618: n = A,T,C or G
tgatggtggccttgggagacccaggacagggactgttcacattttacctggactcctgacccatggacactgttagaccataaatgtgtgctgtgttaagccaaaaagtttgcagtaacttgtttgacatgaatcgaaaatttagaaatagaaataaatacaccataaaagggtctctgggactctcaagggcccatagcctttactttgagaactgctggcttaagacatcatttggtagacaagtaggggaggactcatctgggatctgtgctacccctacattttataatttcttacattctattttggcacaaatatcttttgtatgctgaattcaggcttttctatgtcaactgaatcaagtttcagcattgtgagatgaaaacttgggcactcatggctacatttgacctacagatgacagtgtggcccacatacactggaccaaatcattttttaaattaggtgacaacatttaaacgtcaagaaatataaatggtgactggaggcagtggnnnnnnnnnnnnnnnnnnnnnnnnnnnnnnnnnnnnnnnnnnnnnnnnnnnnnnnnnnnnnnnnnnnnnnnnnnnnnnnnnnnnnnnnnnnnnnnnnnnncaaactgtgtagagatagttgttcttgcttgcttggttctgataatgctcattttaaacacatacatacacamacacacacacacacacacaaatacaacgggagaggagagagaaagagagaggaaacaggagagggaaattgatttcgcaaatgagaagcataagatgaggttgatcaggttgtcagggctcagattatataaagccttgtagatgttactaggatttcacattatattctaagtgtaatggttttaggctgaataaactttaaattgttctttttgtgttttcacattggagatcatcttgccggcattgcagagaatagattagacaggggcaaggatgaaacagggagccagttaaataactatgacattagttctttggggagctgatcctgtctttttcgtttttataaagccaagggtatagattccagttaggtttaaagatattcatattttaaaggcattgaagaaaagtgtgatattcatgttttaaaggcattgagggaaagtgtgatattcatgttttaaaggcattgaggggaaatgattattggtacagaagtaccagtaatgatttatcttggaaacactgttaaagtaacagatgagaaattcatatttgaagtgttggagtttggttatgttttggggatacctgtgggatcagtggaaacacagtcaggtgaatttgaaggtgtataggtttgaggtgaagacgtatgtacatttagaataagcaggactcatagcatcatatcatgtaagatgttgtaccagaatgaatcccaaatttcagaatctagaaacaaactagtgaaagggggactgcaaaaaaggaatgaaagttgagtttgcacaagagactcaaaaagatctgccaaagaggaataaagaacacttataatttgtggtattgcaagtatcaagagaag

SEQ ID NO: 720698 - DNA, 1669 bp, Homo sapiens
atgaaaaagtaagagagcataattttgtagctgctttaaaaccatagtatcagagaacttcagttttgaaaaaggtatgtcattgacttcaaccctcccattcccacatgagaaaacacagagagacaacgagagagaaaggaagtgtaccatggaaaaaattaacataatagctgcaacgttctccatgaattagtttgatttgycatttgcaatcttaatgaaaaatttacaatttttacatgattgtccaaaaaatgcaattatgctgtgtatcagaatttatgtagtgaatgatctgagttttatgggatatttatagtgtttcttccagattcctttgtatttacttttggatatttagaacctatattcagatcttctgggttacatgtgattttccttctcccattcagtctgtgctgaatgtgtgattgtgtgtgtgtgtgatgtggcatagggttgagaatctgacgtacacttgcattctcttctgtaataggtagcttacttgttttaaccagtctctgcattttcatctgtaaaatggagctattaatatcatcattcccctcccagaagcctaacactgcctttaaaaaatacaaattctgggccgggcgaggtggctcacacctgtaatcccagcactttgggaggccggggcgggtggatcatgaggtcaggagatctagaccatcctggctaacacagtgaaaccccgtctctactaaaaatacaaaaaattagccggccgtggtggcgggcgtctgtagtcccagatattcaggaggctgaggcaggggaatggccgtgaacctgggcggcggagcttgcaataagcggagatcctgccactgcactccagcctgggtgacagagagagactctgcctaaaaaaaaaaaaaaaaaaaaaaaaaaaaaaggtatatatatatatatatatatatatatatatacacacacacacacacacacacacacacaatttctataaaattgggattaaattgtatatatgtatatatagccatctataatatttataacaaatttaagaaattaatactagctccaaatctatgcccctgcacttaccacttggctccaaaggcacctatacaatgtgatgtaaatgctgggacttcgtaatatgttttaatgttgtttctagaaaagtctattttgctattaataggctccaatgtaacccctaaatgtactcaactgtttatatgaaaataagtagtgaggcagaaaattgcctttttataactctaggaatgatgattctgcaagtctgtaaaccactgggaatattataaacaagaaaatccaagagatagttttagtacatttggatatatgcaaatctaaagaatagcaattttaatttcctaataaaattctcaaactatagaatttattcttctccaaaaaaaatgcaaaaatcatgtttttaagaaccacatataaatattagttaataattaaaatttcagaaattaccatgttaagccatctgaaacacttcttattattacctatcatcaaaaaagctcattagtgcccacagtatgttaccatcaaaaatacaatttaaataactttgctacatgaatatttaaacaaaaacttcttcaactctaagttgttggtgggaaaatag

SEQ ID NO: 720699 - DNA, 1669 bp, Homo sapiens
atgaaaaagtaagagagcataattttgtagctgctttaaaaccatagtatcagagaacttcagttttgaaaaaggtatgtcattgacttcaaccctcccattcccacatgagaaaacacagagagacaacgagagagaaaggaagtgtaccatggaaaaaattaacataatagctgcaacgttctccatgaattagtttgatttgtcatttgcaatcttaatgaaaaatttacaatttttacatgattgtccaaaaaatgcaattatgctgtgtatcagaatttatgtagtgaatgatctgagttttatgggatatttatagtgtttcttccagattcctttgtatttacttttggatatttagaacctatattcagatcttctgggttacatgtgattttccttctcccattcagtctgtgctgaatgtgtgattgtgtgtgtgtgtgatgtggcatagggttgagaatctgacgtacacttgcattctcttctgtaataggtagcttacttgttttaaccagtctctgcattttcatctgtaaaatggagctattaatatcatcattcccctcccagaagcctaacactgcctttaaaaaatacaaattctgggccgggcgaggtggctcacacctgtaatcccagcactttgggaggccggggcgggtggatcatgaggtcaggagatctagaccatcctggctaacacagtgaaaccccgtctctactaaaaatacaaaaaattagccggccgtggtggcgggcgtctgtagtcccagatattcaggaggctgaggcaggggaatggccgtgaacctgggcggcggagcttgcaataagcggagatcctgccactgcactccagcctgggtgacagagagagactctgcctaaaaaaaaaaaaaaaaaaaaaaaaaaaaaaggtatatatatatatatatatatatatatatatacacacacacacacacacacacacacacaatttctataaaattgggattaaattgtatatatgtatatatagccatctataatatttataacaaatttaagaaattaatactagctccaaatctatgcccctgcacttaccacttggctccaaaggcacctatacaatgtgatgtaaatgctgggacttcgtaatatgttttaatgttgtttctagaaaagtctattttgctattaataggctccaatgtaacccctaaatgtactcaactgtttatatgaaaataagtagtgaggcagaaaattgcctttttataactctaggaatgatgattctgcaagtctgtaaaccaytgggaatattataaacaagaaaatccaagagatagttttagtacatttggatatatgcaaatctaaagaatagcaattttaatttcctaataaaattctcaaactatagaatttattcttctccaaaaaaaatgcaaaaatcatgtttttaagaaccacatataaatattagttaataattaaaatttcagaaattaccatgttaagccatctgaaacacttcttattattacctatcatcaaaaaagctcattagtgcccacagtatgttaccatcaaaaatacaatttaaataactttgctacatgaatatttaaacaaaaacttcttcaactctaagttgttggtgggaaaatag

SEQ ID NO: 720700 - DNA, 592 bp, Homo sapiens
ttgtccatttttgcattgctcagctttagagagaataccttaaagttggtttagccagaatcccccagcatcgatatctggtcaccgttgatatctaatcattctcagtatctcatcagcttcctcacgccctactgtcccattgatgtctgatcaccctggcccgccttcagccagaatcctttcatgttggttcagccagattccctcttacctctgatatttcctcttaataattttccatccactgaccctcaccctggtccttggctataaaatcctcactttctcttgctgtgttcggagttgagcacagttctatttaactattgtccagctctggtcttcagtgaaccwccatgagggcaacagcctcatctgatgttttagaactgctgcagtgggattagcctgaagaatccttctatgtccccgttattctctctgcagtaaggtgggaggcccaggaggggcatgaattcacaggggccaaggcagtgatgaaattgggaagagagattcaatagtctttgtggccttctgttggcagcctgtgtgttctagccatacaactggcggctgctgcatacct

SEQ ID NO: 720701 - DNA, 592 bp, Homo sapiens
ttgtccatttttgcattgctcagctttagagagaataccttaaagttggtttagccagaatcccccagcatcgatatctggtcaccgttgatatctaatcattctcagtatctcatcagcttcctcacgccctactgtcccattgatgtctgatcaccctggcccgccttcagccagaatcctttcatgttggttcagccagattccctcttacctctgatatttcctcttaataattttccatccactgaccctcaccctggtccttggctataaaatcctcactttctcttgctgtgttcggagttgagcacagttctatttaactattgtccagctctggtcttcagtgaaccaccatgagggcaacagyctcatctgatgttttagaactgctgcagtgggattagcctgaagaatccttctatgtccccgttattctctctgcagtaaggtgggaggcccaggaggggcatgaattcacaggggccaaggcagtgatgaaattgggaagagagattcaatagtctttgtggccttctgttggcagcctgtgtgttctagccatacaactggcggctgctgcatacct

SEQ ID NO: 720702 - DNA, 3310 bp, Homo sapiens
tgaaaaaggtggtaaaattccggtgagctttatagaccagttagtagtattacagaaatgttaacctcctggtttcaataattgcactatggttatatgacatgttaacactggagcaatctggaaaaatatagaaactgcactatttttgcaatgtttctgtaagtgtatatttcaaaatagttaaaaatagtgctataattatccccatatacatctagctcatacctgtccctatgcttaaactcactctcccctgtctcctcctgagagaacatccttctttacagcctcctcatgcatttcaaatcctattcattctttaggccccagtcatgtcccactacaccttaaaggaagcctttcccgcaatactgtagcccaccagaccaacacttctacaaaatgcctgtaacttgtagaggagtatgtgcactcctctaatgacacacagataatcctgtattgttagtgtactttgtgtatttagcttttatcaccaaacacactgaaggctcctaaaaacatctggtatggcctctgttctccagaatctcagcctacttagataaagcatcacataaaaactatcaacaaggctgaggtgggtagatcatgaggtcaagagattgagaccatcctggccaacatggtaaaaccccgtctctactaaaaatacaaaaagtagccgggagtggtggcacacacctgtagtcccagatactcaggaggctgaggccggagaatcactcgaacccaggaggcagaggttgcagtgagctgagatcgttccactgcactctagactggtgacacagtgagactctgtcataaaaaaaaaaaaaaaaaaaaaaaaaaaaccccccccccctatcaacaaaggagggcagggcaagagcctgctcaatgattacaggttacaggccattggaatatgccacatccacaagtcacaagtacaaacttcaaaattctgatgatcgccaacatggtgaagcaggatccactgggcttataggcccatctgaaaacggggagcagaggatcaacggaattggaactagggatgagagaagaaaaaaaccacatgcaagacagagaatgagcctcagaaggaaagtgacagcatgacacacaacctccatgcttcttttcagcctttcctgggaccatagaggggccaaagcccttgagattctcaacatccactaagctaagccaccatgagttatggttaacttgggctcctagaatctgatcctgagacaaggattcctgctcaagagacttgtaaggcagtgttttccggaaaagactggtaggggagtagagaaggtggacaagagagggaaggaagtcaagctaacatgtgatactaaggaaagtcccaagcagggtaactttagttcaactgtacaaagaaactgaaaacagtatgggtcatactttagagctgttccattctcaaggtgacaagataggaaactaatgtcattacagtgccattggttaaggactgttcccttttgcagagtgtcaattcccaggctccctatgcacacaggcaaaacagcttcaggagctttgacaaagagatgggtgctggctattgggagtgagctaacaccaaggcagtatgcagggaagggagtaagggggaaacaataggagcactaacagcatctgctgacacttttcaagtcctcatgtctttaacactgtcaccactttttggaaaaaagaacatcactcagagccaccagcaaaagaaggaatcatcagcccctccagcaggggtgactgggtacagaggaaacaggtggctcttgctgccttcagactgacacttgggagaaacttacattacctgaggtataggtaagggactgttaaaggacacctgcccaaaagcacagaagatctatttttcaaatgattggtcccaaatcgcgcccttagtaaaggctcctgggtgcaaagctgccatacatatggtgtgtctgccagtaaagtaacctcccagcagcactcaaaaacccactgctcagacactacctatcaattagaagccaagcaggaaaaaaggttatttgaaggcactggtttcaaggcaccagtttcaatttgatgatttctcattcactctgctggctagaatcaaagtagcatattgaaaatccaggtatttgaaatagcagtatttaaattttttgttccaagtaactcttctatagataagagttgtattattcagcctgagaaggagaggttacattttatgctttaaaatcagactactatctgcaatcatcataatgaaatggtattcaccatgcttgcacatgtgtgggcttctttctggatctatgcaaagcaaagcccacattgtcttttccaatgggttggaagccaagcactcacactgaccacatgcatgccactgtgacaacagagaccatcatcagctccacttttggagctgatgtgagagtgaatgagactgactcactttgacatcaccctgaaagtgtctggcactgactggtgctctttctccatccagaaaaacctcactacaaagaaaacaatttctcaaaggtgaggtgttgggtcttctgagaacaggagtgtctctgttcaaagagaagtgccctttggcccccgacctaccaaaaaaaatcacataacatataaactgccagttgaagggaacagatcaagaagagcaagaacacatttaattggatggagggaaaaagaaactattttcttagataactagaaatacactaatttcttactgaacagtatttaatacaagctaatatatatttaaatgtttcatattccaataataacatcttctaactatcacaaaagcaacaggtataatcaaagggctttaaattttccawtcccaaaaatgtataaatgctgttagcataatgggtaattatttccatcatacataatacattgatgtgtgtgtctggctccagtgttcatcacattaggaaagcccactagcaagttaaaaataaaagggaacattggctattttgataatacactaaaatgaataatctctaagaaacaaagtgaatctgagtagcaggcacgacttccctgtgtaacttatgattcacatgcatactgagaagccagcttggcaagtggggagaccatggttaggcaactacacaactgcttctcatagtaaagcacaagtgtgttaattgccaggaagaataacaactgctcaaaacataaatctagaagatactgtcttgggtcccagaaaatctcctta

SEQ ID NO: 720703 - DNA, 1152 bp, Homo sapiens
aggcagatagggctggtggtgctcagctggttaaggcgccgtgggggtcccatgcggccgtctttggagccccatttgggtgtgggcaggtgggtgggtggctcggcaggagccttgcctttgcctcttgatggggacgtcttggtgttgatgctttgctgytctgatgggccagtattgttgggtacggaggattccatatttatccttaatagcagtgtttctcaaaaggagccccttggagccgtgatgcagttgctttgttggttcgctacagttatggattcctagatgtagcccagatctctcaggagtggggcttcaattctctttactatactttttccctactcaatatttaggaggtttgctctctcgtttctgtcctgttgcttctccattgccacttccttagagaggctttctttgactactcgatctaatatagctctcttcctttgcccacttgggttgtttccaagccccttaccatatttacttttcttcatagcagatgtctctgtatctggttttgcctgtttcccccactaggatgtgacctccattagtacagcgatcttgtctcttccttctctgctccagtgctcagagcttgcctggcacatagtaggtactcagtaggtgcagtgcattgaagtctccaggtgactcatgtgctcaaggtgccttataggaagaggggatgagttgataagaggcagagtcttcagaagttcaaagaaatgaatgaaagggctaagacttagaaattccagtcccaatgttcagttagtaaacgtagttttattttaccttaatgagatccctttatcagcataaactgcagagaatttaaggacctgaataactactggttataattgcaaaaggttctgcaaacatacagcaataaaagcaacaataaccattatagatctcagttcatgactgaccccttaaggaagatagggttttagcaggtgcctgtttcttttgaattcagtcttatctaaatttacccaaggaacatgtatttgaatgagagatacaatctggagaatttgccccagaactttcaaagagaatgagaaccagaaggatctgtttttctgcctactagtttaaattataatcttgacatgggtgtgtatc

SEQ ID NO: 720704 - DNA, 1152 bp, Homo sapiens
aggcagatagggctggtggtgctcagctggttaaggcgccgtgggggtcccatgcggccgtctttggagccccatttgggtgtgggcaggtgggtgggtggctcggcaggagccttgcctttgcctcttgatggggacgtcttggtgttgatgctttgctgctytgatgggccagtattgttgggtacggaggattccatatttatccttaatagcagtgtttctcaaaaggagccccttggagccgtgatgcagttgctttgttggttcgctacagttatggattcctagatgtagcccagatctctcaggagtggggcttcaattctctttactatactttttccctactcaatatttaggaggtttgctctctcgtttctgtcctgttgcttctccattgccacttccttagagaggctttctttgactactcgatctaatatagctctcttcctttgcccacttgggttgtttccaagccccttaccatatttacttttcttcatagcagatgtctctgtatctggttttgcctgtttcccccactaggatgtgacctccattagtacagcgatcttgtctcttccttctctgctccagtgctcagagcttgcctggcacatagtaggtactcagtaggtgcagtgcattgaagtctccaggtgactcatgtgctcaaggtgccttataggaagaggggatgagttgataagaggcagagtcttcagaagttcaaagaaatgaatgaaagggctaagacttagaaattccagtcccaatgttcagttagtaaacgtagttttattttaccttaatgagatccctttatcagcataaactgcagagaatttaaggacctgaataactactggttataattgcaaaaggttctgcaaacatacagcaataaaagcaacaataaccattatagatctcagttcatgactgaccccttaaggaagatagggttttagcaggtgcctgtttcttttgaattcagtcttatctaaatttacccaaggaacatgtatttgaatgagagatacaatctggagaatttgccccagaactttcaaagagaatgagaaccagaaggatctgtttttctgcctactagtttaaattataatcttgacatgggtgtgtatc

SEQ ID NO: 720705 - DNA, 1152 bp, Homo sapiens
aggcagatagggctggtggtgctcagctggttaaggcgccgtgggggtcccatgcggccgtctttggagccccatttgggtgtgggcaggtgggtgggtggctcggcaggagccttgcctttgcctcttgatggggacgtcttggtgttgatgctttgctgctctgatgggccagtattgttgggtacggaggattccatatttatccttaatagcagtgtttctcaaaaggagccccttggagccgtgatgcagttgctttgttggttcgctacagttatggattcctagatgtagcccagatctctcaggagtggggcttcaattctctttactatactttttccctactcaatatttaggaggtttgctctctcgtttctgtcctgttgcttctccattgccacttccttagagaggctytctttgactactcgatctaatatagctctcttcctttgcccacttgggttgtttccaagccccttaccatatttacttttcttcatagcagatgtctctgtatctggttttgcctgtttcccccactaggatgtgacctccattagtacagcgatcttgtctcttccttctctgctccagtgctcagagcttgcctggcacatagtaggtactcagtaggtgcagtgcattgaagtctccaggtgactcatgtgctcaaggtgccttataggaagaggggatgagttgataagaggcagagtcttcagaagttcaaagaaatgaatgaaagggctaagacttagaaattccagtcccaatgttcagttagtaaacgtagttttattttaccttaatgagatccctttatcagcataaactgcagagaatttaaggacctgaataactactggttataattgcaaaaggttctgcaaacatacagcaataaaagcaacaataaccattatagatctcagttcatgactgaccccttaaggaagatagggttttagcaggtgcctgtttcttttgaattcagtcttatctaaatttacccaaggaacatgtatttgaatgagagatacaatctggagaatttgccccagaactttcaaagagaatgagaaccagaaggatctgtttttctgcctactagtttaaattataatcttgacatgggtgtgtatc

SEQ ID NO: 720706 - DNA, 1152 bp, Homo sapiens
aggcagatagggctggtggtgctcagctggttaaggcgccgtgggggtcccatgcggccgtctttggagccccatttgggtgtgggcaggtgggtgggtggctcggcaggagccttgcctttgcctcttgatggggacgtcttggtgttgatgctttgctgctctgatgggccagtattgttgggtacggaggattccatatttatccttaatagcagtgtttctcaaaaggagccccttggagccgtgatgcagttgctttgttggttcgctacagttatggattcctagatgtagcccagatctctcaggagtggggcttcaattctctttactatactttttccctactcaatatttaggaggtttgctctctcgtttctgtcctgttgcttctccattgccacttccttagagaggctttctttgactactcgatctaatatagctctcttcctttgcccacttgggttgtttccaagccccttaccatatttacttttcttcatagcagatgtctctgtatctggttttgcctgtttcccccactaggatgtgacctccattagtacagcgatcttgtctcttccttctctgctccagtgctcagagcttgcctggcacatagtaggtactcagtaggtgcagtgcattgaagtctccaggtgactcatgtgctcaaggtgccttataggaagaggggatgagttgataagaggcagagtcttcagaagttcaaagaaatgaatgaaagggctaagacttagaaattccagtcccaatgttcagttagtaaacgtagttttattttaccttaatgagatccctttatcagcataaactgcagagaatttaaggacctkaataactactggttataattgcaaaaggttctgcaaacatacagcaataaaagcaacaataaccattatagatctcagttcatgactgaccccttaaggaagatagggttttagcaggtgcctgtttcttttgaattcagtcttatctaaatttacccaaggaacatgtatttgaatgagagatacaatctggagaatttgccccagaactttcaaagagaatgagaaccagaaggatctgtttttctgcctactagtttaaattataatcttgacatgggtgtgtatc

SEQ ID NO: 720707 - DNA, 1152 bp, Homo sapiens
aggcagatagggctggtggtgctcagctggttaaggcgccgtgggggtcccatgcggccgtctttggagccccatttgggtgtgggcaggtgggtgggtggctcggcaggagccttgcctttgcctcttgatggggacgtcttggtgttgatgctttgctgctctgatgggccagtattgttgggtacggaggattccatatttatccttaatagcagtgtttctcaaaaggagccccttggagccgtgatgcagttgctttgttggttcgctacagttatggattcctagatgtagcccagatctctcaggagtggggcttcaattctctttactatactttttccctactcaatatttaggaggtttgctctctcgtttctgtcctgttgcttctccattgccacttccttagagaggctttctttgactactcgatctaatatagctctcttcctttgcccacttgggttgtttccaagccccttaccatatttacttttcttcatagcagatgtctctgtatctggttttgcctgtttcccccactaggatgtgacctccattagtacagcgatcttgtctcttccttctctgctccagtgctcagagcttgcctggcacatagtaggtactcagtaggtgcagtgcattgaagtctccaggtgactcatgtgctcaaggtgccttataggaagaggggatgagttgataagaggcagagtcttcagaagttcaaagaaatgaatgaaagggctaagacttagaaattccagtcccaatgttcagttagtaaacgtagttttattttaccttaatgagatccctttatcagcataaactgcagagaatttaaggacctgaataactactggttataattgcaaaaggttctgcaaacatacagcaataaaagcaacaataaccattatagatctcagttcatgactgaccccttaaggaagatagggttttagcaggtgcctgtttcttttgaattcagtcttatctaaatttacccaaggaacawgtatttgaatgagagatacaatctggagaatttgccccagaactttcaaagagaatgagaaccagaaggatctgtttttctgcctactagtttaaattataatcttgacatgggtgtgtatc

SEQ ID NO: 720708 - DNA, 1152 bp, Homo sapiens
aggcagatagggctggtggtgctcagctggttaaggcgccgtgggggtcccatgcggccgtctttggagccccatttgggtgtgggcaggtgggtgggtggctcggcaggagccttgcctttgcctcttgatggggacgtcttggtgttgatgctttgctgctctgatgggccagtattgttgggtacggaggattccatatttatccttaatagcagtgtttctcaaaaggagccccttggagccgtgatgcagttgctttgttggttcgctacagttatggattcctagatgtagcccagatctctcaggagtggggcttcaattctctttactatactttttccctactcaatatttaggaggtttgctctctcgtttctgtcctgttgcttctccattgccacttccttagagaggctttctttgactactcgatctaatatagctctcttcctttgcccacttgggttgtttccaagccccttaccatatttacttttcttcatagcagatgtctctgtatctggttttgcctgtttcccccactaggatgtgacctccattagtacagcgatcttgtctcttccttctctgctccagtgctcagagcttgcctggcacatagtaggtactcagtaggtgcagtgcattgaagtctccaggtgactcatgtgctcaaggtgccttataggaagaggggatgagttgataagaggcagagtcttcagaagttcaaagaaatgaatgaaagggctaagacttagaaattccagtcccaatgttcagttagtaaacgtagttttattttaccttaatgagatccctttatcagcataaactgcagagaatttaaggacctgaataactactggttataattgcaaaaggttctgcaaacatacagcaataaaagcaacaataaccattatagatctcagttcatgactgaccccttaaggaagatagggttttagcaggtgcctgtttcttttgaattcagtcttatctaaatttacccaaggaacatgwatttgaatgagagatacaatctggagaatttgccccagaactttcaaagagaatgagaaccagaaggatctgtttttctgcctactagtttaaattataatcttgacatgggtgtgtatc

SEQ ID NO: 720709 - DNA, 610 bp, Homo sapiens
tgcctcagggacttggcacaaggccgtgcaaccaggcactccctgaacggttagggggctgaatgagtgacaagagaaaagggcagtctgaaaaactaaagagttagaagaagaaaggattaaggcacgcgtcatcatttagaacttagttctattatttgtttatttattgagacagggtctcgctgtgtcgctcaggctggagtgcggtggcatgatctcggctcactgcagccttaacctcctgggctcaagagatcytcccacctcggcctcccaagtacccgggactacaggcatgcaccaccacacccagctaatttttttttggtattttctgtagagatgagtttcgacattttgccccggctggtctcaaattcctgagctcaagtggtctgcccacctcagcctcttcaagtgctaggatgataggtgtgtgccaccgcgttcagtccatttaggacttcagagtttgcagagcatattggcatgtattacctcatctgccctgtgagataccagccccactttataaatgagaagataaatggcttgtcctgggccacacggtccagtaaatggcaaagagggattggagccagaattt

SEQ ID NO: 720710 - DNA, 626 bp, Homo sapiens
cgcgttttaacttaatatatcttgaaaatggtatgaaaaacaggaaaggtacagctgtgtgcacgtacactcccttcgtcaccatgctcacctccgtgacggcgatggcggggtcctggaggagggcttctgcatttctctctgagcttgcctccgccatctgacactccagtcctgtgcatgcactatgccaatttgcactttttttaaatcaagagggattattcggaaaacagattatggcccatttttgctttttttctttgtacatctactatcttctctactaagcacaaattaatacattttatattatctttaaaattaaatgagggcataagagtagaccgtctctacattctaatgttgtagaaccatgattttctgactcctaaattcatcgtctggagcccggcttgctgcaggactatctcaagcaaaccactgttttcccaccaccgttgtcaagtcctcctgccsctgatggtgccaccttctcccagtcaccccgaatgaaaacccagggctcccaccgctgtggcacctctctctcaattctctgctcccctcctcccgggaattagaaggcctctcacagtctccctcctcagccttgcgcagagcct

SEQ ID NO: 720711 - DNA, 562 bp, Homo sapiens
cccccaatatattaatctagagacaacaactgaatatttttcaaagtcttcaggaccagttcttttcagtaaatctccataaccactttctatgacacctaaatgatccaagcctttctgaccagattcacatcacattgcaacaaaacaataattagcgctcatctggtaagtcccctaaataatcatccatcagactaaaattgtctttcagcaggcatgttatcaaaaaacgtacagattactcaacacttcctcttctgctcctgcctaaattttagtgtactctagcaggctcccatcacatacctctagagctggagcccctctctttcgccatcctccttggctgttgtccccttctgcaggtggacgtgatctgttgctggygggctcctctaaactccccaagacaccggtcatcttccacaagacaggagctgctgtcaatattatctgagctgacttttttttagcatttcctgtatttttcaattttggacacatattactgaggtattgacaaataaaggtaatactaatagcaaatgagaataagaca

SEQ ID NO: 720712 - DNA, 1053 bp, Homo sapiens
tgctgtggtttgattgcacaatatttttatggaaggagcataacatacagtcttggacttggtggctaatttgaagtctggcactgccactaacacttgtgtgcttggactgcccgcagtcgcaaatgacctcatgttgcctatatatgacatggaacaaataacattagtcaatgtattttgggcctattgaagtttttcatgaaaataaagagatagtaatacttatgaaagcatgtgggttacactaaattaagacaatattattaggatgtctttgctggactccaaggctagaacttattgtaagatatcagaatgcccacagggtcaatattttttaaagcctgaactgagtcagggtagttacatgtagaacagaggcatgtggcatggttttcgtgcctccatgggcctatggcaacattagaaactttgccagggcataggtgcttgtgacagttttgtggtcatattggtcacttcatgtactgacatagatacagaaaggtgaggatggtagtgcttactactgactattgagtagaatgaatatattattctggaaaatggcagaataactggaaggaacttgagaggttagaattttcacagagaagatggagagcagaaccagataaatacgttatattgctgtttctttattgtaactttatcagttagcttgtgccatataattggtatctcctattaaagatttgtatgaaaatgtaaaaatatttgtcagaattctctgctcaaagtaagatacaaaactgtcttcaagtaatttaacacattttcaatatttcttctttttatagaacagttgttctgttgatcatttctttttcaaatattttatagttggatagaagaaacatatgtagaaacttctgaaaaaatcatcattaaggaataatatagagaaatcattaaaatattataatattcaacacttagacataaaattattaacatttaagaatgataggctggcrggggcggttccaagatggccaattaggaacagctccagtctacagctcccag

SEQ ID NO: 720713 - DNA, 596 bp, Homo sapiens
tctctaatctcagagcagcaagcagtacttcttctcaggcagttacctctgtcagcccattctgactccccattccccaccctctcctctcatcagtgtttctgaggtaacttctgtcaagcatgatgtatttctgtaaaagcatttaacaggacagaagttattagaatcttgaaaatgattactgaaaaatatatgtctaccaaactctcaaaaatatatagaaaaattaaaatgcagcttaatattagtatagagaaaaataaaaaataaggattattctcataggaagagttttagagatctttgaagaaataaaatatttctcctttgcctgaaaaaatggcaaatagttttttatagagctgaaatgtacagtttgataaaagtgatcatttttggttagagaatgtattatacagaataataattttcttttcagcatgrcatatgagaacttaacatttgatgacaaaagttcagctggaaaccttggctcagcaactttctcattgtataaactcaaatgacttattttaactcattaatccttagttttcatatctgtaaaataaggagattaatacaccacctaa

SEQ ID NO: 720714 - DNA, 2029 bp, Homo sapiens
tgcattcagctggttggatattttcttggttattagagcagcctaagtttactcaacttgtattcatctgtattttctggttttcttaaagaagttttcctcttatgtattctaaatcaccatgcctcttctctggctcttgcctttttattacttggttctaattaatcctctcttccctaaaagagatattttgacaacctgtaaatttgaagttacctcaaccacagtggatatttgtactttttaaatattattttttgagaaaactgtgtcaaaaataaggctcataaaagtgtttttaggaaaattacctatgatgccattacccagacatagcaatttttattgtatttcttgataccttgtacacacatacatgtttgcaatcttgtataaaaaacaccttgcatcctacttttctcactaatttaaagatatttaaaggttagccatagctttccctcccccacacacaaataatcagaagtctttgacaagattacagacaagaaactatgtacattttgaactgacttgcaacattattgttggaaattatccaatacgaatagaactggctcagagagagactaaagatgctggctattcaggcagtcctctgagtcaggtcttctgatgcctgcctgaggctcacatgccacaccaaaattaagaccagctattttactctgtaatttctaagattaagcaaatgatgtctttgacttgaagccagtgtgatctgtggccagaatgaaaagggggaggaacgcaaataggctcccatggggaacttccctgtgcctggtcctgtgctggccacttcctccagggcatcacacgtgaccttcactctctgtgagtcaggtagccatctagttttcatagaggagaaaatcaaggctcagagagggttaagccactcatccgaaataccatggcagcaaaatgcataagggcatttgcacactgacccgcccagcttccaacccggaattctgtgtagcatgccattatttactccgtttccatctgggaatcctgagtcacttttaattattttcctctcagttttgtctcatcttctcaaaaggttcaacactggagcattgtacattgtttccaaggatatcttggaagacaatgaactctatcaacctaagtttacagaacagttaacctgtttcattagatgcagaagtggttcctgaataacttcccttttcaatgaccgttattttggttcctacttcttatgcttctgtgtaacacatacaatatcattatttacttgtttttactttctaattcttagctatattttatctgtcttacttcttttgtgacctctgtgacacaaggtaaaagactgctagaaatacttcattaatatttaacgtatctgccttttggatttctcctgaagcaggtttagcatcggccctacaaaatacaactaaagtgatcaaaacgtgaagtgggttggccagaaatggacaagmctcaacaatactgcaagtcctttcgagctacattaaaggccgtacttatagtataccctgatctgtcatggaatactaatgccacttgctttcttcctcatacaggccgtactccaaaaacaccagactggtacaatccaggtgagttaagaaaactgaaatttaaccaaagctgcttttaccttgtcactaatgcatttagttaattatttaagtgccagcttcttctctatacatcttcaagtgagacaaaatttctccaggcaaggaaggtgagcgactggtatgggatgaggtgatgagggtgactttttccttccctgtgagtgtaggggagtggcagagtcactggctcaggaatctcttgttccttgtagtcagtactgccccagccagagagggccggtaatctgaattactatttatagttttgaacattaactcatgcttagaggacacagtttgctttgcatagtcataattctaatctttttcttcttcttctttagaccgtgctggaattc

SEQ ID NO: 720715 - DNA, 1182 bp, Homo sapiens
catcttttaagtagatgttatatcaaaatgtgaactcttctatttttgatctaggtaaagatccagagaaaggtatagagaatgaaccagaggaagatgaagaaatggatttgtgagcaaaagaactgccttgatgtcctactgatgctcattcactctgatagacatgaaaaaaatcacaacactgttactaatagcaaaaccatacttttaaaaccagacttgttcttttttttttttttttgaggcgaagtctcactctgttgcccgggccagagtacaatggcgtgatctcggctcactgcaacctctgccctgggttcaagcaattctcttgcctcagcttccttagtatctgggattacgggtgtgtgccatcacacctggctaatttttgtatttttagtagagatggagttttgccatgttggccaggctggtctcgaactcctgacctcaagtgatccagctgcctctgcctcccaaagtgctgggatttacaggcgtgagmcaccacccccggcccagacttgttcttttaatataaaaacaatgccatttaacgttgcattaaactgtcgaaaatatgtattattgtgtttttatgaagacacttcttttaaattgatgcatatcagatgcacaaattttcagaacacaagtgataattgaatatagtcatataatttgtatagtgtacttgggataaccatcactttaaacataaagatacatctttaagaaagactgttaagagtgtttgttctcaggatagaagcagtgggcggcatggaaagagcacttagaaaacttagagttttctctgtagtccttgatgtagcctcagtttgcacaggcacttttcccgtctgtaaaatggggatatttaaattgctccactaccttggaaagctgctgcgaaggatgaaacaggtgtcatctgcattataggaaactttaaagtcctgtaagacatgaggtgtttctgatttgttcttgatatttaaaagctagtgataacttgggcacattatttatcaggcttagccatgtttttctttttttttttttttctctcacacagagttgagactcacactgtgggggtttcaaacattggtgcccacacctgcagtgttttcttcttcattcccagctcaaatcagtcaacagggccggtga

SEQ ID NO: 720716 - DNA, 1182 bp, Homo sapiens
catcttttaagtagatgttatatcaaaatgtgaactcttctatttttgatctaggtaaagatccagagaaaggtatagagaatgaaccagaggaagatgaagaaatggatttgtgagcaaaagaactgccttgatgtcctactgatgctcattcactctgatagacatgaaaaaaatcacaacactgttactaatagcaaaaccatacttttaaaaccagacttgttcttttttttttttttttgaggcgaagtctcactctgttgcccgggccagagtacaatggcgtgatctcggctcactgcaacctctgccctgggttcaagcaattctcttgcctcagcttccttagtatctgggattacgggtgtgtgccatcacacctggctaatttttgtatttttagtagagatggagttttgccatgttggccaggctggtctcgaactcctgacctcaagtgatccagctgcctctgcctcccaaagtgctgggatttacaggcgtgagccaccacccccggcccagacttgttcttttaatataaaaacaatgccatttaacgttgcattaaactgtcgaaaatatgtattattgtgtttttatgaagacacttcttttaaattgatgcatatcagatgcacaaattttcagaacacaagtgataattgaatatagtcatataatttgtatagtgtacttgggataaccatcactttaaacataaagatacatctttaagaaagactgttaagagtgtttgttctcaggatagaagcagtgggcggcatggaaagagcacttagaaaacttagagttttctctgtagtccttgatgtagcctmagtttgcacaggcacttttcccgtctgtaaaatggggatatttaaattgctccactaccttggaaagctgctgcgaaggatgaaacaggtgtcatctgcattataggaaactttaaagtcctgtaagacatgaggtgtttctgatttgttcttgatatttaaaagctagtgataacttgggcacattatttatcaggcttagccatgtttttctttttttttttttttctctcacacagagttgagactcacactgtgggggtttcaaacattggtgcccacacctgcagtgttttcttcttcattcccagctcaaatcagtcaacagggccggtga

SEQ ID NO: 720717 - DNA, 1182 bp, Homo sapiens
catcttttaagtagatgttatatcaaaatgtgaactcttctatttttgatctaggtaaagatccagagaaaggtatagagaatgaaccagaggaagatgaagaaatggatttgtgagcaaaagaactgccttgatgtcctactgatgctcattcactctgatagacatgaaaaaaatcacaacactgttactaatagcaaaaccatacttttaaaaccagacttgttcttttttttttttttttgaggcgaagtctcactctgttgcccgggccagagtacaatggcgtgatctcggctcactgcaacctctgccctgggttcaagcaattctcttgcctcagcttccttagtatctgggattacgggtgtgtgccatcacacctggctaatttttgtatttttagtagagatggagttttgccatgttggccaggctggtctcgaactcctgacctcaagtgatccagctgcctctgcctcccaaagtgctgggatttacaggcgtgagccaccacccccggcccagacttgttcttttaatataaaaacaatgccatttaacgttgcattaaactgtcgaaaatatgtattattgtgtttttatgaagacacttcttttaaattgatgcatatcagatgcacaaattttcagaacacaagtgataattgaatatagtcatataatttgtatagtgtacttgggataaccatcactttaaacataaagatacatctttaagaaagactgttaagagtgtttgttctcaggatagaagcagtgggcggcatggaaagagcacttagaaaacttagagttttctctgtagtccttgatgtagcctcmgtttgcacaggcacttttcccgtctgtaaaatggggatatttaaattgctccactaccttggaaagctgctgcgaaggatgaaacaggtgtcatctgcattataggaaactttaaagtcctgtaagacatgaggtgtttctgatttgttcttgatatttaaaagctagtgataacttgggcacattatttatcaggcttagccatgtttttctttttttttttttttctctcacacagagttgagactcacactgtgggggtttcaaacattggtgcccacacctgcagtgttttcttcttcattcccagctcaaatcagtcaacagggccggtga

SEQ ID NO: 720718 - DNA, 724 bp, Homo sapiens
tgtttctacaaaatattccttataaaaacaaagaacaaaaattgaatatttaatgaattgacattttataaccaacctgtttttatctacggtgggaatctttgatgccagaaatttataaagaggttctgtatcttcacaccttgaataagcataataccataaaaaatgacacttgacatgtcaatgtatttgtcatttcattttaaactcgtatttgtggtttttttcccagataaaaatgaaattaaaccatttctttttaagaaatcatgttttatcatctttttggagagttctttgtctcataatacttataatatttttttttttaaataaaggtcaggcacagtggcttatgaccgtaatctcagcacattgtgagcctaagagttcaagaccagcctgggcaacgtagcaagacctcatctctacaaaaaatttagcaygcacctgtgatctctgctgcttaggagctgaggtgggaggactgcctgagcccaggagttcagtgctgcagtgagctatgatcatgccactatactccagcctcggcagcaaagcaagaccctgtctctaaatcataaagaaaagaaagaatattccttactttacagaaaagactggtagttaaatgactttttcaaggtcacacagggccagatgagtatgttgagaagttctcagaattaaccttagttcactgcctggtacctctgaatgg

SEQ ID NO: 720719 - DNA, 1072 bp, Homo sapiens
aatgaagaggaactcattctattgccacccatcttaatccaaactgccacacttggtgacatattgttttggtatgtttgaattatttcataatctaaatgtttaattaaagcaaaattgcacagacagtaaaaatatcagcaatatataaatatgcattgaggaagagaaatatgtcaacattgcttctctctgggtagtgagattatgtgtacgttcttttcttttatcctcagccatgtctattcgacttttccacattgagcatgattcatygaagtttttgttatactgaagcgtggttctcctcctctgctggcactggtatgtcatcgcctctgggctgcttagaagactcctttagcatgtgctatttccatagcacctctctgcaaccttcatctttctttgtgagtctcttcctcctgaccatgtggtagctccattctgaaaccagaattataaataaataaagacttggatttgcctctgtctttccccacacttaatacttcctgctcctgttcaccaaggaggagattttctcccaaccagtgacttcagcttcaattaggagttccaaagcaatcctggcactcttggctttagcatcctttctcaaatgtcttggaataactgccaagcactgtattggagaccataacattacctaggatctcccagggaccaagaaccactgtctccttgaattctggatgatctgctacttcacaataagttccaaactcataaagagtatccaaagccccagagtttgagggtaatctttgtttccctccttgttcaagacagtacattttactgacctggtatattctttatctattgctgcattgaaaattactccagttgggctacagtcaacacaaggttcaactgggacaagatatacttccaaactcatccggtggctgttggcaggtttcacttccttttgggccgttgggctgaggacccagttctctgctggatgctgactagaagctgccctggatttcttgccttgcaggttcctccaacatggcagctggtttcagcatcaaagcacaca

SEQ ID NO: 720720 - DNA, 585 bp, Homo sapiens
cgaggaggaccaggagggaggtgccaacccccagtgcctttgacgttgaaattccctgcacgcgctgctcaggagcccgtggcgtgtcagatcccctgcctgcccgcaggctttgcagaactcttcccttctcttgtctcttgtgatgctcatracatgcctttaagggaggggtgggtctccctgtctcacatctgaggaaactgaggctcagggaggtagagaagttcacctgggtcagaggcacagctggggtggggcagggccagagagaggcctcccgacccccactcccagctttcttctcctgaccctggctggcccccggggctggggccacagagggctggccgccagcaccaggggcctcccctcctcgtgtgttgcagaacgtggggctgtgactttgagattgactctggcactatggaggaccgctgtggcgtgtgccacggcaacggctccacctgccacaccgtgagtgggaccttcgaggaggccgagggcctgggtatggggtgggaccactgtggggaggggtgtgctcttcacctggtggccccttccccatctcccccgggcccc

SEQ ID NO: 720721 - DNA, 1731 bp, Homo sapiens
cggagcgctggggtctgaatgggtccattgaggctgggccctgctgcttcctgtagggctgagtgggagaggctcacagaggctgccttgtgcagctggagcgcatagccagggaggcccccactccaacagaggcctctgaggccttgctggccggggctttggaaactctgacagcgctgcttccctcacctcttgatctcctttttctgcccctcttacactctctgaggggctgcagttgcaagaacccagaatctctgtcttggaggtagtggggggtgggcagttgaagaggggctttgaatggagagggtctgcacaataaagatgtaataagctaggagtcaatccagaggacttcctggaggaggtgatggtggtgtagagtcacagagagggaggaataggcagtctcagaggacagcagcaaggccaagtgagagactggcagaggtatacaggtccccgctgggtggggtgaagagggtttctgctccctcaccccgcagagcctctggcttatcacaggataaaagccagctaagcttcaggggctttccaggaaaagtgtctcttggaaagggtgtgaccttttcatcggtcctgacagcaccctagaaatggcttggtcttttccctcccctgagctccacagagaacacagccagcagaagacacattccctgtcatccagaaatgggtttgattctcagctgagggacagcaggactggtagagactgtcaggccacacagctacctacagagcacccccatgcttggtcgggggtgggagggatggcagggtctggctgtccacaggccgggcatgacagtggggcgcactggaagtggcgcactttggaggggcaatgtcaggggagagcttcctcttgttgggccacaagactccacaaggacagcacggtgactgattcccaatgctagaggcgaggcaatcggtcatgtgtaggtgtatgtgtgtgtgtgtgtgggtgtgtgtgtctatatacacacacatatgtgtatatatatatgagggtgtgtgtatgtgtgtatatacattatttatttagatggagtcttgctctgtcacccaggctggacctcagtggtgcgatctcgactcactgaaacctctgcctcctgggttcaagcaattctcctgcctcagcctgccgagtagctgggactacagtcacctgccaccacaccgggctaatttttgtatttttagtagagatgaggtttcaccatattggccaggctggtctcaaactcctgaccttgtgatctgcctgcctyggcctcccaaagtgctgggattacaggtgtgagccacagcacccagctatttatagatatttatagaatatgacctcaactatttaaacatatctgtaagggtataagtactttgataacaaagaagcaatacatactgatagaaactagctatcatgtcaacagtagttatattaggtagagaaattatgtgagatttttatttttttatattttactaatcttctcaataatggttgcttataagttttataatcaagaaagaaaggtttctaaagtttttgcaaaatggaaagttatgcttctttatatactaaagacaaaaacaaaacttcctatttgaatacctttgacttttactgcagacttacagacccttgaaagaaaaggcaatcccctcccactagttttggtgtcattctcc

SEQ ID NO: 720722 - DNA, 578 bp, Homo sapiens
attattttccactttgaaatatatattatgactatttccccaaattacatatttttctacagcatcatttattatttgtgatggaagaaaggagcratagatagaagactgataggttaagtaaaaactgagttataagtttggtataaactcatagcaaattttcttttcaaaaaattatatatatcctagccattccaatagaaaaaggctagaaacaataccaacccagtggcgatgagcaactcctagtaacaagactgtggtttctaaaaaacatttcccatttaaaaagaaaggaggaggtcctggacaatttcacgtctggcttaggaaagatataagattagcctagaacatcttttattccagaaagaaagaaagaaggctatcaaacacttgagaatcaatatgaagatgtttgccacagaccaaagatgggacaatttggacatcaatatataaatgaaaatatattaaacatatttaaatacatgagctcattactgatttataaaatagaaacacacacacacattgtttgcctctggaagattctttttttttttttttttttt

SEQ ID NO: 720723 - DNA, 1608 bp, Homo sapiens
caacctccacctcccgggttcaagtgattttcctgcctcagcctcctgagtagctgggactacaggtgcccaccaccacgcctggttaatttttgtatttttagtagagatgaggtttcaccatattggccaggctgatctcgaactcctgaccttgtgatccgcccacctcggcctcccaaagtgctgggattacaggtgtgagccaccacacccggccaaacttaactttttattcaaacatatatctcagtgtccagactccggaaaggcatttctgtatagcaggcccagtctcagataaatattctaaacttccaccccctccgcccccacccccgccacttaccatggtgataactgggccccagtgttatggaactagtagcatctgccacctccattcagttatctattagggcataacaagttaccccaaaacacagccgcttcaaacaataaacgcatattatctctaccccatttcattcctgccacctctagtataagaacaactatctacatccggtgctggtaaaacccctactgtcatttcaaagagtctcctccaagatctctctgcctcaaaattttaataaatgaatattacagtttgaaaaaaatagaatgtgagagaagggagacaaaacattggtatcaatagtgactgccatcaactctacacctcacaccaaaacccttatgtaaaaatggcatgttacctgcttaatgatactgatacgttaaaaaaaaaaaaaaaaaaaaaaaaaagtggcacattatcaaatgcattccaaacaagtttcctgaagcatctccaaccagaatgcaatccttttaattcaatcttatgcagaaattctcgagccatccctgtctgaatataaattactatgtgtatacccaaagactaacagcaaattgttggatatatgagtgaaattacccactgagagagtattcaaaattttagtccagaccagcctgggcaacatagggagaccccatcgctacaaaaaattatttttaaaaattagccgggcttagtggcgtatgcctgtagtcctagctgctcagtacacttgcttgagcccaggaattcaaggctgcagtgcgctatgatcgtgccactgcagtgcgctatgatcgtgccgctgcactccagtctgggcggcagagtgaaagcttaggctaaaaatctttaaaacatgttttcatcctaccatattaatttggaagactggctttaaatatcacgtgggacagtaattatagaacatgtactgtgggmtgggcatgatgactagcgcctgtaatcccaacatttttggtggccaaagcggaaggatcgcttgagcccaggagtttgagagcagccagggcaacacagtgagaccaggtctctttaaaaataaaaaattagccatatgcgtggtggtgagcacctgtggtcccagctacttaggaggctgaaggatcacatgagccaaagaaatcaaggctctcgtgagctgtggtcgcaccactgcactccagcctgtatgaaaaaccgagaccctgcctcaaaaaaaaaaaaaaaaaaaaaagagacaaacaaaataattcatg

SEQ ID NO: 720724 - DNA, 768 bp, Homo sapiens
atatgtataacactttgaatcattgaggtgggaaagaaaaaaaatccttctcttttcttcaccatgacattacagctacaggagtgactgtctgatattaactgagcacatactatgttaagaaagcaaccttaaataagcaaactcaaattgtatctttgaagaaattcttctttctgtctgtttcctttgtagcaagggcggagtcaaaaactgcctttcttcttcaacctgtgaaatcagatttaaatgtatttatgtatttattctggctagatgatattctctttgctggcacggaataaactagtcatagaattttctgtaagtgaaaaacctggctgggtgcaggagaatcacgctcgcctataatcccagagcttttkgaagctgaggtgggaggattgcttgaggccaggagtggggaccagcctgggcaacatagtgagaccccatttctaaaaaaaaaaaaaaatttaaattagccaggcatgctggtatgaagacttagaaggctgaagcaggaagatgcttgagcccacgagttcaaggcttcagtgagctgtgatcacaccactgcatttcagcctgggcgacagagcaagaccctgtttgttcaaaaaaaaaaaaaaaagtcaaaagtcaaaaaagctgaacttgaaaaaatttggttctgatccctctctgtaatgctagcactcatgaaaaattcagcatttgtggaattccttagtttatgatttaggaatctccacctggctcctcacc

SEQ ID NO: 720725 - DNA, 588 bp, Homo sapiens
aaaaaaaaaaaaagaaagaaaaatacacataagaatgtttccataatgttagggtgaggaagatgaaaaaaaaamaacaaaaaaacacaaagccaaaagaaaaactacaaacctgcctacctaaaaattttaactcctgtatgacaaaaaataaataaaaatgaatgacaaatgaaaaactagggaaaaaaccatagaattgacaaaagtaatatgtggaaaataaaagtgcttatatacaaaatgagaaaagacataaatgaatagacagcctgggcaacgtggtgagttgctctctctatcaaaaacttaaaaattagccaagcctggtggcacatgcttgtggtctcagctactggggagggtgagggaggaggattgcctgagccgatgaagttgaggctgcagtgagctatgactgtagcactgcactccagcctgggtgacagagtgagaccctgtccttcaaaaaaaaaaaaaaaaaaggataaagaattataagtatatatttcacaaggaaaatacaaatggccaataacctcatggaaaaaacagtgattccacttaaaggtatcaagatattggtta

SEQ ID NO: 720726 - DNA, 1811 bp, Homo sapiens
tcattgcaaggcttttgcaactcaraatgcattaaaaaaatgggttttctatattttattttttgtaaacttaaaatagtataaatattcccaaaattgccgtaaacttcaccaatatgactgaaaagctctcaaacttaccattatgcattgtctcaacacaacaaaattacacaaatatctatacggataggtaattactaccacttacagtgcctgtgacgccttccccaacctcctacagtaaatatgacatgctcggaaatacattaccctttttagaccattagggtatcatttaattcccttaagcagcaggtctaatgaggcataagcaacaccatgatgttgtgccaggcctaagaggcatacagaactgtgggcaggataagagtctgagagatagtagcagctagacattcaacattcctacattgttacagctgcccaagcagagaagagagcagtaagaaatagaccccaaaaagctgggggtgactcaatgacaacattcgtggtcaagcagtaatttaacaaatatgtctgcttaaaatgccaaagcacatatttcaagggttgcggtcctctgcaccaaatacattgctgccttcctaaaacatgacccacaaaaccacagcttgcagtataaaaagtccatcttgagccctgctcaagatgaaaggttaccagaggaaactgattcttatagtaattaaaatatttgtatagaacgctttactgtttacaagtcacttacacatacactgtttcatttgaccttatttcacaaaatttaccttatttgacagtcacaatgtgcctgacagataaaatataattatcatcccctattttatagaggtagaacctgaagcttaaagaaattatctgtcagtaatatgtccatgagacctgagtctccatgtaaattatcaacttattatttggttctatggcatggattccccaaaaagcagtctacagtgttctacggtttaatctaacatacatccctagccatctagtactgaaaacagttaaaaataatggaatcttttgataaacactgacagccaatcatataaaaaacaaaagtgaaatttaaacttgtcagttttatacaaatataatgtagtattttctaataatcaaaaaaaaaaacttttgcctaagagccttactataatgttctcaggggctatgagattgcttgtggctgaaaatatcaattcctctgggtacttcagcaattactccttacagaaccaaagtcaaatacctatatataaattatacatatatatgaattagacacacatatactgtatacacacaagcacacacacaattttaaaattgtgccacatgaaccatgttgcaccaagatttcaaagcactgagtcctatgttcaaaaattctttttgctgagtctctatcatgtgatagacaatcttctaagtataagaatataaatgatacctgccaccaagtgacaatatttgggtgtgataattacaacttagtatcatgcttccaagagaattatatacagcatttaatactgtattaaatatacagtatttatacagccaggcaccaactgtagtctggtagatctggttagaatattccctttgtcttgagaaataacctactaaggatcattacttttcatacacaagaacgcattaaactgctgggctcatgcagagatgtcaaaatactttaatatgactgaagcactgattatggagagaaaatggcaaacaactcagctggagaagagacagatgaaatagttatggaggat

SEQ ID NO: 720727 - DNA, 1811 bp, Homo sapiens
tcattgcaaggcttttgcaactcaaaatgcattaaaaaaatgggttttctatattttattttttgtaaacttaaaatagtataaatattcccaaaattgccgtaaacttcaccaatatgactgaaaagctctcaaacttaccattatgcattgtctcaacacaacaaaattacacaaatatctatacggataggtaattactaccacttacagtgcctgtgacgccttccccaacctcctacagtaaatatgacatgytcggaaatacattaccctttttagaccattagggtatcatttaattcccttaagcagcaggtctaatgaggcataagcaacaccatgatgttgtgccaggcctaagaggcatacagaactgtgggcaggataagagtctgagagatagtagcagctagacattcaacattcctacattgttacagctgcccaagcagagaagagagcagtaagaaatagaccccaaaaagctgggggtgactcaatgacaacattcgtggtcaagcagtaatttaacaaatatgtctgcttaaaatgccaaagcacatatttcaagggttgcggtcctctgcaccaaatacattgctgccttcctaaaacatgacccacaaaaccacagcttgcagtataaaaagtccatcttgagccctgctcaagatgaaaggttaccagaggaaactgattcttatagtaattaaaatatttgtatagaacgctttactgtttacaagtcacttacacatacactgtttcatttgaccttatttcacaaaatttaccttatttgacagtcacaatgtgcctgacagataaaatataattatcatcccctattttatagaggtagaacctgaagcttaaagaaattatctgtcagtaatatgtccatgagacctgagtctccatgtaaattatcaacttattatttggttctatggcatggattccccaaaaagcagtctacagtgttctacggtttaatctaacatacatccctagccatctagtactgaaaacagttaaaaataatggaatcttttgataaacactgacagccaatcatataaaaaacaaaagtgaaatttaaacttgtcagttttatacaaatataatgtagtattttctaataatcaaaaaaaaaaacttttgcctaagagccttactataatgttctcaggggctatgagattgcttgtggctgaaaatatcaattcctctgggtacttcagcaattactccttacagaaccaaagtcaaatacctatatataaattatacatatatatgaattagacacacatatactgtatacacacaagcacacacacaattttaaaattgtgccacatgaaccatgttgcaccaagatttcaaagcactgagtcctatgttcaaaaattctttttgctgagtctctatcatgtgatagacaatcttctaagtataagaatataaatgatacctgccaccaagtgacaatatttgggtgtgataattacaacttagtatcatgcttccaagagaattatatacagcatttaatactgtattaaatatacagtatttatacagccaggcaccaactgtagtctggtagatctggttagaatattccctttgtcttgagaaataacctactaaggatcattacttttcatacacaagaacgcattaaactgctgggctcatgcagagatgtcaaaatactttaatatgactgaagcactgattatggagagaaaatggcaaacaactcagctggagaagagacagatgaaatagttatggaggat

SEQ ID NO: 720728 - DNA, 1811 bp, Homo sapiens
tcattgcaaggcttttgcaactcaaaatgcattaaaaaaatgggttttctatattttattttttgtaaacttaaaatagtataaatattcccaaaattgccgtaaacttcaccaatatgactgaaaagctctcaaacttaccattatgcattgtctcaacacaacaaaattacacaaatatctatacggataggtaattactaccacttacagtgcctgtgacgccttccccaacctcctacagtaaatatgacatgctcggaaatacattaccctttttagaccattagggtatcatttaattcccttaagcagcaggtctaatgaggcataagcaacaccatgatgttgtgccaggcctaagaggcatacagaactgtgggcaggataagagtctgagagatagtagcagctagacattcaacattcctacattgttacagctgcccaagcagagaagagagcagtaagaaatagaccccaaaaagctgggggtgactcaatgacaacattcgtggtcaagcagtaatttaacaaatatgtctgcttaaaatgccaaagcacatatttcaagggttgcggtcctctgcaccaaatacattgctgccttcctaaaacatgacccacaaaaccacagcttgcagtataaaaagtccatcttgagccctgctcaagatgaaaggttaccagaggaaactgattcttatagtaattaaaatatttgtatagaacgctttactgtttacaagtcacttacacatacactgtttcatttgaccttatttcacaaaatttaccttayttgacagtcacaatgtgcctgacagataaaatataattatcatcccctattttatagaggtagaacctgaagcttaaagaaattatctgtcagtaatatgtccatgagacctgagtctccatgtaaattatcaacttattatttggttctatggcatggattccccaaaaagcagtctacagtgttctacggtttaatctaacatacatccctagccatctagtactgaaaacagttaaaaataatggaatcttttgataaacactgacagccaatcatataaaaaacaaaagtgaaatttaaacttgtcagttttatacaaatataatgtagtattttctaataatcaaaaaaaaaaacttttgcctaagagccttactataatgttctcaggggctatgagattgcttgtggctgaaaatatcaattcctctgggtacttcagcaattactccttacagaaccaaagtcaaatacctatatataaattatacatatatatgaattagacacacatatactgtatacacacaagcacacacacaattttaaaattgtgccacatgaaccatgttgcaccaagatttcaaagcactgagtcctatgttcaaaaattctttttgctgagtctctatcatgtgatagacaatcttctaagtataagaatataaatgatacctgccaccaagtgacaatatttgggtgtgataattacaacttagtatcatgcttccaagagaattatatacagcatttaatactgtattaaatatacagtatttatacagccaggcaccaactgtagtctggtagatctggttagaatattccctttgtcttgagaaataacctactaaggatcattacttttcatacacaagaacgcattaaactgctgggctcatgcagagatgtcaaaatactttaatatgactgaagcactgattatggagagaaaatggcaaacaactcagctggagaagagacagatgaaatagttatggaggat

SEQ ID NO: 720729 - DNA, 3565 bp, Homo sapiens
acacacacacacgtacatatacacatatatgtgtgtgtgtgtgtatatatacacacacacacacatatatatatacacacacacacacgtatatatatttagttgaattaggtacatgagctaagcaaaggtgtactttaggtacttttaccaagagtaatgtgtaaataatgagagaaggaaagaattacgaaatgtactttgaaaaactatacaattatacatggaaaaagtaacaaatgaaagtaatagaataaagatgtgagagactgaggtagaggaagaaatgataggtttttttgtttcaatcatgaatttatctgagatttttaaggagatatataatacatctataaggatttaattttggattatggggaaaatactgacacaatatgagaaatattaaattcaagggaagaagaatgactgggaatggagaagatatatctagttttttgacctgaaggcgggatagcaataccacactgtgatgacaaagcaaagctactgtgagcattttaggctataatttgcatgtgggttatatttaaagatgtgcaaaatgatcaaattcaaagtctggagagaatcttggaaaaggctcacatttaggacctgaatgaaaaaatattaaaaagagccagagaaaaccgggaaattaacaggaaaagtagttggtaagaatgtagatgcagacaaattcttatgcaaatagatcaaaacccagtgctttagaccaaaaccagtgtagtcaaacttactcctcagccattcaaaaacaaatttcagaaaaaactgctatatttggaggcagaaattgcatgtgggttatagttaattttttaattgtgccctccaaaacaaccagttgtaaatgtacttaagcaattgaactaagttacttgttacataatatttttaaaagatagtttgtgtaaaagataattgtgttaattttagagtctgtctttctggtatctagataaaaatgtcagctatggatttattcatttatttaacaaacaaatttatttgcacatttgcaccttctatgtgcaaagcattattttaggtcttgggggcatagctgtaagtaagatagacataaacctcactcatttggagcttacattctaacaggtcatgtttcttatacaatatgacactttcatagaaaggtatcccttaactatatattaacatatgaagaaggacatgcaactagctgtagcaaatacaatgtcaggccttaccactgcataagagccacattaacatagtgtatttttgggggaagaccagatattgtttgaagtccaccacggcattactcatttgtgccgctgagttgttttgatatctccacctcctattcaacattttacttccctctttggtggctttggtttgaaattcttattacccttggtacattttgataccagtccccactcacaggatttggtctagacttcagtccaactctcttttctctctaggcagtacataggacacaggaatattcagtggtacatttctatacatacgacttactaagtcaagaatagtaccatgatagtgatggtggtaatgacataggggttaatcagagaaggaggactgatctgagcccaccaaaccagggtaagaattagcactccaaattcaatagctgtcgacgtttgttattgacactcccagcacatgcaaacaattgaagtataatggtagcactccaagtctaataccatgaggtcttcccatttgtacaaatgcaatataaagtctaagatatttatccgttgagtgatgtttcccaagtatttacaacaatacgtagaacaagtaaaaactcagtaactattgttggatgaatgaatatgtgcattatagytatgtgtaatttttgtaaaagtctatgttcatccctgttagttatctttttatcatgcatactcatgcacaaaaccccacaaactttaattttcagagaaagcacagtataaacctacgagaaggaagagaaacattttcatgttttatattttagaaaaacatttcatttaatgatggattccatgtatgtattattatgcagcatagcgctatttcttcgtaaccaaattttatgtaaaaaatcatctctcttttaagaaatggctttggaaaaaagtaaaatgtctttctaggcttatgataccgtcctttttcagaaagtgacctgcccagaattatgaattttacccctgctttactgtttcataatccctgaacacagagattttacagttttttattttgaaaggaaggcataaggtattaaatagtatagatattccatttacttaaatatgaccaaacattattattgcctaagttgtgaataactacatgttcatgttattctagattatatacgtggctaaaggggccaaaagaaattatgttttttggaacatttgtcttccttttatgaatatcagtgtgtctgtgtacttgtgatttaattgcttttctataaacttggtgatatttaataatttcataactatcataaagtataataaccccttaataattatactatatgttatagctacttaagtaaacaaaatatcaatatttagtgtacctaataataatttgtctatactaatttttgtgtttattgttttagaatatctcacaagaacttaatttaacatgagattgagaatttctgactgacaataaatatctccaaaatttaatattttcttctttcctacagaaattatttaagaatcttttatgacactacagttaaatagcaagaaaggggttttattaaaccagtcatttatttttctctgtgagtttgaagggttgcggaaaatgtgaattcatatttctaaaaatctatagaaaaaggtaagagataatatcagtaccctctattcaagtgcaggatcattttcccatgaatttagagtgaagacacctggttttgattttaatttcaaatattttaggttaatttacacttcattacattagaccatattgagctaagaagctttataaaatttaattaacacagtcattgctcttgacaaacttctgtactgagatgatttagtgtgctttgttttggttgagtcttcttaatttgtgttgagatctctgctgttggttaactttgttcattagaaaagtgatacaaaagaataggacctaagttttccacatatggactgatttgctttatgcagttctatagctccaaaccacaactcaaccataatcagcaatgccaacaactaaccaaccaactaatagagccttactcaagacctactactacatgtctagaattgaggaagcttccataggtgtaaacataacacacttcttaatcaatccatgctacagggaacaaatagggtgaaagggcaagcaagagaggattttgtaggactaatacttcactacaaccagaaaaaagttaaagtcaatggatcagaaatgccctctctattgtatgacagctcattatattttataggtaatgatcaccatgtgg

SEQ ID NO: 720730 - DNA, 3565 bp, Homo sapiens
acacacacacacgtacatatacacatatatgtgtgtgtgtgtgtatatatacacacacacacacatatatatatacacacacacacacgtatatatatttagttgaattaggtacatgagctaagcaaaggtgtactttaggtacttttaccaagagtaatgtgtaaataatgagagaaggaaagaattacgaaatgtactttgaaaaactatacaattatacatggaaaaagtaacaaatgaaagtaatagaataaagatgtgagagactgaggtagaggaagaaatgataggtttttttgtttcaatcatgaatttatctgagatttttaaggagatatataatacatctataaggatttaattttggattatggggaaaatactgacacaatatgagaaatattaaattcaagggaagaagaatgactgggaatggagaagatatatctagttttttgacctgaaggcgggatagcaataccacactgtgatgacaaagcaaagctactgtgagcattttaggctataatttgcatgtgggttatatttaaagatgtgcaaaatgatcaaattcaaagtctggagagaatcttggaaaaggctcacatttaggacctgaatgaaaaaatattaaaaagagccagagaaaaccgggaaattaacaggaaaagtagttggtaagaatgtagatgcagacaaattcttatgcaaatagatcaaaacccagtgctttagaccaaaaccagtgtagtcaaacttactcctcagccattcaaaaacaaatttcagaaaaaactgctatatttggaggcagaaattgcatgtgggttatagttaattttttaattgtgccctccaaaacaaccagttgtaaatgtacttaagcaattgaactaagttacttgttacataatatttttaaaagatagtttgtgtaaaagataattgtgttaattttagagtctgtctttctggtatctagataaaaatgtcagctatggatttattcatttatttaacaaacaaatttatttgcacatttgcaccttctatgtgcaaagcattattttaggtcttgggggcatagctgtaagtaagatagacataaacctcactcatttggagcttacattctaacaggtcatgtttcttatacaatatgacactttcatagaaaggtatcccttaactatatattaacatatgaagaaggacatgcaactagctgtagcaaatacaatgtcaggccttaccactgcataagagccacattaacatagtgtatttttgggggaagaccagatattgtttgaagtccaccacggcattactcatttgtgccgctgagttgttttgatatctccacctcctattcaacattttacttccctctttggtggctttggtttgaaattcttattacccttggtacattttgataccagtccccactcacaggatttggtctagacttcagtccaactctcttttctctctaggcagtacataggacacaggaatattcagtggtacatttctatacatacgacttactaagtcaagaatagtaccatgatagtgatggtggtaatgacataggggttaatcagagaaggaggactgatctgagcccaccaaaccagggtaagaattagcactccaaattcaatagctgtcgacgtttgttattgacactcccagcacatgcaaacaattgaagtataatggtagcactccaagtctaataccatgaggtcttcccatttgtacaaatgcaatataaagtctaagatatttatccgttgagtgatgtttcccaagtatttacaacaatacgtagaacaagtaaaaactcagtaactattgttggatgaatgaatatgtgcattatagctatgtgtaatttttgtaaaagtctatgttcatccctgttagttatctttttatcatgcatactcatgcacaaaaccccacaaactttaattttcagagaaagcacagtataaacctackagaaggaagagaaacattttcatgttttatattttagaaaaacatttcatttaatgatggattccatgtatgtattattatgcagcatagcgctatttcttcgtaaccaaattttatgtaaaaaatcatctctcttttaagaaatggctttggaaaaaagtaaaatgtctttctaggcttatgataccgtcctttttcagaaagtgacctgcccagaattatgaattttacccctgctttactgtttcataatccctgaacacagagattttacagttttttattttgaaaggaaggcataaggtattaaatagtatagatattccatttacttaaatatgaccaaacattattattgcctaagttgtgaataactacatgttcatgttattctagattatatacgtggctaaaggggccaaaagaaattatgttttttggaacatttgtcttccttttatgaatatcagtgtgtctgtgtacttgtgatttaattgcttttctataaacttggtgatatttaataatttcataactatcataaagtataataaccccttaataattatactatatgttatagctacttaagtaaacaaaatatcaatatttagtgtacctaataataatttgtctatactaatttttgtgtttattgttttagaatatctcacaagaacttaatttaacatgagattgagaatttctgactgacaataaatatctccaaaatttaatattttcttctttcctacagaaattatttaagaatcttttatgacactacagttaaatagcaagaaaggggttttattaaaccagtcatttatttttctctgtgagtttgaagggttgcggaaaatgtgaattcatatttctaaaaatctatagaaaaaggtaagagataatatcagtaccctctattcaagtgcaggatcattttcccatgaatttagagtgaagacacctggttttgattttaatttcaaatattttaggttaatttacacttcattacattagaccatattgagctaagaagctttataaaatttaattaacacagtcattgctcttgacaaacttctgtactgagatgatttagtgtgctttgttttggttgagtcttcttaatttgtgttgagatctctgctgttggttaactttgttcattagaaaagtgatacaaaagaataggacctaagttttccacatatggactgatttgctttatgcagttctatagctccaaaccacaactcaaccataatcagcaatgccaacaactaaccaaccaactaatagagccttactcaagacctactactacatgtctagaattgaggaagcttccataggtgtaaacataacacacttcttaatcaatccatgctacagggaacaaatagggtgaaagggcaagcaagagaggattttgtaggactaatacttcactacaaccagaaaaaagttaaagtcaatggatcagaaatgccctctctattgtatgacagctcattatattttataggtaatgatcaccatgtgg

SEQ ID NO: 720731 - DNA, 1627 bp, Homo sapiens
ttgtgataggcagggagttctcactagatctgtttgcttgataagtgtctggcatttctcctgtgctctctctctctctctcctgcctccttgcaaagaaagtgcttgcttccccttcaccttcagccatggttttaagtttccggaggcctccccagccatgtggacctgtgagttaatcaaacatcttttgtttataaattacccagtctcaggtagtatctttatggcagtatgaaaacagattaatatagtaatctacaattatatactgttatcataattacattctttggataggtgtcagtatagtctctaaaagttaaaggcaatgaagggtacatgtacacagacatgcccacacacaccccttgttatcaggccatatgttataatgaaagcgagtatcttagggaagccagtatctgactttattctgtcactttacaaatattgtttatgaagcaaacaaaatgttttacaacctacatggtaacaagatacagtccaagctcttcccttttaagtactccaaaaagtacctgacctggaatttcattcaagacagtttctacaataaacctagattcaaataactagtaaagtgtcagatgacaaaatactccatgtccctgaacagagtttagatggaaaccttaaatctagattatatttctgaaaggcataaactattaaaattattattttatgtgattcctaaaaagtagaagtatatttccagtgaatccacatctcttgaatactactcatttcacttaaaaaaacaacaacaacacttcagtttgatggaagactttagttgtccatcagctacagggcacacctgctgggttaatgggaattcagatagctggaccacttccgtagtgcaagcttttgatgggcctctcaaatgctgattgcccttaaagtgtgtattcctgatcactgtagttcaaaaggaactaaccaccctagggtgtagatcaaaactgaacaacaaatgcatcgtttaccatgtttttgctaaagcattttaaagtaaattataggcaatataacatttatgcattcaaatttaattagagctgccttgaaacttcacacagagcaggaagtctcctccttcagaccatggaagaatcttgtataccaacattacagtcctccaaacagcccaagcctagatgttttttctttgcaatctagactctctcccttggtgagctcatcaggtctcgargctttaaatgtcatctataacccaacacttccaaatttatgtctccagcctggacctctcatgtaacctctgggcttgttcatctcattgcctccttgacatctccacttggatatttaatagacatcttacatttattatgccaataactgggcacatgtattatatcttttttacgccagcagtgtttagcttagtgtctaacattcagtaaatggtcatttaacattttttactgattgaacttgtaatttttaacttcacacacaaccaaacattccagaaaaataaagtaattttatcccaattacatttagtgtcaaatcttattgagaatatgttctgggggcataaatattacagttaataattccattgaaattt

SEQ ID NO: 720732 - DNA, 608 bp, Homo sapiens
ccggatattaggaattcaacatataaatttgagaaggaggtagtgatggcacaactttacccataacagttaccattagctgttatgagcaaataaggcagaggagtatgtttgagagttcaatttggatcctgtaaaatttgagctagcagtggattcttcaggtggtcttaactatgttttaacacctttatagtacttactatcttcttactacttactgctttcttttctaacacctttttaaaaaatgaactcatataatcttcataaaaagcctttgagttggtactaacatcatccttgttttgtagataagaaaactgaggtgtacagggtttaagttgtcaagatgacacaactaggaagaggcagatctgggattaattccaataagtttgtctctagagtttgtgcacttaaccttggttcccagacaggttggttataaatgcatgactggagaccaggaaaaagatcagtgctcgagatgtagtttatttgtttttcatcagtttaatatgcattgatttactagttcaytggttttccagttcatcgtagaaactatgctaggcactagcgatacaatgacaacaaagatccca

SEQ ID NO: 720733 - DNA, 584 bp, Homo sapiens
tggagtgggaagtgcaagcatacttggaatgcaaggcagaatttgatgagaggtacagacacattgtctgtttttatgttttctcatgaggcaaacttctgagtgccttatttaatacccttggtgtattgtacataatcagaactctccagacatctgtcagtattattaacttttgtttttatttttttaaactatggaatgaacggattgaaactatttcataaacatttctaggtgctaacatcttcctagccccaagctaacatagtcaaacataaacagactctaactaaggtcttaaatacttggtaaatgaataaatgttgactagactttaataactaggtctgaactrtttttatgcttcagaggttattgtttgactctttccttcaaatgcaaataaagagcttgaaatgcttattaatccttcccttcagttatgtatggagcaagttagcaatgaacttaatgattcaccctggctgcagaaacatgtttcatttggtcagggagataaaaattagttagcattttgtcttgcataaggcagtagaaatagaactatttctcttgtttga

SEQ ID NO: 720734 - DNA, 584 bp, Homo sapiens
tggagtgggaagtgcaagcatacttggaatgcaaggcagaatttgatgagaggtacagacacattgtctgtttttatgttttctcatgaggcaaacttctgagtgccttatttaatacccttggtgtattgtacataatcagaactctccagacatctgtcagtattattaacttttgtttttatttttttaaactatggaatgaacggattgaaactatttcataaacatttctaggtgctaacatcttcctagccccaagctaacatagtcaaacataaacagactctaactaaggtcttaaatacttggtaaatgaataaatgttgactagactttaataactaggtctgaactgtttttatgcttcagaggttattgtttgactctttccttcaaatgcaaataaagagcttgaaatgcttattaatccttcccttcagttatgtatggagcaagttagcaatgaacttaatgattcaccctggctgcagaaacatgtttcatttggtcagggagataaaaattarttagcattttgtcttgcataaggcagtagaaatagaactatttctcttgtttga

SEQ ID NO: 720735 - DNA, 1277 bp, Homo sapiens
ttttttgtctacttctcaagggaaatgtgtggctcggctgaaacagcaggaaatctgtgaaatccttcgcaaacaccagctattcaagctatttttaaccctgaactagaaaacaggtgtctcgcctattgccagcccttaagagaataattaaaacagttgcttcaaaatgtggaaacttcaggattgattaaaatgtttctcagtgtcaggattgattaaaatgtttctcagcgtcctagggrcagggatgtggcgtgatgggcccaccttgtgtacatgctgtggtgggacagcgttgtaaaaacacgtttatttgtagaaaagtactaaagtcaggacggctttttatagaatgacctcaagttttacaatttttcgtcatatataacacaagcgccattttctttgttttaaataaatttcctggttgtatgcatcctcaaatattctgaaacagccttccgcagaaccacagacctggatgtagctagtcgatcaaacagaccctgagcccagtggaggcttacgcatctggaaatcctggtttccaaattatgtgacctttttctgccttatgtcataattagaattgttatgaaacagattaaattctttattgagcatatagacggctgagaaagataagcagagcccaggtttttcaagtgggcaaagtcacaggcatccacacggccagctacttctcattcgctcttcagcccctatgtttgatgacctaccaccacagagcgtctctgagaagggccaggagctctgagaacaaaacagacaccgtccctgaaccttcgacgctttcacataaaaataaactctcctttcagatttggattagtcaggacccaatagaagtcgggaataatagtgcaattagagaggtggctgtctcatgatgatagactccacattccagggctaggaatggactaagtaagtgccagccaggcgggtcccgctcaccgcccctcgctgagcccaaaaccagctgcacgagttagctctatggcccctgctgccctgtggccgctgccagttgggggctctgagacctgctgggccagaagaaacccccaggcaggaaatgaaacccagcggatgccctctgtctgtggattgaggaagcgagcctgctcaggcttcgctgagcaattttgactgaatgtccggttctgtgtattatctgagcaccaccaatttaggcactgccagtccatacaatcttctttcagccactcacaaatgtgctgccagttagg

SEQ ID NO: 720736 - DNA, 1277 bp, Homo sapiens
ttttttgtctacttctcaagggaaatgtgtggctcggctgaaacagcaggaaatctgtgaaatccttcgcaaacaccagctattcaagctatttttaaccctgaactagaaaacaggtgtctcgcctattgccagcccttaagagaataattaaaacagttgcttcaaaatgtggaaacttcaggattgattaaaatgtttctcagtgtcaggattgattaaaatgtttctcagcgtcctaggggcagggatgtggcgtgatgggcccaccttgtgtacatgctgtggtgggacagcgttgtaaaaacacgtttatttgtagaaaagtactaaagtcaggacggctttttatagaatgacctcaagttttacaatttttcgtcatatataacacaagcgccattttctttgttttaaataaatttcctggttgtatgcatcctcaaatattctgaaacagccttccgcagaaccacagacctggatgtagctagtcgatcaaacagaccctgagcccagtggaggcttacgcatctggaaatcctggtttccaaattatgtgacctttttctgccttatgtcataattagaattgttatgaaacagattaaattctttattgagcatatagacggctgagaaagataagcagagcccaggtttttcaagtgggcaaagtcacaggcatccacacggccagctacttctcattcgctcttcagcccctatgtttgatgacctaccaccacagagcgtctctgagaagggccaggagctctgagaacaaaacagacaccgtccctgaaccttcgacgctttcacataaaaataaactctcctttcagatttggattagtcaggacccaatagaagtcgggaataatmgtgcaattagagaggtggctgtctcatgatgatagactccacattccagggctaggaatggactaagtaagtgccagccaggcgggtcccgctcaccgcccctcgctgagcccaaaaccagctgcacgagttagctctatggcccctgctgccctgtggccgctgccagttgggggctctgagacctgctgggccagaagaaacccccaggcaggaaatgaaacccagcggatgccctctgtctgtggattgaggaagcgagcctgctcaggcttcgctgagcaattttgactgaatgtccggttctgtgtattatctgagcaccaccaatttaggcactgccagtccatacaatcttctttcagccactcacaaatgtgctgccagttagg

SEQ ID NO: 720737 - DNA, 1277 bp, Homo sapiens
ttttttgtctacttctcaagggaaatgtgtggctcggctgaaacagcaggaaatctgtgaaatccttcgcaaacaccagctattcaagctatttttaaccctgaactagaaaacaggtgtctcgcctattgccagcccttaagagaataattaaaacagttgcttcaaaatgtggaaacttcaggattgattaaaatgtttctcagtgtcaggattgattaaaatgtttctcagcgtcctaggggcagggatgtggcgtgatgggcccaccttgtgtacatgctgtggtgggacagcgttgtaaaaacacgtttatttgtagaaaagtactaaagtcaggacggctttttatagaatgacctcaagttttacaatttttcgtcatatataacacaagcgccattttctttgttttaaataaatttcctggttgtatgcatcctcaaatattctgaaacagccttccgcagaaccacagacctggatgtagctagtcgatcaaacagaccctgagcccagtggaggcttacgcatctggaaatcctggtttccaaattatgtgacctttttctgccttatgtcataattagaattgttatgaaacagattaaattctttattgagcatatagacggctgagaaagataagcagagcccaggtttttcaagtgggcaaagtcacaggcatccacacggccagctacttctcattcgctcttcagcccctatgtttgatgacctaccaccacagagcgtctctgagaagggccaggagctctgagaacaaaacagacaccgtccctgaaccttcgacgctttcacataaaaataaactctcctttcagatttggattagtcaggacccaatagaagtcgggaataatagtgcaattagagaggtggctgtctcatgatgatagactccacattccagggctaggaatggactaagtaagtgccagccaggcgggtcccgctcaccgcccctcgctgagcccaaaaccagctgcacgagttagctctatggcccctgctgccctgtggccgctgccagttgggggctctgagacctgctgggccagaagaaacccccaggcaggaamtgaaacccagcggatgccctctgtctgtggattgaggaagcgagcctgctcaggcttcgctgagcaattttgactgaatgtccggttctgtgtattatctgagcaccaccaatttaggcactgccagtccatacaatcttctttcagccactcacaaatgtgctgccagttagg

SEQ ID NO: 720738 - DNA, 765 bp, Homo sapiens
taaaatctgtcatcactttcactttcatctggaaaatagtacctggtaagttttttcaattgcagactataaacatagacgcaaatttattaacttggcactattatataaggtgcataatgagagtttgtaaaatggcaaaatagttttttctagtcctataattaatttatcatcagaatagcctcagactgctatacagattcattctatgaacagtattggtgaaaaagcagatgtgttcctgttttttgtttgtttgtttgagactatcactgttaaatatacatcaagcaaaatagttaaagaaaagcctttggagtaatgtagtaaattcaataatatgtatatgtgcacacacacacaaatacacatcccaaacaacaacaagaggaataagaaatttataacctgggtgggcgcggtggctcatgcctgtaatcccagcactctgggaggacgagacgagcagatcacttgaggtcaggagtgagaccagcctggccaacatggtgaaactccatctctactaaaaatgcaaaaattagccggggcktggtggtgagcacctgtcagctactcaggaggctgaggcaggagaatcgcttgaacccaggaggtggaggttgcagggagtggagattgcatcactgcacttcaacctggatggcagagcaagactctgcctcaaaaaaaaaaattattaccaaaaacctcactaattctgtacatcagcatttattaaaataaggataagagagagct

SEQ ID NO: 720739 - DNA, 1210 bp, Homo sapiens
tggttcttaatctcacccacatcttagaataatgtggaacatttcaaactacccacatctccttctaaaaactgaagttctgttttaactggactttagtagagccaagaaatgagtattacttaaaatcttgccatgtgattctaccaggaagccagggttcagagccatggattacatttttaatataaatacacattattagttgaagtggttttaagttaggatagctgtaacgttgattgaaaggggaatacttaaaacagaaccctgccttgggtcgtcaagacttaaaaaattcttctgtttttattctattaaatataatcatgcattcatttactttagcatttataattctaaaacacattgcaaatttcacaaaactaccattttctaaatgtcagcactctaaatacaacatttattttttaaagtagtatattcacttcaaattccattgctgtgtcaagagttagttgaacttaaaatataattgttactcagcaaaaatagaaagatgttagctgactgtgtcaaaagaaatattttaacactgatttcatttttactaaatgaatttttctttatrttttatgcataagcttccctgctttctattttttgtggtttaaataaagaaccatgattatctgtataactgattgctcaaagtaattaatcatttttcttatgaaattaccagggtaaattaagaatcttataattacagagttttctcttgtctagaggaaacatactgagaaactgtgttaggaaattattatttcaaaacccagtctaagttcttagccactggactttaaaaaaaatacatattacatatactttttctaacatgattgagaatatagtttgtttcagatttccacatttcttaaatgaaaacaataaagaattcaaaaggcaaaaggtactgtaaaaaaaaggtatttgatctcatgtaaatgagaatcctacactctcactgaattttactagaggggaacttattgtcacatcaggttgtttgttcaagatactatttctgatgtattttattaaagaattcaaaaggcaaaggtattgtaaaaaaagttatttgatcacatgtaaatgaaaattttaccttcttattgaattttactaattagaggggtaattattctcgcatcagattatttgcacaagatactatttctgatctatt

SEQ ID NO: 720740 - DNA, 1210 bp, Homo sapiens
tggttcttaatctcacccacatcttagaataatgtggaacatttcaaactacccacatctccttctaaaaactgaagttctgttttaactggactttagtagagccaagaaatgagtattacttaaaatcttgccatgtgattctaccaggaagccagggttcagagccatggattacatttttaatataaatacacattattagttgaagtggttttaagttaggatagctgtaacgttgattgaaaggggaatacttaaaacagaaccctgccttgggtcgtcaagacttaaaaaattcttctgtttttattctattaaatataatcatgcattcatttactttagcatttataattctaaaacacattgcaaatttcacaaaactaccattttctaaatgtcagcactctaaatacaacatttattttttaaagtagtatattcacttcaaattccattgctgtgtcaagagttagttgaacttaaaatataattgttactcagcaaaaatagaaagatgttagctgactgtgtcaaaagaaatattttaacactgatttcatttttactaaatgaatttttctttatgttttatgcwtaagcttccctgctttctattttttgtggtttaaataaagaaccatgattatctgtataactgattgctcaaagtaattaatcatttttcttatgaaattaccagggtaaattaagaatcttataattacagagttttctcttgtctagaggaaacatactgagaaactgtgttaggaaattattatttcaaaacccagtctaagttcttagccactggactttaaaaaaaatacatattacatatactttttctaacatgattgagaatatagtttgtttcagatttccacatttcttaaatgaaaacaataaagaattcaaaaggcaaaaggtactgtaaaaaaaaggtatttgatctcatgtaaatgagaatcctacactctcactgaattttactagaggggaacttattgtcacatcaggttgtttgttcaagatactatttctgatgtattttattaaagaattcaaaaggcaaaggtattgtaaaaaaagttatttgatcacatgtaaatgaaaattttaccttcttattgaattttactaattagaggggtaattattctcgcatcagattatttgcacaagatactatttctgatctatt

SEQ ID NO: 720741 - DNA, 1210 bp, Homo sapiens
tggttcttaatctcacccacatcttagaataatgtggaacatttcaaactacccacatctccttctaaaaactgaagttctgttttaactggactttagtagagccaagaaatgagtattacttaaaatcttgccatgtgattctaccaggaagccagggttcagagccatggattacatttttaatataaatacacattattagttgaagtggttttaagttaggatagctgtaacgttgattgaaaggggaatacttaaaacagaaccctgccttgggtcgtcaagacttaaaaaattcttctgtttttattctattaaatataatcatgcattcatttactttagcatttataattctaaaacacattgcaaatttcacaaaactaccattttctaaatgtcagcactctaaatacaacatttattttttaaagtagtatattcacttcaaattccattgctgtgtcaagagttagttgaacttaaaatataattgttactcagcaaaaatagaaagatgttagctgactgtgtcaaaagaaatattttaacactgatttcatttttactaaatgaatttttctttatgttttatgcataagcttcyctgctttctattttttgtggtttaaataaagaaccatgattatctgtataactgattgctcaaagtaattaatcatttttcttatgaaattaccagggtaaattaagaatcttataattacagagttttctcttgtctagaggaaacatactgagaaactgtgttaggaaattattatttcaaaacccagtctaagttcttagccactggactttaaaaaaaatacatattacatatactttttctaacatgattgagaatatagtttgtttcagatttccacatttcttaaatgaaaacaataaagaattcaaaaggcaaaaggtactgtaaaaaaaaggtatttgatctcatgtaaatgagaatcctacactctcactgaattttactagaggggaacttattgtcacatcaggttgtttgttcaagatactatttctgatgtattttattaaagaattcaaaaggcaaaggtattgtaaaaaaagttatttgatcacatgtaaatgaaaattttaccttcttattgaattttactaattagaggggtaattattctcgcatcagattatttgcacaagatactatttctgatctatt

SEQ ID NO: 720742 - DNA, 1210 bp, Homo sapiens
tggttcttaatctcacccacatcttagaataatgtggaacatttcaaactacccacatctccttctaaaaactgaagttctgttttaactggactttagtagagccaagaaatgagtattacttaaaatcttgccatgtgattctaccaggaagccagggttcagagccatggattacatttttaatataaatacacattattagttgaagtggttttaagttaggatagctgtaacgttgattgaaaggggaatacttaaaacagaaccctgccttgggtcgtcaagacttaaaaaattcttctgtttttattctattaaatataatcatgcattcatttactttagcatttataattctaaaacacattgcaaatttcacaaaactaccattttctaaatgtcagcactctaaatacaacatttattttttaaagtagtatattcacttcaaattccattgctgtgtcaagagttagttgaacttaaaatataattgttactcagcaaaaatagaaagatgttagctgactgtgtcaaaagaaatattttaacactgatttcatttttactaaatgaatttttctttatgttttatgcataagcttccctgctttctattttttgtggtttaaataaagaaccatgattatctgtataactgattgctcaaagtaattaatcatttttcttatgaaattaccagggtaaattaagaatcttataattacagagttttctcttgtctagaggaaacatactgagaaactgtgttaggaaattattatttcaaaacccagtctaagttcttagccactggactttaaaaaaaatacatattacatatactttttctaacatgattgagaatatagtttgtttcagatttccacatttcttaaatgaaaacaataaagaattcaaaaggcaaaaggtactgtaaaaaaaaggtattygatctcatgtaaatgagaatcctacactctcactgaattttactagaggggaacttattgtcacatcaggttgtttgttcaagatactatttctgatgtattttattaaagaattcaaaaggcaaaggtattgtaaaaaaagttatttgatcacatgtaaatgaaaattttaccttcttattgaattttactaattagaggggtaattattctcgcatcagattatttgcacaagatactatttctgatctatt

SEQ ID NO: 720743 - DNA, 1284 bp, Homo sapiens
ggtcagtgcaataatgcaatgtcaaggtgacagtgacaaagaccaggatggtagttgtgaagatggtgagaaatggttggagtctgggtatatcttgaaagcagagcaatttaagtttcctgacaagttggatatgggatgtaagagaatgatagaattcaaagatgcttctttggactgagcaaaccaagtacagatgtggcattcactgagattgtcatcctttgttttagctaacactgtactgtattcaaaagccaaccagtcagcatgaacttaattacactgaggcatgaatgcacattgcttagcctttggaatgggtagctttcataggcaaattgcctgttttctaatcctggctcactgcctgctagctgtgttacttaacctcttaaatttgagcaagttacttaacttctctgagcctcagattccttccctgtgaaatggggataataacagtactaccttgtggagctgataatgttcagggaattgatatatgaaagcacttaaaaacagaacctggaatatatttcagctaacagtacgattaaaatagtagatgagaagagattgctaatttttttcccgtattccattagagttggttttccccttttctttccagaatgagtcacttggtgacttttaattagggagttgcaaacatttctgggaactttagataaaaggtaagtattattttcttttgtctgtcagatgaatgttaaagatagccaagatggtgccactgcactcagcccaggcgacagagcaaaactgtctcaaaaaagtaattaaataaataaaataaaatgaaaacaaaagaagaaaaacacttggacatatgagaggaaatgtatacacattcaacattaaaaattaaaagcaattattctcagatttatgcttaatggtgttaatgatgttagaatgaagaaagcaaatttcaaaaacaaagagaacttagatatcatgtgactcaatcctttctttattcattttacattgttatgtaatctggataccagtgcctgtcacctgtttggaggcaattagacttctaatatttaaataactcgtgccctttttacaacacagtgaaaactcagagtctatcccagtaatcctcgagtggctaacattttagtcattctactccaatttgctgttatttgttggcatctctggctctgccctctctgatgcyttttttccatcctgttcccaacatttatttatttatttagagacagaatctcgctctgtcacccaggc

SEQ ID NO: 720744 - DNA, 972 bp, Homo sapiens
ggcagaatttcaggccccattgtagacctacagaattagcccrtgcttcttagaaagatccccaggttattcatatctacatacattaaagtgtgagaagcgctgatctgaactaggtaaaattttgattaagcactgcagcatgaaggattcttctttgtgggggaaaggaaaatggacatacttgcttctggttagaattggattcagacctgcaagggcaaaatgtgaaatggctaaagataaaatgtatccagaacaaaaagccatttcatctgtgtgtcattttctacctataggaggtgattcagctctcaaaaaaggggattcacacagaactgggtttcaggaacatagcaggagtgaccttgaagtgtcaagccacccgacatctgagccgggtctaagggtgtgtgagtccttcctccctctctcctgcacctcccagggggatccattacttggttttctctaatctcaacctttccacctgggtcataatcaggccaaattctaggaatcggagtctaggctttgctactgtctgtgtgatcagaaacatccatgttttagaaaccaaagctctctggggcatttcatcctagtgagatcaaaggcagagtttctgagttttcgctggttgctgagtccaaggcttcccagggacacagtgagtcacagaggagccacggaggggtgaggtctccagcaacctacacaaactccttggcaactggaaccttggacggaaagttttcctctgttatttcctcaggcctcttccacagtttaaactatctgtgttctcacagcatttccaaatgctggtttaaccttcactgccttgagcaattctattcggtgctgttgttaactttttaagtgctggtaagagaccacagcattttgtttagatatttgctttgttttgttttacttttggttttggttgagggagaggatgtgagagta

SEQ ID NO: 720745 - DNA, 3217 bp, Homo sapiens
  misc_feature 1701, 1703, 1723, 1724, 1725, 1726, 1727, 1728, 1729, 1730,1731, 1732, 1733, 1734, 1735, 1736, 1737, 1738, 1739, 1740,1741, 1742, 1743, 1744, 1745, 1746, 1747, 1748, 1749, 1750,1751, 1752, 1753, 1754, 1755, 1756, 1757, 1758, 1759: n = A,T,C or G
  misc_feature 1760, 1761, 1762, 1763, 1764, 1765, 1766, 1767, 1768, 1769,1770, 1771, 1772, 1773, 1774, 1775, 1776, 1777, 1778, 1779,1780, 1781, 1782, 1783, 1784, 1785, 1786, 1787, 1788, 1789,1790, 1791, 1792, 1793, 1794, 1795, 1796, 1797, 1798: n = A,T,C or G
  misc_feature 1799, 1800, 1801, 1802, 1803, 1804, 1805, 1806, 1807, 1808,1809, 1810, 1811, 1812, 1813, 1814, 1815, 1816, 1817, 1818,1819, 1820, 1821, 1822: n = A,T,C or G
gttttgttttgtcttgttttgagtcagggtcttactctgtcatccaggctggtgtgctgtggtgctatcatagctcactacagcctcaacctcctggccccaggagattctcctgccctggccttccaaagtgttaggattacaggcatgagccaccgtggtagctgaaatccctttctttgaagcacattagagaatgaaaaagaaaagagagaaaaaaataagagaaagaataaaaagaaattgctgtgtcctgagtcatgtccctcctggtaaataaaatttatgggaagccattattttggactgaggtcccatagtagggcccaatagaccaaaccacataatcaagctaaaaccttaaggaagcagataaatccccaaacacaccagtttttcttgaaaacaagaggttcactcacagccatcacttggaaaagacccagtcaacttgagtcaccctaataaggaagtccttctgctttaaaccttataagaaaagtaacctgaagtaacctgatgttaaccattctgcttttttctatatttgtttccttgttctcatataaaaactaactgttgcaatgagtgctgatcatgccactgtactccagcctggacaacagagtgagaccctttctcaaaaaaagcaaaaaacaaaaaagtaactgttttgctaaacccagtagagcactcattattttatagaataaaatgctgcctgattctagaatcccaaataaaagccagtttgatctttaaatttgttttaattttgtcttttaacaccgtcaaaagtcatatattgaagcctaaaacccgccccttctctctctcctcaccaccctgtgtgtacacaaagaagagatcatttgagcatccacctgcaagcgaagagaagaggctttagaatgaaaccttccttgctggcaccctgatctttccaatctccagaactgtgagaagtatatctctattgcttaagccacacagtctgtggtactttgttatggcagcccaagctgagtaagacaaatactatttcaagaaagtgacttattactgggtgcggtggctcacacctgtaatcctagcacgttgggggttggagacaggcagatacttgagatcaggagttcaagaccagcctggccaacatggtgaaaccccacctctactaaaaatacaaaaaattagctgggggtggtggtgtgtgcctgtcctagctacttgggaggctgaggcaggagaattacttgaacccaggaggcagaggttgcagtgagctgagatcatgtcactgcactccagcctggacaacagagcaagaccccatcaaaaaaaagaaaaagaaaaaaagaaaatgacttagtgacttatctcttatgagctgcttggggaagttgatgggagattggtcactaacttctatcaacagctaagctcatcagccttatatctggacagaaccaaatttctgtctcagctaaataatgcattcctgtatggcaaaggggcaatagtacaatagtatatcctctctgcccagtgactgctatggtactttgtcaaggagctctctccgaggatgggagaaaagggttcttgcctggttgttttgcatcacctaccacttttctggccaactgatgattgtagggcattccttttatttagatttcctttatttttttcatgctncnccactcataatcaaagaagnnnnnnnnnnnnnnnnnnnnnnnnnnnnnnnnnnnnnnnnnnnnnnnnnnnnnnnnnnnnnnnnnnnnnnnnnnnnnnnnnnnnnnnnnnnnnnnnnnnncactctatcacctagcctaaagtgcaaggcatgatcatggctcactgtaacttcaaactccttggctcaagtgatcctcccaccacagcttcccaagtagctgggactacaggtgcgcaccaccatgctggctactttttttatttttagtagagacagggttttaccatgttggctaggctaatctcgaactcctgacctcaagtgatctgccygcctcggcctcccaaagtgctgggatcacaggcatgagccacctcgccgggccaaaagatgcttttttaaagttgcttatgtcttcagagagataagatagtacagccataaaagaatagaaaccataaattcgtatcatcttaattttgacttatgtataaatttctgccctttgagcacccatacaaattttttgaattagccctaaaatcataatactaggccattatcctctaggccttttttttttttttttggtaaagacagagtcgtgttatgttgcccaggctggtctcaaactcccgagctcaagcaattctcctgcctctgcctcccaaagtgctgggattacaggtgtgagccaccatgcccagccccctgggccattttaaacttgaaaaattgaattatatagagtttcttccaccaaaatgcatcatctatagaggtcaacatcaataaaatttgaatgttaaatctggaatactttggttatgaccctgattaaatcagaagaatggactaaatgaactcttattcccttctagcctgtacagttctaacacctttttgagtttgagctataatatagttacagatactaacgtaaaatacataatattcttccaatctttttttgtttgctcagactccttctgtcattctcaatcctaaaggctgacataaaacctacaccatcctctggctagagtgggactctgaaaagcgaaaagagtagcacatcctcttgggttagagattggttttcttcctggagctattgagaaaagtctccctttatctgctgaggtttctaaactgctagcgtgtaagcttgaagttgcttcttgcctgcttgctaggaatgcctgcctgagaatgaagtggctcagaagacaggagagcagatcaaaggaaggagatcatttcttaatgacagtatttgaattgtgagtgaaaataggtcgattcttaaactttcaaatttcacaaatgaagaaacaagacaaagattaacttagaggaaagcaaaagattatatcggaaacaaaaagagaaattataaaatgctacatgtctcagctgtgagcagcttttatgtagtcataataatgtaaattgtgaatactggtttagccaaaattaaaacataattatacgaggtgaatggtaagaaga

SEQ ID NO: 720746 - DNA, 1196 bp, Homo sapiens
tgtaaaacctaagatcagtgcttaagatattttgcaaaccctgcactggatggatcagctggcaccacccagacagataaactggttcctccggtcttgtggcccccactcagaaactggctcagcrcaagaggacagcttcaactccatatgatttcatctctgacctgaccaatcagaggtcctgattcactggccccgtacccaccaaattatccttaaaaactctgatccccaaattattggggagactgatttgagtaataataaaactccagtatccacacagctgactttgcatgaattactctttctctattgcaattcccctgtgttgataaattggctctgtctaggcaatgggcaaggtgaaaccatctggcagttacaaattagcagaagcccccaaagagaggggaattttataccaggtggtggggaagtggcatgggagtagggacagctgaggtataaggcatgaaggaggagtcacctgcattgaaggaatgtgcaggtagcagtgtcctgggggccagacagtgaaggcaggtgctggatgaggctttcattgtgaggggtaagaatgaagggagtttgttttctgtgaaacagcagttacagaggcctctgtgggaggagctggctccttctcagtgaagtgtgaggaactgactacttagcaggatgggcactggcacccttgatgccagtgctctatccctcccccaaactagacctaacgaatggattgttgcactcttccctggtgagagccctgcaggggcccctcaagcctcaacagtttcctgggatgtcaccaccaatgaactagatcagaggttggcaaattacagtccacaggccaaatccaccctactgcttgtttttgtaaaaaaaagaaaacaaaaagtttcattggaacatttgtttatttattgtctatgactgctttcatgctacaagggcacagctgagcagttgtgacggagatgttgtagcctgaaaccctgaaatatctattaccactcacccccacagccacactacagatgtccccataactcagcctcttaagaaaaattttgctgtattaaagtctgtatgagagattaaacacattgctctcctggattagcgtaatactctgctcagggataaatgcatttaaaatttttaaaatgttttttaatgctgaa

SEQ ID NO: 720747 - DNA, 1196 bp, Homo sapiens
tgtaaaacctaagatcagtgcttaagatattttgcaaaccctgcactggatggatcagctggcaccacccagacagataaactggttcctccggtcttgtggcccccactcagaaactggctcagcacaagaggacagcttcaactccatatgatttcatctctgacctgaccaatcagaggtcctgattcactggccccgtacccaccaaattatccttaaaaactctgatccccaaattattggggagactgatttgagtaataataaaactccagtatccacacagctgactttgcatgaattactctttctctattgcaattcccctgtgttgataaattggctctgtctaggcaatgggcaaggtgaaaccatctggcagttacaaattagcagaagcccccaaagagaggggaattttataccaggtggtggggaagtggcatgggagtagggacagctgaggtataaggcatgaaggaggagtcacctgcattgaaggaatgtgcaggtagcagtgtcctgggggccagacagtgaaggcaggtgctggatgaggctttcattgtgaggggtaagaatgaagggagtttgttttctgtgaaacagcagttacagaggcctctgtgggaggagctggctccttctcagtgaagtgtgaggaactgactacttagcaggatgggcactggcacccttgatgccagtgctctatccctcccccaaactagacctaacgaatggattgttgcactcttccctggtgagagccctgcaggggcccctcaagcctcaacagtttcctgggatgtcaccaccaatgaactagatcagaggttggcaaattacagkccacaggccaaatccaccctactgcttgtttttgtaaaaaaaagaaaacaaaaagtttcattggaacatttgtttatttattgtctatgactgctttcatgctacaagggcacagctgagcagttgtgacggagatgttgtagcctgaaaccctgaaatatctattaccactcacccccacagccacactacagatgtccccataactcagcctcttaagaaaaattttgctgtattaaagtctgtatgagagattaaacacattgctctcctggattagcgtaatactctgctcagggataaatgcatttaaaatttttaaaatgttttttaatgctgaa

SEQ ID NO: 720748 - DNA, 1196 bp, Homo sapiens
tgtaaaacctaagatcagtgcttaagatattttgcaaaccctgcactggatggatcagctggcaccacccagacagataaactggttcctccggtcttgtggcccccactcagaaactggctcagcacaagaggacagcttcaactccatatgatttcatctctgacctgaccaatcagaggtcctgattcactggccccgtacccaccaaattatccttaaaaactctgatccccaaattattggggagactgatttgagtaataataaaactccagtatccacacagctgactttgcatgaattactctttctctattgcaattcccctgtgttgataaattggctctgtctaggcaatgggcaaggtgaaaccatctggcagttacaaattagcagaagcccccaaagagaggggaattttataccaggtggtggggaagtggcatgggagtagggacagctgaggtataaggcatgaaggaggagtcacctgcattgaaggaatgtgcaggtagcagtgtcctgggggccagacagtgaaggcaggtgctggatgaggctttcattgtgaggggtaagaatgaagggagtttgttttctgtgaaacagcagttacagaggcctctgtgggaggagctggctccttctcagtgaagtgtgaggaactgactacttagcaggatgggcactggcacccttgatgccagtgctctatccctcccccaaactagacctaacgaatggattgttgcactcttccctggtgagagccctgcaggggcccctcaagcctcaacagtttcctgggatgtcaccaccaatgaactagatcagaggttggcaaattacagtccacaggccaaatccaccctactgcttgtttttgtaaaaaaaagaaaacaaaaagtttcattggaacatttgtttatttattgtctatgactgctttcatgctrcaagggcacagctgagcagttgtgacggagatgttgtagcctgaaaccctgaaatatctattaccactcacccccacagccacactacagatgtccccataactcagcctcttaagaaaaattttgctgtattaaagtctgtatgagagattaaacacattgctctcctggattagcgtaatactctgctcagggataaatgcatttaaaatttttaaaatgttttttaatgctgaa

SEQ ID NO: 720749 - DNA, 2005 bp, Homo sapiens
  misc_feature 1657, 1658, 1659, 1660, 1661, 1662, 1663, 1664, 1665, 1666,1667, 1668, 1669, 1670, 1671, 1672, 1673, 1674, 1675, 1676,1677, 1678, 1679, 1680, 1681, 1682, 1683, 1684, 1685, 1686,1687, 1688, 1689, 1690, 1691, 1692, 1693, 1694, 1695: n = A,T,C or G
  misc_feature 1696, 1697, 1698, 1699, 1700, 1701, 1702, 1703, 1704, 1705,1706, 1707, 1708, 1709, 1710, 1711, 1712, 1713, 1714, 1715,1716, 1717, 1718, 1719, 1720, 1721, 1722, 1723, 1724, 1725,1726, 1727, 1728, 1729, 1730, 1731, 1732, 1733, 1734: n = A,T,C or G
  misc_feature 1735, 1736, 1737, 1738, 1739, 1740, 1741, 1742, 1743, 1744,1745, 1746, 1747, 1748, 1749, 1750, 1751, 1752, 1753, 1754,1755, 1756: n = A,T,C or G
cttatcttaaactgtaaggcaaaaaacacaaacaaaaagcagcaacaacaaaaaatccacaacaacaaccaaacaaaaaaaaaaacacaaaataaaaaatctttagcatctactactatattaaaatgtgagcaaaaactagtcctacatcgcyggtgaaaagcaaatgaatacagcaaatctttacagactgaaaaatccctatacatttaaacctagtaattccactccttgaaaatctatcccctatgcattaaaattaaaaaaaaaatagtaagaggcatttatggtaacattagtgcagtgttgtttgaaaatggtggatcatatcatggtcctccataccataaaatagtggcagacataaaaatacactatccttgtacttgtggttttgcatgattttcagagatactgttgagggaaaataaaagaagatacagaaagcaaaaaaaaaaaaaaatacataggtttatttgtatagatatgtctccaaattaatttgaatgtgtaagcataataaaaatattaaaatatttataaaatatgctgccattataactggaatatacaatatcataaaaaattatttcaaacttgatgcaatattaatttgaatttagaatttctatgaaaactctttattctaattaaataaatttactcaaagctaataaggataaaagaatatttaaaaattagcatggacagcttgtgttggagccagggcctgataaggctggaagggaaagagaagtagagagaaaacccaaacaaaatgaccaaaaatgaaaataattgtcttactataaagtatatataaatatatactttatatatgtatactttatatatatactttatatatgtgtgtaagtgtagacaaatgaataaagtatctaaatagatgatatactcacatatatatccattatatacatattatggctttgttttgtaaaattatggaagtatgcctatatatcatgaaattatcaaataaacattaagataaaaagaaaaatttttcgagaagtaaaaagcctttttctggattttcaaatttaattaaagccattaagagaatactcttccaccttcgaaaataaaaccattattttggctttattattttttcttttattataaaaatgcatttaattagctaatagaaaatcaaaccctcaacctcttctagtttggacaaggtgatttcaacttttcagccttcacacagttctgcctccataattcctaaagagctttaactgcgttatttataggttgatacataacactgcacatattgatgatttggccagaaaatcattgcctagactatgaaataattagttaatgcagatctgaaggttgtccaaaagacatgcatgaatacaacacattcactggaattaaaaagcttactaaacacatgtataaatttatttacagtaaataatgactgctttaatgtgctagtaaaaattgtcaaatttttaaaaagtgtctggattcaatccagaaccaatagttatattttttcacttctaaagatgaatatttgacttgtattattaattaggttattgtgtctcctttctttctaccatcatgattgatatattggctcctttattaattaattctttcactgaannnnnnnnnnnnnnnnnnnnnnnnnnnnnnnnnnnnnnnnnnnnnnnnnnnnnnnnnnnnnnnnnnnnnnnnnnnnnnnnnnnnnnnnnnnnnnnnnnnntatttgtctaatgaatcagcatgtttttcaaggagaagagtaaagtatcagaattttgcttcaataaaatcaatgtaattatggatatatttatctgaacatgacggaatttttcaaaagacgaatttagaaaccagatgggtaggatattgggcagagaaaatggcaaacaggatagacgggctgatttgaggattggaataagaagattcagaaattacttcattgagaaatataatgaggaagagg

SEQ ID NO: 720750 - DNA, 2005 bp, Homo sapiens
  misc_feature 1657, 1658, 1659, 1660, 1661, 1662, 1663, 1664, 1665, 1666,1667, 1668, 1669, 1670, 1671, 1672, 1673, 1674, 1675, 1676,1677, 1678, 1679, 1680, 1681, 1682, 1683, 1684, 1685, 1686,1687, 1688, 1689, 1690, 1691, 1692, 1693, 1694, 1695: n = A,T,C or G
  misc_feature 1696, 1697, 1698, 1699, 1700, 1701, 1702, 1703, 1704, 1705,1706, 1707, 1708, 1709, 1710, 1711, 1712, 1713, 1714, 1715,1716, 1717, 1718, 1719, 1720, 1721, 1722, 1723, 1724, 1725,1726, 1727, 1728, 1729, 1730, 1731, 1732, 1733, 1734: n = A,T,C or G
  misc_feature 1735, 1736, 1737, 1738, 1739, 1740, 1741, 1742, 1743, 1744,1745, 1746, 1747, 1748, 1749, 1750, 1751, 1752, 1753, 1754,1755, 1756: n = A,T,C or G
cttatcttaaactgtaaggcaaaaaacacaaacaaaaagcagcaacaacaaaaaatccacaacaacaaccaaacaaaaaaaaaaacacaaaataaaaaatctttagcatctactactatattaaaatgtgagcaaaaactagtcctacatcgctggtgaaaagcaaatgaatacagcaaatctttacagactgaaaaatccctatacatttaaacctagtaattccactccttgaaaatctatcccctatgcattaaaattaaaaaaaaaatagtaagaggcatttatggkaacattagtgcagtgttgtttgaaaatggtggatcatatcatggtcctccataccataaaatagtggcagacataaaaatacactatccttgtacttgtggttttgcatgattttcagagatactgttgagggaaaataaaagaagatacagaaagcaaaaaaaaaaaaaaatacataggtttatttgtatagatatgtctccaaattaatttgaatgtgtaagcataataaaaatattaaaatatttataaaatatgctgccattataactggaatatacaatatcataaaaaattatttcaaacttgatgcaatattaatttgaatttagaatttctatgaaaactctttattctaattaaataaatttactcaaagctaataaggataaaagaatatttaaaaattagcatggacagcttgtgttggagccagggcctgataaggctggaagggaaagagaagtagagagaaaacccaaacaaaatgaccaaaaatgaaaataattgtcttactataaagtatatataaatatatactttatatatgtatactttatatatatactttatatatgtgtgtaagtgtagacaaatgaataaagtatctaaatagatgatatactcacatatatatccattatatacatattatggctttgttttgtaaaattatggaagtatgcctatatatcatgaaattatcaaataaacattaagataaaaagaaaaatttttcgagaagtaaaaagcctttttctggattttcaaatttaattaaagccattaagagaatactcttccaccttcgaaaataaaaccattattttggctttattattttttcttttattataaaaatgcatttaattagctaatagaaaatcaaaccctcaacctcttctagtttggacaaggtgatttcaacttttcagccttcacacagttctgcctccataattcctaaagagctttaactgcgttatttataggttgatacataacactgcacatattgatgatttggccagaaaatcattgcctagactatgaaataattagttaatgcagatctgaaggttgtccaaaagacatgcatgaatacaacacattcactggaattaaaaagcttactaaacacatgtataaatttatttacagtaaataatgactgctttaatgtgctagtaaaaattgtcaaatttttaaaaagtgtctggattcaatccagaaccaatagttatattttttcacttctaaagatgaatatttgacttgtattattaattaggttattgtgtctcctttctttctaccatcatgattgatatattggctcctttattaattaattctttcactgaannnnnnnnnnnnnnnnnnnnnnnnnnnnnnnnnnnnnnnnnnnnnnnnnnnnnnnnnnnnnnnnnnnnnnnnnnnnnnnnnnnnnnnnnnnnnnnnnnnntatttgtctaatgaatcagcatgtttttcaaggagaagagtaaagtatcagaattttgcttcaataaaatcaatgtaattatggatatatttatctgaacatgacggaatttttcaaaagacgaatttagaaaccagatgggtaggatattgggcagagaaaatggcaaacaggatagacgggctgatttgaggattggaataagaagattcagaaattacttcattgagaaatataatgaggaagagg

SEQ ID NO: 720751 - DNA, 2162 bp, Homo sapiens
taaaacagataggaacagttttggcaactgactggtgattagcccttctaaaaaatgttgagcaattttgataaataaatttttgacgaaataaaactgaattattaacaaatgatatctttctgataaatttattttttgtttaaaggcataaattaataattatttaaaattatttccactgagtatctttgatttaatttattctggcaaaataaatacatatgtaatgatttttgaacactaatcctcataatttactttatatagaaagtcagttataagatcttctgttgcagatcttaggaactatctagccaaactaaatcaaacttgtattattatttgaatctggacttttgtcaacaattgcaattttagtgcattttgtgttgctgtaataggatacctaaagctaggtaacttataaagaaaagaggtttatttggttcatggttctgcaggctgggatgtggttgtaaaagcatgatgtgggcatctgcttggcttcttgtgagggccatgtgctgggtaaaaatatattaaagaaggtcaaaggggaagmagatatgtgcaaaagtcaaaacctgaagggcatcctggcttcctaacaaccctctatgggaaccaatccatttccctgagaaatgaacccatgtcaccagaatgagaactcctggcttattactgcaagaagggcaccaagccattcaagagagatctgcccccataattcaaacaccttccattggcctcacctctcaacactgccacattggggatcaaatttcaaaacgagttttggtgaagacaaactcacactgtatccaaactattgtaattgctcatcacagaatgacagaatgtatgtggtttagtggtactctgctgtactaagaaggtaagtgtgtgtgcatgtgtgtgtgtgttttagcgacgggtctttgtcactatgctagaatgcagttgtgccgtcatagctcaatgcagctgtgaactcctggggtgaagggatcctctcggttcagcctcctgagtaactgcgacaataggtaaatgccaccacgaatgtgtgttattaaatatttaacagctaaaaattgaaatacgttttccctagtaatagttaaatttgtaaaaataaagcaaaacagcttattttgtttagttttaagctaaatacaaatctggcatttttgaaagaaataaagcatttgctggtagtgctattacccaaaagaattgatgcttgggatatcttgttatttagaataaaagctacacctagaaatataattcataagagctatatgataatatttggccaagcaaatagttcaaagatgcatgtttacattcatgtgaagaaaaataccaagaaagtagaaatgaagcatagcatggtcattaggggattggagttgcaaagggcaaaatatgtgaaccaggaaaaagtaagatgctttgaggaatgaggtgaatcatgcatcagtaagaagatatgaggccaattatttctgataagaagtagtagagcaaaaagtacactccaggcaaagagaatcagtcctcagaacggcctctctttcgttaaagtagttgtatgtgtcttggttatgcgttagcgtgccatttagcacgatatcctcttattattttgttgtaggatttaatgagaacttaccacctccttgttatgtatctattaattacatgtcacacatgcatcatcttatggcagaactgtggctagaaaagtctaaggcttattaaggtaactctgtagtttgaccagagagacctatcattaggaggtagaaatatattacttggttgtagattttcaaatactacacatttagttatgaagtaagtattctaccttcattccctaaatggaaggaagcagtggtttatataatggtgattatgtacaatattgaagttaatctaaaattgctgagtaagggaattggattcattttctggtggggtgattgtgggttttgatatgttttagtttgttggaagttcttggaaagtaggattttcagtaagcagaaaatttgtgcttctaagacagaaattcaatctacttgttttggagtcctgaatgcataaataacaataaaaaataatttttagctaactttttataaaca

SEQ ID NO: 720752 - DNA, 2162 bp, Homo sapiens
taaaacagataggaacagttttggcaactgactggtgattagcccttctaaaaaatgttgagcaattttgataaataaatttttgacgaaataaaactgaattattaacaaatgatatctttctgataaatttattttttgtttaaaggcataaattaataattatttaaaattatttccactgagtatctttgatttaatttattctggcaaaataaatacatatgtaatgatttttgaacactaatcctcataatttactttatatagaaagtcagttataagatcttctgttgcagatcttaggaactatctagccaaactaaatcaaacttgtattattatttgaatctggacttttgtcaacaattgcaattttagtgcattttgtgttgctgtaataggatacctaaagctaggtaacttataaagaaaagaggtttatttggttcatggttctgcaggctgggatgtggttgtaaaagcatgatgtgggcatctgcttggcttcttgtgagggccatgtgctgggtaaaaatatattaaagaaggtcaaaggggaagaagatatgtgcaaaagtcaaaacctgaagggcatcctggcttcctaacaaccctctatgggaaccaatccatttccctgagaaatgaacccatgtcaccagaatgagaactcctggcttattactgcaagaagggcaccaagccattcaagagagatctgcccccataattcaaacaccttccattggcctcacctctcaacactgccacattggggatcaaatttcaaaacgagttttggtgaagacaaactcacactgtatccaaactattgtaattgctcatcacagaatgacagaatgtatgtggtttagtggtactctgctgtactaagaaggtaagtgtgtgtgcatgtgtgtgtgtgttttagcgacgggtctttgtcactatgctagaatgcagttgtgccgtcatagctcaatgcagctgtgaactcctggggtgaagggatcctctcggttcagcctcctgagtaactgcgacaataggtaaatgccaccacgaatgtgtgttattaaatatttaacagctaaaaattgaaatacgttttccctagtaatagttaaatttgtaaaaataaagcaaaacagcttattttgtttagttttaagctaaatacaaatctggcatttttgaaagaaataaagcatttgctggtagtgctattacccaaaagaattgatgcttgggatatcttgttatttagaataaaagctacacctagaaatataattcataagagctatatgataatatttggccaagcaaatagttcaaagatgcatgtttacattcatgtgaagaaaaataccaagaaagtagaaatgaagcatagcatggtcattaggggattggagttgcaaagggcaaaatatgtgaaccaggaaaaagtaagatgctttgaggaatgaggtgaatcatgcatcagtaagaagatatgaggccaattatttctgataagaagtagtagagcaaaaagtacactccaggcaaagagaatcagtcctcagaacggcctctctttcgttaaagtagttgtatgtgtcttggttatgcgttagcgtgccatttagcacgatatcctcttattattttgttgtaggatttaatgagaacttaccacctccttgttatgtatctattaattacatgtcacacatgcatcatcttatggcagaactgtggctagaaaagtctaaggcttattaaggtaactctgtagtttgaccagagagacctatcattaggaggtagaaatatattacttggttgtagattttcaaatactacacatttagttatgaagtaagtattctaccttcattccctaaatggaaggaagcagtggtttatataatggtgattatgtacaatattgaagttaatctaaaattgctgagtaagggaattggattcattttctggtggggtgattgtgggttttgatatgttttagtttgttggaagttcttggaaagtaggattttcagtaagcagaaaatttgtgcttctaagacagaaattcaatctacttgttttggagtccygaatgcataaataacaataaaaaataatttttagctaactttttataaaca

SEQ ID NO: 720753 - DNA, 886 bp, Homo sapiens
  misc_feature 259, 260, 261, 262, 263, 264, 265, 266, 267, 268, 269, 270,271, 272, 273, 274, 275, 276, 277, 278, 279, 280, 281, 282,283, 284, 285, 286, 287, 288, 289, 290, 291, 292, 293, 294,295, 296, 297, 298, 299, 300, 301, 302, 303, 304, 305: n = A,T,C or G
  misc_feature 306, 307, 308, 309, 310, 311, 312, 313, 314, 315, 316, 317,318, 319, 320, 321, 322, 323, 324, 325, 326, 327, 328, 329,330, 331, 332, 333, 334, 335, 336, 337, 338, 339, 340, 341,342, 343, 344, 345, 346, 347, 348, 349, 350, 351, 352: n = A,T,C or G
  misc_feature 353, 354, 355, 356, 357, 358: n = A,T,C or G
taatttatataatgtaacatttatattaaaattacataataaaattattttaattatgtttttcaaattttgattacaaataatatatttgcttctgtaaccaaacatatttttcagatttatttttatatacatgcttatcagattggtttcttatgactaagaaaaataagaaatttggctagaattattaactttaaattaaaaataaaacatcacttacaaatagtttcaaaattcttttaaataatgttatttnnnnnnnnnnnnnnnnnnnnnnnnnnnnnnnnnnnnnnnnnnnnnnnnnnnnnnnnnnnnnnnnnnnnnnnnnnnnnnnnnnnnnnnnnnnnnnnnnnnnattgttgcttttaaaaaaattcatcaaattcctcctatgaagcaggtcttaggtgacgaaggaattgcacctacaagtctctcaggttcacatgcttgcctrtgttttctttatcttgctgtgtctcttaacaatattgaagacttacgtggttatctcctgtgaagtctagagaattattcccaatgtttaacccagtgtaagtactgcaatactaattttaatgcaatactgcttaagcctaaactcaaagaaatagtcgtgtttccttcatctggaaaaaaagtctcaggtgaatacatgttatttttaacccatatctgattctcattttggtgtgctataatatttattgattatattaatgcaaagcatagtcaatcactaaggttacctagatagaatggttttaagatctattagttctataaactttctcttgagagtgaagtagtaaatatttttgttttttcaggccatatgttaatagttacagtatattataactattaaactctgctgttatag

SEQ ID NO: 720754 - DNA, 2212 bp, Homo sapiens
gcctaacttgaatgcagtacttatccagatccttggggtatcactgactgcaatacacttttattgttggtttgctttatgagtgaaaaatgaaaatatcactgcagcaattcactgcaaactgcytttggcagtaaaactgctccatgtagttttgctttgttttccaacctggtgtgatagtaagcacagatttattaacaaaaaccagaataaaatctcagtccattgaaatgcaatcaatttgtttgttttgtagaacctcctttatttgaaaaccatgttaggaaaaatttctaagataattgtgtaatattgttatagatatcaagaaaatgccaattcattcttgtaatacaatctcactcttcctacaattactcagattggaagttgcatcccaaagttctttataaactgaaagaccttctaaaaatatataatgaattatgtttattattactattatgattatttactattattttccataacactaactttcctgaatatgcattttttttcacctaacaagaaaacttacttccatatatcttttgaatgtaggacaaaaattatttagagtctagaacataccaggaagcatatttgtggacttgcttatctcttgacacagtctgacacttattctttcaaatatttttagtcatttgtattttataatattttctgaagagaaaaaataacacaatttaagctgaaaatgttggcatttatactaagcagtggccatgctatgctaataggagaatatcatatctctatgtgtggaaatagagaaaagttctaacaagaaattttattgtgtacacttctatagtaccccacaataccttcagagcttaaagaagaaactttttcttaaagacaaaagaaaggataaatgcaaacaaagcaacatgcaagacatttaactaaaaggaaaaggccttaaaagtaaactcaggatcctacaatcattcttccagaaacatatttatttcagaaattcgtaccaaacatatttctagaagtttgtaacatttatttggatttttggtgttacaaacatttctagatttgggaaagacaaaaaataatttttgaaattatcaatgtaagcatttaaaaatgtcaaaaatatctagagcagtttactgataactgctcacttagttgccttaattggccaaagtaagttaaaaaaagaaaccctggttgcttacagttgcatacatctgtaatcccagcactttgggaggccaaagtgggcagatggcttgagtccaggcgttggagaccagcttgggtgacataattaaaccccatctctacaaataaatacaaaaattaaactagtatggtggtgcacacatgtagttccagtcactcaggaggctgaggtgggaggattgcttgaacccaggaggttgaggctgccgtaagataaaatcaggccactgcactccagcctgggcaatagagtgagactctgtctcaaaaaataaaaaataaaaataatgagaaaggaagagagagacaaaaacccttatagtaacatttggttttcatataaggctcatagaaaaacatatttccaagatatagtaccatgtaacaggtcatttccatgggctggaaattatctggtaagaaatttaaagatatggaataaaaatcagaacgacaacagcatgcacaatacaatactaagcagagtgaagtagttagcatattccatgttagctttttaccagaaaactcataacatgattcaaaggacattaactttttcaattcaggtgaaaaatatagatgttcaaaagattgatggatttgataaacaattagctaagtgactggctagaacttcataactttgagaatgcttttttctaacgaaatttaaagagaaaacataaaattacccctaaaaacatcaagctacaaatagctggtattagttcctcatgagagtcacaaagtttctggttaaaaaacaatatggattgattattaaccattctgctatttaaatatatatatatatatatatatatatatatatatatatataaattatttcagttgaacagaggtagccttgctcaattaccatttatgttaatattataatgttaagtataagtcaacccagattagatacttacttctaataatggtaaatttttaattatttatcatgcaaaag

SEQ ID NO: 720755 - DNA, 2212 bp, Homo sapiens
gcctaacttgaatgcagtacttatccagatccttggggtatcactgactgcaatacacttttattgttggtttgctttatgagtgaaaaatgaaaatatcactgcagcaattcactgcaaactgcctttggcagtaaaactgctccatgtagttttgctttgttttccaacctggtgtgatagtaagcacagatttattaacaaaaacsagaataaaatctcagtccattgaaatgcaatcaatttgtttgttttgtagaacctcctttatttgaaaaccatgttaggaaaaatttctaagataattgtgtaatattgttatagatatcaagaaaatgccaattcattcttgtaatacaatctcactcttcctacaattactcagattggaagttgcatcccaaagttctttataaactgaaagaccttctaaaaatatataatgaattatgtttattattactattatgattatttactattattttccataacactaactttcctgaatatgcattttttttcacctaacaagaaaacttacttccatatatcttttgaatgtaggacaaaaattatttagagtctagaacataccaggaagcatatttgtggacttgcttatctcttgacacagtctgacacttattctttcaaatatttttagtcatttgtattttataatattttctgaagagaaaaaataacacaatttaagctgaaaatgttggcatttatactaagcagtggccatgctatgctaataggagaatatcatatctctatgtgtggaaatagagaaaagttctaacaagaaattttattgtgtacacttctatagtaccccacaataccttcagagcttaaagaagaaactttttcttaaagacaaaagaaaggataaatgcaaacaaagcaacatgcaagacatttaactaaaaggaaaaggccttaaaagtaaactcaggatcctacaatcattcttccagaaacatatttatttcagaaattcgtaccaaacatatttctagaagtttgtaacatttatttggatttttggtgttacaaacatttctagatttgggaaagacaaaaaataatttttgaaattatcaatgtaagcatttaaaaatgtcaaaaatatctagagcagtttactgataactgctcacttagttgccttaattggccaaagtaagttaaaaaaagaaaccctggttgcttacagttgcatacatctgtaatcccagcactttgggaggccaaagtgggcagatggcttgagtccaggcgttggagaccagcttgggtgacataattaaaccccatctctacaaataaatacaaaaattaaactagtatggtggtgcacacatgtagttccagtcactcaggaggctgaggtgggaggattgcttgaacccaggaggttgaggctgccgtaagataaaatcaggccactgcactccagcctgggcaatagagtgagactctgtctcaaaaaataaaaaataaaaataatgagaaaggaagagagagacaaaaacccttatagtaacatttggttttcatataaggctcatagaaaaacatatttccaagatatagtaccatgtaacaggtcatttccatgggctggaaattatctggtaagaaatttaaagatatggaataaaaatcagaacgacaacagcatgcacaatacaatactaagcagagtgaagtagttagcatattccatgttagctttttaccagaaaactcataacatgattcaaaggacattaactttttcaattcaggtgaaaaatatagatgttcaaaagattgatggatttgataaacaattagctaagtgactggctagaacttcataactttgagaatgcttttttctaacgaaatttaaagagaaaacataaaattacccctaaaaacatcaagctacaaatagctggtattagttcctcatgagagtcacaaagtttctggttaaaaaacaatatggattgattattaaccattctgctatttaaatatatatatatatatatatatatatatatatatatatataaattatttcagttgaacagaggtagccttgctcaattaccatttatgttaatattataatgttaagtataagtcaacccagattagatacttacttctaataatggtaaatttttaattatttatcatgcaaaag

SEQ ID NO: 720756 - DNA, 613 bp, Homo sapiens
tgttgtgtgatgatgaaatctgggcttttagtgtatacatcacccgaataaggtatgtacatagtaccattcagagatttcccatcatctaccttctttccaccctcccacccctcctcgtctccaatgtctatcattccacactccatgtccacgtgcacacattagctcccacttgtgagaaccaagctagccttctaaacctctccaggatctttctctggtgacaacaaagaaatgaagcaagagagtgatcggagatgagggcaggggctgcagacttggccaaggcgtagcgcatagcaaaggcccaaagaactgagtacccttccagtttaattggtccttcagaagaatggagagaatagtacattgggggactaagtgggaagagatgagaattgtattaaaagcaatacaaatgtttctttttaaggaatggaaagagattcttgagaaaggcgacccacacacgcrcacaagaaaacatcagcactcatgcaggaacaacgagaggccatagggaagtatttttagcaagtggaagtcaatcacagcagggagagaagaggggtgggtaaagaaggggcctggagcctcgcaagtaagccca

SEQ ID NO: 720757 - DNA, 1140 bp, Homo sapiens
ctgtgcatgagaatgtgccttctgtgctctagtggagaaggttaggaactgggggactctgtgtcctatctaatcatcattaatgggatgaaaggaagcctagtaaggtccagcagtagaggctgtagctgttggagcagggaggaggaagaaggggaacaactgtgaaaacctctccaattcccctaacgccccctccagactctctttgatcacttgcagtggtgggaaatgaagcaacctgttccatggtccattctgtsgaaaagttttcccttttgttaaacaaacttggctgaagacttttagaaagctgtcctctagggccgggtgtagcggctcatgcctgtaatcccagaactttgggaggctgaggcaggcagatcacctgaggtcaggagttcaagaccatcctggccaacatggtgaaaccccatctctactaaaaaatacaaaaatttgccaggtgtggtgatgcgtgcctgtaatctcagctactcaggaggctgaagcaggagaatcacttgaacccgggaggtggaggttgcagtgagccgagattgcgccattgtactccagcctgggcaacatgagtgaaactccatctcaaaaaaaaagaaaaagaaaagaaaagaaagctgtcctctagaacaacagagcaatttgactctcttttctatataacaattcctcaagtatttcaagagagttgtcacgaccatcctgtactcatttttctttcttaaatgattctagttgtccagctgtttctcactctcatgtcacaccattctggatacactccagcctcttggtatctctttcagaacgtggtgtcctgagctgaacaatattccagatggcttctgatgggtatagaatatagtagtacagtttctttcctgaatctgcagcttaagttcaaattcacgtgttttacagcctcatcactttgtcagttcttactgttcctttgggcaatgaaacgccttggtgttctgtatacaatgaactcttgtctggccacatttaataattataaagttattgagcgtgtcctgtgcccatgagccaggcgctgtgctaaacatggtgccatcagtcccttttaattctcccacctacactgaggctgagtga

SEQ ID NO: 720758 - DNA, 589 bp, Homo sapiens
tattcattagaagcaagtcagtaggtctagctcacactcgagaggattactcaaggggttgaacacatggagttagggatcattggaagctatttttaaaagttgcttgtcacactgtttgttggcttcataatttgtgaaatgatactttcatgttttatgcaatttttgttggtgtttcacttcataataaaggaaacctgggggataggcagctatagaaactctaatggcatgtttcttgtgaacatatccttctccttccttgtctgcaaataataaacatggcatttggccactaaaaatcatttgctgataatgagctaaatttttgcacccttgagaacagataacttttattgaaccaatcacaaaacaattctaggaatcataaaattttaaaggcgaggatgtagaaaaatgcttgactaataaaattctccacaaaaggagaataaatgtgtgttaaatattagagkgggggaagttccaaataagaaaatacagactgaacacgaacaatgatttaagatgggtagaattgggatagcactttggggatgtatccctacagaatgacttaagtcct

SEQ ID NO: 720759 - DNA, 1469 bp, Homo sapiens
tgtgagatgatgtatgtaaattatttagcacagtaccatagaaaataaagatataaataatagaacatagagaaataacaatgttacccttatcatcaccatgactaatagtctggttttactaagctggaatgccatatatgggcacatattataatatttaaaggaagaccccaagctgtccatcttctttgcatgagattgtctttgtttctcagtacatatccaccctcagctacacagttttcacagaatacacatagctactttaaccaagactttccaatatcaccacaatatctgccccgaaagcatcctttcctggtattagagagtagcttcagttcctccctttcttcctaataaggaccaccatttcccaccacacaatgtttaaaatttcttttacaataaaagcccactttgaacactattaacaagtggtgttaattaaataattttaatttgttgctttctttcaagccagtctgaaataaacctggtatccctacaaatcttccattgccttgctcataatggttagtataataaatattttgctttcatgaccattggcccaactaacaagtcttcagttttactttgtctcttctagtaccttctcttggatgtaattgttaacaagcagtgaaatgaccaaagatgagattcagaaatgtgaggccagtggcgtggataagccatattacaggagagaaatccctgagtaattcacaactgggcttgtttccaaaaaaaaattgagcctctattttatttcttgactctccattaggatggatttctacttcaggaaaaataattcaaattttaagaataaagttatagcacattttttcttcggacccaatattagacctaagggataaattctttgttccactgtgaacaacacagcaccatccacactcacatatcattgattgtggactgtacactttgctagtctgatgtcagcagtcagagatggaggcctaattggaaaaaaaaaaaaacacgaaaaataagaagcawctgataatttttatgggattaaattgtcattcagttgctaccaaaataaataaaaataatatttttaaaaaaactacctactgagattttagttaaaaagaaagacagagaaagagttaaaatggcagtctgctattttttcctataaagttataaggcttaattcaaaaattttctgaaatttatagtgccagaggctaagctaaaaataatttcccctcattagatcttgcagtttaacctctgaagtggaaggtctgtgacagatacatcaagactccaactcacaaaagcaccattcaaaaaggaaaagaataaagaggagctgttgctattaaatgacccatagagaatcaaagagacaaagaagactatttctgtagctttctgggactaagcatagtgttgctgggccattccaggtggatcactcc

SEQ ID NO: 720760 - DNA, 1469 bp, Homo sapiens
tgtgagatgatgtatgtaaattatttagcacagtaccatagaaaataaagatataaataatagaacatagagaaataacaatgttacccttatcatcaccatgactaatagtctggttttactaagctggaatgccatatatgggcacatattataatatttaaaggaagaccccaagctgtccatcttctttgcatgagattgtctttgtttctcagtacatatccaccctcagctacacagttttcacagaatacacatagctactttaaccaagactttccaatatcaccacaatatctgccccgaaagcatcctttcctggtattagagagtagcttcagttcctccctttcttcctaataaggaccaccatttcccaccacacaatgtttaaaatttcttttacaataaaagcccactttgaacactattaacaagtggtgttaattaaataattttaatttgttgctttctttcaagccagtctgaaataaacctggtatccctacaaatcttccattgccttgctcataatggttagtataataaatattttgctttcatgaccattggcccaactaacaagtcttcagttttactttgtctcttctagtaccttctcttggatgtaattgttaacaagcagtgaaatgaccaaagatgagattcagaaatgtgaggccagtggcgtggataagccatattacaggagagaaatccctgagtaattcacaactgggcttgtttccaaaaaaaaattgagcctctattttatttcttgactctccattaggatggatttctacttcaggaaaaataattcaaattttaagaataaagttatagcacattttttcttcggacccaatattagacctaagggataaattctttgttccactgtgaacaacacagcaccatccacactcacatatcattgattgtggactgtacactttgctagtctgatgtcagcagtcagagatggaggcctaattggaaaaaaaaaaaaacacgaaaaataagaagcatctgataatttttatgggattaaattgtcattcagttgctaccaaaataaataaaaataatatttttaaaaaaactacctactgagattttagttaaaaagaaagacagagaaagagttaaaatggcagtctgctattttttcctataaagttataaggcttaattcaaaaattttctgaaatttatagtgccagaggctaagctaaaaataatttcccctcattagatcttgcagtttaacctctgaagtggaaggtctgtgacagatacatcaagactccaactcacaaaagcaccattcaaaaaggaaaagaataaagaggagctgttgctattaaatgacccatagagaatcaaagrgacaaagaagactatttctgtagctttctgggactaagcatagtgttgctgggccattccaggtggatcactcc

SEQ ID NO: 720761 - DNA, 579 bp, Homo sapiens
caggtcaaattcaattaatcttcattgtgtcttcatagaagagctgtttgtaattcagcagaaaacaaaacaaaggtataatgaaagtggtcagcttttttggctttatttttcaattacaaaacttgaggataaggcttcaagagtattctagttacaatccaaagtattgacttgtgctatgaaatattatcacatgcagaaataaattataaggagggaaagtcttgtttgtatcctaaccagtccctctgaattttattatatctgtttttatggtatcaaaaatyagatgtccacagtacgttttcagaaatccctgcttcttgcactcttgtcagtaggattctctgccatcatcaacctaagttccaatctcagctccacaagctgtgtgaccttgggtcaatttcataatctcagcttctgtgcttatgaaacaagataactgtaaagtatggattatatgggatcatatctgtgagggtaaaaagccctgcagggtgctcagcacacagcaagcacttaatatatagcagttctcatgacaatttctaatattcctgtagcctcttctca

SEQ ID NO: 720762 - DNA, 1573 bp, Homo sapiens
taatgttcagttgtccactgaggtctcctcatacctttctaagccctcttttttgaggatcttgtctttacaattgtcttttattattttctctcatttggttctaacctgatttctctgccttgtgtcttttttactctcatctcatgcttccattatccagcagcctggaaaacttctgcatacatgtctaaagtaagagtgattaccgcctctccaacacccccccacacacacactccactatcccatgctcacactcacacaagcagctcctcactaaaggcttcctaatcctggatcctgcaccacaatatctcaaggaacagtcttcaaggtggctttgacccaccaactccttcattcctcaaagccaacccattaagcactgtggatgcctcctttygtgatacctttcaaagataatttccatgccatttgaaaagttgtttaaaaataatttcagtcttacagaaaagttcaaaactagtacagaagattcccatgcattcatcacccagcttcccttaatattaacaccatacacaaccattgtaccattatcacaactgagaaggtaatctaagtataataccatgaactaaacaacagactttattcatatttcatcagttttcccagtaatatctgttttttcagctccaggatcccaaagtacatttagctattatatctccttgcctccagcctgaaacaatgatcatgttcgtcttaattacttggataatatgtcttctgggttcctctgctctcaagttaatactttctcctttgtaattaataagtgtcttaaggaagatactttgagattctacagatatgccattgtatcgttttgttgcccactaattttagcatccatcagtggatcttgcctgtcttaattattactgtgatgttctaacagtgattttctatttccctcattctccttacatttattaattccttcaacttcatttgaatttaaagttgttactgtaaaaatagtcatgaatagttttttttgagtgcttacttggtgccaggtattggacaaaacacttgaacactcacggtgtcatttgatgcccatggtaaccctttgaattagatacagttatgtccattttacagattagcaaatggaggcccagagaggccaaataatttgaccatggtcaacagaatggagtcagcatcccacccatgtttgtctgatgctaaaacctgttctcttactccctacaaaatgctgcctcgctttggttaaagcacttgttttgttagaagttctgtgagaaatctcgctgccaccagaaactcaccctcaaaatgcttcccagagtctaactcatttccctaagccttaacattctgtcttgttatttttcccaaaacattgcaatatttctcactgaggacaggatgatgtcagaagttcttaacccacactgaagacatctattataatatctgactctaaactgaccttccatggcttccctatattagttctccactctagtcaaattttctatttacaatggcctgttaattaattgtgttttct

SEQ ID NO: 720763 - DNA, 1573 bp, Homo sapiens
taatgttcagttgtccactgaggtctcctcatacctttctaagccctcttttttgaggatcttgtctttacaattgtcttttattattttctctcatttggttctaacctgatttctctgccttgtgtcttttttactctcatctcatgcttccattatccagcagcctggaaaacttctgcatacatgtctaaagtaagagtgattaccgcctctccaacacccccccacacacacactccactatcccatgctcacactcacacaagcagctcctcactaaaggcttcctaatcctggatcctgcaccacaatatctcaaggaacagtcttcaaggtggctttgacccaccaactccttcattcctcaaagccaacccattaagcactgtggatgcctcctttcgtgatacctttcaaagataatttccatgccatttgaaaagttgtttaaaaataatttcagtcttacagaaaagttcaaaactagtacagaagattcccatgcattcatcacccagcttcccttaatattaacaccatacacaaccattgtaccattatcacaactgagaaggtaatctaagtataataccatgaactaaacaacagactttatwcatatttcatcagttttcccagtaatatctgttttttcagctccaggatcccaaagtacatttagctattatatctccttgcctccagcctgaaacaatgatcatgttcgtcttaattacttggataatatgtcttctgggttcctctgctctcaagttaatactttctcctttgtaattaataagtgtcttaaggaagatactttgagattctacagatatgccattgtatcgttttgttgcccactaattttagcatccatcagtggatcttgcctgtcttaattattactgtgatgttctaacagtgattttctatttccctcattctccttacatttattaattccttcaacttcatttgaatttaaagttgttactgtaaaaatagtcatgaatagttttttttgagtgcttacttggtgccaggtattggacaaaacacttgaacactcacggtgtcatttgatgcccatggtaaccctttgaattagatacagttatgtccattttacagattagcaaatggaggcccagagaggccaaataatttgaccatggtcaacagaatggagtcagcatcccacccatgtttgtctgatgctaaaacctgttctcttactccctacaaaatgctgcctcgctttggttaaagcacttgttttgttagaagttctgtgagaaatctcgctgccaccagaaactcaccctcaaaatgcttcccagagtctaactcatttccctaagccttaacattctgtcttgttatttttcccaaaacattgcaatatttctcactgaggacaggatgatgtcagaagttcttaacccacactgaagacatctattataatatctgactctaaactgaccttccatggcttccctatattagttctccactctagtcaaattttctatttacaatggcctgttaattaattgtgttttct

SEQ ID NO: 720764 - DNA, 861 bp, Homo sapiens
aagatgaaaatagttactatctggccctttatcagaaacatttgttgactctgtgctagatcatgatcaaaacagacacaacctctacccttaagaagttataatctcatgagagagacagacattaattcaatattcaacatattgttaaaagctataatacatgctcattacttgccactggtttttgaaatttaatcatctgggccttattcttttacattaaaaagttcttgcctgggataacaaaaacttcattcatttatttatactcmttcattcattcaattcagcaagtaaacactgagtatctaccatatgttggacattattatattaggatctgagaatatacaagtgcacaaaagttgatagtctctcatttgttgacccttcggccttattttccaactgctttagaaccgaagaaatgaagaagtctatgtattgggcctcctcagcctcccaatagagtttattgtaaagtctgcctcttttttactcttgtagtctctgaaatggtctagtgttcttatagtgtattccttttttaaaatggaaacgagtttgagcgggtttctgtcacccagaactcccccaaacttggaattttgagatgaaatcagctaagtgagcatcggctttccagacttcaagatgaaaggaagcgatgacaaaggggttgggaaagagaaagagaacaaagattggtgaactatgctgtccattttagcatggctcatgagctaagaatgattttactttttttaatggatggaaaaaaacaaaagaataagagtaattagtgacatgtgaaaattatatgaaattcaaattccagtgtccataaataagatgtta

SEQ ID NO: 720765 - DNA, 1876 bp, Homo sapiens
tcactgtgcttgagaatcacctggggaaacttcacaaacaaaagatgcccaaggctcctcccacatatttcagttataatgagctacagtgagactctggcaacagtatgttgtgaaagctcccattatgattttaatatgcagctaaagactgagtactgttaacacaaagcattacagctgtygaaaaatcttgggtgtttgttcttaaaatgtgggccccagacccacaacatgagtaattgcagggaaactggtcagaaatgtaaattcctgggccctgccccaggcctactgaatcagaaactggggtggggcaaaaaaaaaaaaaaagtgtttgaacactttccagatgattccaatgtgcaatcaagtttgagacccaccaatctagggcagctgttccacacagagatgcacattcgaatcagctggagtgtttcaaacacacagctgtcctcgcctcactctagttcctgaagcaattggtctgcagtggagtcctgacttggatattattgaaaacatccacagatagctcagatgtggccccagaccaagaaccactgatggagggtgttgcccagcaaaattatccccttctcttctcattcatttattcatttgttccacacatttcacagagcaactacccagtcctctgcatgaaagagccctccctcaagagcttggaagcaacacaaaatggggagtagaccaggtctactatcagcacagagataagagactctgaacagagaagacggatccaagggggacagcctggagtcgggggacccagctggaggccagcacagttgcctgggcgagaggtgagccctccctcctggagaggtgagcccttcagaggaagagatgagaaacggaaacccctgactcattaccatcggccttggcttgctgttccattggcagccctttctacctgtgatcaacacatgcctatctagcagcatactaactctgtctctcattctagagcacgcatccgcccagagttaataagttttagaatgtcggcgtcctgtcattgcatcatccacagattcagtgaccagagaggaagaaacacagggaagctttatattaataaaggtcttgcgttgaatattcctaagcaactgtcaaaagtaagcagttcgtatgcttcttttctggtgacaataatagactgggccccatcccttcccagagctcccgataagcaactggatccagtctccactccagaacctgaatggactttttgctcaatacagctactgctggccagtcagcttcatgggacatgtgccaagaggtcttccattccatcttgagtaaacaaattagagtcctagcaaaaactcttcccatgagccctttaactgacctaaattcaacatatgtcataatctaggaggaagcaccaaaatggaaaactactttaattcacagaagctaaaggagcaattgtaatgtaagtggtttctacaaagtatatatgcaggatcagcaagcatgggaaacgcacaccagcccctgcagggattctgggctacgagtgcatgaaggcagagtcgagactgtggattctggaagaagaatccccttgagagagcatctgattcaaaattcatccatatatgacttaaaagccacccaggttgtcatatcatctgtaatgattattcactagagccaagagtgtttatattctgaagatcagaacaagattcccaacaaaacagtaagggagcatttcagggagcagtgggaatatgtgtgggatgaagccaaattataaagtcattattagggtgggtatggtggctcacacctgtaatcccaacactttggaaggccaaggcaagaa

SEQ ID NO: 720766 - DNA, 1876 bp, Homo sapiens
tcactgtgcttgagaatcacctggggaaacttcacaaacaaaagatgcccaaggctcctcccacatatttcagttataatgagctacagtgagactctggcaacagtatgttgtgaaagctcccattatgattttaatatgcagctaaagactgagtactgttaacacaaagcattacagctgttgaaaaatcttgggtgtttgttcttaaaatgtgggccccagacccacaacatgagtaattgcagggaaactggtcagaaatgtaaattcctgggccctgccccaggcctactgaatcagaaactggggtggggcaaaaaaaaaaaaaaagtgtttgaacactttccagatgattccaatgtgcaatcaagtttgagmcccaccaatctagggcagctgttccacacagagatgcacattcgaatcagctggagtgtttcaaacacacagctgtcctcgcctcactctagttcctgaagcaattggtctgcagtggagtcctgacttggatattattgaaaacatccacagatagctcagatgtggccccagaccaagaaccactgatggagggtgttgcccagcaaaattatccccttctcttctcattcatttattcatttgttccacacatttcacagagcaactacccagtcctctgcatgaaagagccctccctcaagagcttggaagcaacacaaaatggggagtagaccaggtctactatcagcacagagataagagactctgaacagagaagacggatccaagggggacagcctggagtcgggggacccagctggaggccagcacagttgcctgggcgagaggtgagccctccctcctggagaggtgagcccttcagaggaagagatgagaaacggaaacccctgactcattaccatcggccttggcttgctgttccattggcagccctttctacctgtgatcaacacatgcctatctagcagcatactaactctgtctctcattctagagcacgcatccgcccagagttaataagttttagaatgtcggcgtcctgtcattgcatcatccacagattcagtgaccagagaggaagaaacacagggaagctttatattaataaaggtcttgcgttgaatattcctaagcaactgtcaaaagtaagcagttcgtatgcttcttttctggtgacaataatagactgggccccatcccttcccagagctcccgataagcaactggatccagtctccactccagaacctgaatggactttttgctcaatacagctactgctggccagtcagcttcatgggacatgtgccaagaggtcttccattccatcttgagtaaacaaattagagtcctagcaaaaactcttcccatgagccctttaactgacctaaattcaacatatgtcataatctaggaggaagcaccaaaatggaaaactactttaattcacagaagctaaaggagcaattgtaatgtaagtggtttctacaaagtatatatgcaggatcagcaagcatgggaaacgcacaccagcccctgcagggattctgggctacgagtgcatgaaggcagagtcgagactgtggattctggaagaagaatccccttgagagagcatctgattcaaaattcatccatatatgacttaaaagccacccaggttgtcatatcatctgtaatgattattcactagagccaagagtgtttatattctgaagatcagaacaagattcccaacaaaacagtaagggagcatttcagggagcagtgggaatatgtgtgggatgaagccaaattataaagtcattattagggtgggtatggtggctcacacctgtaatcccaacactttggaaggccaaggcaagaa

SEQ ID NO: 720767 - DNA, 1876 bp, Homo sapiens
tcactgtgcttgagaatcacctggggaaacttcacaaacaaaagatgcccaaggctcctcccacatatttcagttataatgagctacagtgagactctggcaacagtatgttgtgaaagctcccattatgattttaatatgcagctaaagactgagtactgttaacacaaagcattacagctgttgaaaaatcttgggtgtttgttcttaaaatgtgggccccagacccacaacatgagtaattgcagggaaactggtcagaaatgtaaattcctgggccctgccccaggcctactgaatcagaaactggggtggggcaaaaaaaaaaaaaaagtgtttgaacactttccagatgattccaatgtgcaatcaagtttgagacccaccaatctagggcagctgttccacacagagatgcacattcgaatcagctggagtgtttcaaacacacagctgtcctcgcctcactctagttcctgaagcaattggtctgcagtggagtcctgacttggatattattgaaaacatccacagatagctcagatgtggccccagaccaagaaccactgatggagggtgttgcccagcaaaattatccccttctcttctcattcatttattcatttgttccacacatttcacagagcaactacccagtcctctgcatgaaagagccctccctcaagagcttggaagcaacacaaaatggggagtagaccaggtctactatcagcacagagataagagactctgaacagagaagacggatccaagggggacagccyggagtcgggggacccagctggaggccagcacagttgcctgggcgagaggtgagccctccctcctggagaggtgagcccttcagaggaagagatgagaaacggaaacccctgactcattaccatcggccttggcttgctgttccattggcagccctttctacctgtgatcaacacatgcctatctagcagcatactaactctgtctctcattctagagcacgcatccgcccagagttaataagttttagaatgtcggcgtcctgtcattgcatcatccacagattcagtgaccagagaggaagaaacacagggaagctttatattaataaaggtcttgcgttgaatattcctaagcaactgtcaaaagtaagcagttcgtatgcttcttttctggtgacaataatagactgggccccatcccttcccagagctcccgataagcaactggatccagtctccactccagaacctgaatggactttttgctcaatacagctactgctggccagtcagcttcatgggacatgtgccaagaggtcttccattccatcttgagtaaacaaattagagtcctagcaaaaactcttcccatgagccctttaactgacctaaattcaacatatgtcataatctaggaggaagcaccaaaatggaaaactactttaattcacagaagctaaaggagcaattgtaatgtaagtggtttctacaaagtatatatgcaggatcagcaagcatgggaaacgcacaccagcccctgcagggattctgggctacgagtgcatgaaggcagagtcgagactgtggattctggaagaagaatccccttgagagagcatctgattcaaaattcatccatatatgacttaaaagccacccaggttgtcatatcatctgtaatgattattcactagagccaagagtgtttatattctgaagatcagaacaagattcccaacaaaacagtaagggagcatttcagggagcagtgggaatatgtgtgggatgaagccaaattataaagtcattattagggtgggtatggtggctcacacctgtaatcccaacactttggaaggccaaggcaagaa

SEQ ID NO: 720768 - DNA, 2353 bp, Homo sapiens
ttgcacaagcagcatgcagaggcctgaacctagcccatgacaggttcttctcccatctcatcagagggcctctgagcaccgtccctgagaacacagggagaggagcacgcagccatgcaaatttaaatttaattccattcagccagcattggtgggccagttgggtgctaagagatgttcagtatcaaaaagagtatcacagacaagagatgttaatgaaccactttgggcttggggaacaaagagataggtagcctgtgatttgaacccagaacattagagggaaccagtactgagagcactgactatagaaatcggctcagaaagcacagccagatgcaccagatacagcatacaaagttcagagatggtctgcgtgcatgtgcaggatgcaatgtttgcctagtggaatagtggtctcccagtggctgggtatggccgatgacaaaggacccagagcaggagatgtttggcaaacaagagccctggaggttatcattmactctttcaacaaatacatatattgagcatctactgtgttatagacattgtgcttaatgctggggatataagtgatcagcatggtggacactgctatctaggaacttagttcacagggaatagtaagccagcgaaggatctgaatttgtgggccagattctagtctcctcagcaagtaaaccagaggccagccttcatgttggagttccccattctagatggtgacaggttacaaataaagaactaaaaaacaggaaaatcagtctgctagataactagtaggctttcaaagtaggtttctcagagctatcaaatgcccctgcattggcaaagaacagagagaagaaagaggagggcttcatttggaccaatatatctatatactttcatctggcttccttgtaaataaacgtactttgtcctggttgaagaatacatttcctaatggagtgattaaaatatcaaagtaataccatgctccaagtttgtcatttaataaatggcaaataaatgaagcttatttatttatttaataaaacaaataattcttatgtatttattttaaaattaataagtggcaaataaataaattttatttcccttttagtaattttaaaaatacataaattgtatatattctataaatatttatcaagcatttacgatgtactaggaactgtgccagatcctctagatgccaagattaaaataacaaaagtcctgccctcaaagaacttgtagtcaattggagaagacagacaagtaactagctattatagctatgccttagctgccttttctacctccatccctatcctactgggattcgagtagatccaaggtagatttaggtgctagaggtgagagttcaggctagactaggaaatcacaatgaaggtggactgaagcagaaagatccacttcagagtgaaattgagttaaatgcatcaagtgattcaaaggctaaattgaacactaaggtgaagaaacaagcccaaagtctgcaatactgggtagatctagaagaaagtgagatgaaaattgcagaaggaaactgtgtgtgatagagacagagaagaaggttgatcaaaaactgaaaatatagcttattgatctctagctttatagggttgggaggctaggcaagtttagaaaagtcaatacagggtaaaataaagacaaatgtataaagctctgggaacataaaggaagaggacagacctcatttgtgatgcagcagagatggtgagagtgggcttgtggaggtcttcacagatgaagcaatgatgatttgattctctaagcctgagcaggagttagccagacaggggaagaaaagggcattccaggcagaggcaaccccctataaaatcacggcagcttcagaaaccttgtcacagttggcttgatggctgggcttcttaggagcagctggagatgaagctaaactgaaggcaggagtcagattgttaatttcattttaactctttaatgaactagtttagggagaaaattttcatatttatataatttggatagttaacctataaatcacaaacttttagattcagggatagtatagaaagtatccaataaaaatgtttttattcactcccttaaaaataagtttctatttagtccaccataagccaactagaataatctgtgacttgctaacagttgaatttcgcatcctttcttaggaaaacattaaatctgcttagttcagttaaaaaagtgaacatagccattttcatgcctcctgatgaaattatggccccttatatgatcccaatacttaatcactgttaaatataaatttaactgctgagggtttaagttgcaaggcttg

SEQ ID NO: 720769 - DNA, 632 bp, Homo sapiens
tgttcttgcaagcagtactgtaaatatacttactatcagtaataattatatatttactgcaagtacatctatgaagtaataattacttgaacctcatctggatactttgtctattaatatacatttcttctgcaatacttacattctccattttatcatgaagagactggttaaaaaaagactatgaaaatgaagaaatagtatccaaatgatggcaaatgactagatttggccctgaatgctgttcttggttaccaacttgtcttaatccccaatggctcttggcttaattaaatatatctttagccaatttggaggtctaaaacttcaatctatagctttgtttgcctataattcagaagaataaactgatagcttgatttaattatgcatacacacaaatacacacatagccatgtattttmaaagagcttcagatcagtgaaccaataatctctgaggtacatggttgtattagaggagaaacattaagcatctctgaaaacagtatttagacgtttcagaaaattttgttggaatataaaagaaataatatgagtaaaatctatcatcaagagatgatctaaaagttcaatgtaaaattctttgtaattctctgggacaaacactca

SEQ ID NO: 720770 - DNA, 632 bp, Homo sapiens
tgttcttgcaagcagtactgtaaatatacttactatcagtaataattatatatttactgcaagtacatctatgaagtaataattacttgaacctcatctggatactttgtctattaatatacatttcttctgcaatacttacattctccattttatcatgaagagactggttaaaaaaagactatgaaaatgaagaaatagtatccaaatgatggcaaatgactagatttggccctgaatgctgttcttggttaccaacttgtcttaatccccaatggctcttggcttaattaaatatatctttagccaatttggaggtctaaaacttcaatctatagctttgtttgcctataattcagaagaataaactgatagcttgatttaattatgcatacacacaaatacacacatagccatgtattttaaaagagcttcagatcagtgaaccaataatctctgaggtacatggttgtattagaggagaaacattaagcatctctgaaaacagtatttagacgtttcagaaaattttgktggaatataaaagaaataatatgagtaaaatctatcatcaagagatgatctaaaagttcaatgtaaaattctttgtaattctctgggacaaacactca

SEQ ID NO: 720771 - DNA, 856 bp, Homo sapiens
  misc_feature 663: n = A,T,C or G
tgaaaagtcagctctagatacttaggtttggaaatctactaaacattgaatatatacaaaataatatttctaacatatatgaaaggtataaagattaatgaacaaaatacttaactagcttgcctggtttaagaaggagacaactatgagtkaccttgaggctacctatgtgcttcttgaggagaggcctccttccgtctccccacactaaactctcttgaattctctccctctcccttacttttcttcatattttattacgtatgaatgtatttctgaataacatgtaattttgcatccttttgggctttatataaacaaaattgtatacaaatgctgcaggattttttgctccttagttcagctaatctggattcttgtctcacaaccaggaagaattaggcacacagacacattgaagggtgaggaggatggaatgtatttaagtgaaaggaaagctctcagcaaagagagggggtcctgtcagcaggtttccacctcataaaatgaataccagggcccctacacacgagttgaagaggactctcctcccctgcataaggcgtgaattcctggtggctccaccccattcttccagtgcatgtgggcctccatgcatgtgggcctccagtccactgcaggcatgcctaggcaaaccccctngtgcaggttcccatattcggacaaaacatttggtgtaaataaacacttgtggggttgatcagagattctctgggggcccttccctatctgcctaggcatttggctgtctcccacctctatcacaaataactgttctaatttgagactcatccatgttgattcatgcagctctaattaacttatttttactttc

SEQ ID NO: 720772 - DNA, 568 bp, Homo sapiens
caataatcaatttctgcttccctctcattggccagaaytgcattgaacagccatccaaatggaaaggtaccttggaactgctatgttttagttgggcacatttctaccctgaaaagaacagacttccatcataaagaaggggagattgttaaggagtgggtaagaaaaaatagatgtgtgtgtatgtttgagtgtgtaggggatatctacaaggaggaataagaaaccagtggtctgagttttctcttaggaggaaaactggggtttactaattaaagatgtactttttactgtataaacttataactttggatatttttattaacatagatgtacatattttgggagtacatgtgatattttggagcatgtgtataatgtataataatcaaatcagagtaattgggatatccattgcctcagacatttatcttttctttgtgttgaaaacattttctagctactttgaaacatgtaagaaaatattgttaactataatttccctactgtgttatcaaatactggaacttatttcttctatttaactttatttttttacccattaact

SEQ ID NO: 720773 - DNA, 568 bp, Homo sapiens
caataatcaatttctgcttccctctcattggccagaattgcattgaacagccatccaaatggaaaggtaccttggaactgctatgttttagttgggcacatttctaccctgaaaagaacagacttccatcataaagaaggggagattgttaaggagtgggtaagaaaaaatagatgtgtgtgtatgtttgagtgtgtaggggatatctacaaggaggaataagaaaccagtggtctgagttttctcttaggaggaaaactggggtttactaattaaagatgtactttttactgtataaacttataactttggatatttttattaacatagatgtacatattttgggagtacatgtgatattttggagcatgtgtataatgtataataatcaaatcagagtaattgggatatccattgcctcagacatttatcttttctttgtgttgaaaacattttctagctactttgaaacatgtaagaaaatattgttarctataatttccctactgtgttatcaaatactggaacttatttcttctatttaactttatttttttacccattaact

SEQ ID NO: 720774 - DNA, 1740 bp, Homo sapiens
  misc_feature 646, 847, 848, 849, 850, 851, 852, 853, 854, 855, 856, 857,858, 859, 860, 861, 862, 863, 864, 865, 866, 867, 868, 869,870, 871, 872, 873, 874, 875, 876, 877, 878, 879, 880, 881,882, 883, 884, 885, 886, 887, 888, 889, 890, 891, 892: n = A,T,C or G
  misc_feature 893, 894, 895, 896, 897, 898, 899, 900, 901, 902, 903, 904,905, 906, 907, 908, 909, 910, 911, 912, 913, 914, 915, 916,917, 918, 919, 920, 921, 922, 923, 924, 925, 926, 927, 928,929, 930, 931, 932, 933, 934, 935, 936, 937, 938, 939: n = A,T,C or G
  misc_feature 940, 941, 942, 943, 944, 945, 946: n = A,T,C or G
ctagtctgtatgcttctcgaaggctaggctcatattgcacatcattgtatcttctttgccctctggaaggctaggatcatattgcgcatcattgtatcttctttgccctctggaaggctaggatcatattgcrcatcattgtatcttctttgcccccggagcatggcctgcctagaggggatatttggtcatttctttttcattgattggttttataaccaccataatgtttgaactccttaatgtggcctacatggattggtctttgccaccctatttggcctcatttgtgtctcctccccctttacattttatacctagccatcctcaataccagccagttccttagaaattccatgggccaagcacagtggctcatcacacctgtaatcccagcactttgggaggccgaagcgggcggatcacctgaggtcagtagttccagaccagcctgaccaacacggtgaaaccccatctctactaaaatacaaaaattagccagttgtggtggtgcacgcctgtaatcccagcttctcgggaggctgaggcaggagaatcgcttgaacccaggaggtgggggttgcagtgagcccagatcgccctactgcactctagcttgggtgacagggcagtgaccctgtctcanaaaaaaaaaaaaaaaaaaaaaaggggaaaaaaaaaggagggaggggggggggaaaaagacaaaaacaaggaggaaggggaaagaggaagggcaactacggaaccagcacgaaggaagatcgagcgaacgacggaggaacgaacgcaggaagaaggaagaaagaaggaaggaaatttgggccctgaaccccaccaagttctnnnnnnnnnnnnnnnnnnnnnnnnnnnnnnnnnnnnnnnnnnnnnnnnnnnnnnnnnnnnnnnnnnnnnnnnnnnnnnnnnnnnnnnnnnnnnnnnnnnnaattctaagatctcaagtgtaaaagcttaatttcactgactaaaaactgaagtccagaaaaggaaagaggtttttggcaaggggacacagccaactagtggcagagctggcaatagaacccaggatccttttgacaacccccaccccacatacacacatcctcccaaagtgtgatcttgctccaaaaagctagcttctctccgagttttcgcgtttctatcagaagccccctcatccttttctttttctcccccctttatggctatctatcttctacaggaaggacagaagcccttttcttctcagtgaataagattgggaatcttggccgcgcgcagtggttcacacctgtaatcccagcactttgggaggccgaggtgggcagatcccctgaggtcaggagttcgagaccagcctggccaacatgatgaaacctcatctctactaaaaataccaaaccagcagggcatgatggcgcatgcctgtaatcccagctactcagtaggctgaggcaggagaatcgcttgaacctgggaggcagaggctgcagtgagccgagattgtgccactgcactcaagcctgggcaataagagtgaagctccgtctcaaaaaataataataataaataaaaagattgggaatcttgagaaactaaaagaaaagggcaaatacttaaagaaaaaagaaaagactgggaatctgagagtcattcttaagtatttttgttatcccacgtgtgcaagtaatgattcctattgaggcttgctttaaaatatcttactctctattccac

SEQ ID NO: 720775 - DNA, 1740 bp, Homo sapiens
  misc_feature 646, 847, 848, 849, 850, 851, 852, 853, 854, 855, 856, 857,858, 859, 860, 861, 862, 863, 864, 865, 866, 867, 868, 869,870, 871, 872, 873, 874, 875, 876, 877, 878, 879, 880, 881,882, 883, 884, 885, 886, 887, 888, 889, 890, 891, 892: n = A,T,C or G
  misc_feature 893, 894, 895, 896, 897, 898, 899, 900, 901, 902, 903, 904,905, 906, 907, 908, 909, 910, 911, 912, 913, 914, 915, 916,917, 918, 919, 920, 921, 922, 923, 924, 925, 926, 927, 928,929, 930, 931, 932, 933, 934, 935, 936, 937, 938, 939: n = A,T,C or G
  misc_feature 940, 941, 942, 943, 944, 945, 946: n = A,T,C or G
ctagtctgtatgcttctcgaaggctaggctcatattgcacatcattgtatcttctttgccctctggaaggctaggatcatattgcgcatcattgtatcttctttgccctctggaaggctaggatcatattgcgcatcattgtatcttctttgcccccggagcatggcctgcctagaggggatatttggtcatttctttttcattgattggttttataaccaccataatgtttgaactccttaatgtggcctacatggattggtctttgccaccctatttggcctcatttgtgtctcctccccctttacattttatacctagccatcctcaataccagccagttccttagaaattccatgggccargcacagtggctcatcacacctgtaatcccagcactttgggaggccgaagcgggcggatcacctgaggtcagtagttccagaccagcctgaccaacacggtgaaaccccatctctactaaaatacaaaaattagccagttgtggtggtgcacgcctgtaatcccagcttctcgggaggctgaggcaggagaatcgcttgaacccaggaggtgggggttgcagtgagcccagatcgccctactgcactctagcttgggtgacagggcagtgaccctgtctcanaaaaaaaaaaaaaaaaaaaaaaggggaaaaaaaaaggagggaggggggggggaaaaagacaaaaacaaggaggaaggggaaagaggaagggcaactacggaaccagcacgaaggaagatcgagcgaacgacggaggaacgaacgcaggaagaaggaagaaagaaggaaggaaatttgggccctgaaccccaccaagttctnnnnnnnnnnnnnnnnnnnnnnnnnnnnnnnnnnnnnnnnnnnnnnnnnnnnnnnnnnnnnnnnnnnnnnnnnnnnnnnnnnnnnnnnnnnnnnnnnnnnaattctaagatctcaagtgtaaaagcttaatttcactgactaaaaactgaagtccagaaaaggaaagaggtttttggcaaggggacacagccaactagtggcagagctggcaatagaacccaggatccttttgacaacccccaccccacatacacacatcctcccaaagtgtgatcttgctccaaaaagctagcttctctccgagttttcgcgtttctatcagaagccccctcatccttttctttttctcccccctttatggctatctatcttctacaggaaggacagaagcccttttcttctcagtgaataagattgggaatcttggccgcgcgcagtggttcacacctgtaatcccagcactttgggaggccgaggtgggcagatcccctgaggtcaggagttcgagaccagcctggccaacatgatgaaacctcatctctactaaaaataccaaaccagcagggcatgatggcgcatgcctgtaatcccagctactcagtaggctgaggcaggagaatcgcttgaacctgggaggcagaggctgcagtgagccgagattgtgccactgcactcaagcctgggcaataagagtgaagctccgtctcaaaaaataataataataaataaaaagattgggaatcttgagaaactaaaagaaaagggcaaatacttaaagaaaaaagaaaagactgggaatctgagagtcattcttaagtatttttgttatcccacgtgtgcaagtaatgattcctattgaggcttgctttaaaatatcttactctctattccac

SEQ ID NO: 720776 - DNA, 1740 bp, Homo sapiens
  misc_feature 646, 847, 848, 849, 850, 851, 852, 853, 854, 855, 856, 857,858, 859, 860, 861, 862, 863, 864, 865, 866, 867, 868, 869,870, 871, 872, 873, 874, 875, 876, 877, 878, 879, 880, 881,882, 883, 884, 885, 886, 887, 888, 889, 890, 891, 892: n = A,T,C or G
  misc_feature 893, 894, 895, 896, 897, 898, 899, 900, 901, 902, 903, 904,905, 906, 907, 908, 909, 910, 911, 912, 913, 914, 915, 916,917, 918, 919, 920, 921, 922, 923, 924, 925, 926, 927, 928,929, 930, 931, 932, 933, 934, 935, 936, 937, 938, 939: n = A,T,C or G
  misc_feature 940, 941, 942, 943, 944, 945, 946: n = A,T,C or G
ctagtctgtatgcttctcgaaggctaggctcatattgcacatcattgtatcttctttgccctctggaaggctaggatcatattgcgcatcattgtatcttctttgccctctggaaggctaggatcatattgcgcatcattgtatcttctttgcccccggagcatggcctgcctagaggggatatttggtcatttctttttcattgattggttttataaccaccataatgtttgaactccttaatgtggcctacatggattggtctttgccaccctatttggcctcatttgtgtctcctccccctttacattttatacctagccatcctcaataccagccagttccttagaaattccatgggccaagcrcagtggctcatcacacctgtaatcccagcactttgggaggccgaagcgggcggatcacctgaggtcagtagttccagaccagcctgaccaacacggtgaaaccccatctctactaaaatacaaaaattagccagttgtggtggtgcacgcctgtaatcccagcttctcgggaggctgaggcaggagaatcgcttgaacccaggaggtgggggttgcagtgagcccagatcgccctactgcactctagcttgggtgacagggcagtgaccctgtctcanaaaaaaaaaaaaaaaaaaaaaaggggaaaaaaaaaggagggaggggggggggaaaaagacaaaaacaaggaggaaggggaaagaggaagggcaactacggaaccagcacgaaggaagatcgagcgaacgacggaggaacgaacgcaggaagaaggaagaaagaaggaaggaaatttgggccctgaaccccaccaagttctnnnnnnnnnnnnnnnnnnnnnnnnnnnnnnnnnnnnnnnnnnnnnnnnnnnnnnnnnnnnnnnnnnnnnnnnnnnnnnnnnnnnnnnnnnnnnnnnnnnnaattctaagatctcaagtgtaaaagcttaatttcactgactaaaaactgaagtccagaaaaggaaagaggtttttggcaaggggacacagccaactagtggcagagctggcaatagaacccaggatccttttgacaacccccaccccacatacacacatcctcccaaagtgtgatcttgctccaaaaagctagcttctctccgagttttcgcgtttctatcagaagccccctcatccttttctttttctcccccctttatggctatctatcttctacaggaaggacagaagcccttttcttctcagtgaataagattgggaatcttggccgcgcgcagtggttcacacctgtaatcccagcactttgggaggccgaggtgggcagatcccctgaggtcaggagttcgagaccagcctggccaacatgatgaaacctcatctctactaaaaataccaaaccagcagggcatgatggcgcatgcctgtaatcccagctactcagtaggctgaggcaggagaatcgcttgaacctgggaggcagaggctgcagtgagccgagattgtgccactgcactcaagcctgggcaataagagtgaagctccgtctcaaaaaataataataataaataaaaagattgggaatcttgagaaactaaaagaaaagggcaaatacttaaagaaaaaagaaaagactgggaatctgagagtcattcttaagtatttttgttatcccacgtgtgcaagtaatgattcctattgaggcttgctttaaaatatcttactctctattccac

SEQ ID NO: 720777 - DNA, 1740 bp, Homo sapiens
  misc_feature 646, 847, 848, 849, 850, 851, 852, 853, 854, 855, 856, 857,858, 859, 860, 861, 862, 863, 864, 865, 866, 867, 868, 869,870, 871, 872, 873, 874, 875, 876, 877, 878, 879, 880, 881,882, 883, 884, 885, 886, 887, 888, 889, 890, 891, 892: n = A,T,C or G
  misc_feature 893, 894, 895, 896, 897, 898, 899, 900, 901, 902, 903, 904,905, 906, 907, 908, 909, 910, 911, 912, 913, 914, 915, 916,917, 918, 919, 920, 921, 922, 923, 924, 925, 926, 927, 928,929, 930, 931, 932, 933, 934, 935, 936, 937, 938, 939: n = A,T,C or G
  misc_feature 940, 941, 942, 943, 944, 945, 946: n = A,T,C or G
ctagtctgtatgcttctcgaaggctaggctcatattgcacatcattgtatcttctttgccctctggaaggctaggatcatattgcgcatcattgtatcttctttgccctctggaaggctaggatcatattgcgcatcattgtatcttctttgcccccggagcatggcctgcctagaggggatatttggtcatttctttttcattgattggttttataaccaccataatgtttgaactccttaatgtggcctacatggattggtctttgccaccctatttggcctcatttgtgtctcctccccctttacattttatacctagccatcctcaataccagccagttccttagaaattccatgggccaagcacagtggctcatcacacctgtaatcccagcactttgggaggccgaagcgggcrgatcacctgaggtcagtagttccagaccagcctgaccaacacggtgaaaccccatctctactaaaatacaaaaattagccagttgtggtggtgcacgcctgtaatcccagcttctcgggaggctgaggcaggagaatcgcttgaacccaggaggtgggggttgcagtgagcccagatcgccctactgcactctagcttgggtgacagggcagtgaccctgtctcanaaaaaaaaaaaaaaaaaaaaaaggggaaaaaaaaaggagggaggggggggggaaaaagacaaaaacaaggaggaaggggaaagaggaagggcaactacggaaccagcacgaaggaagatcgagcgaacgacggaggaacgaacgcaggaagaaggaagaaagaaggaaggaaatttgggccctgaaccccaccaagttctnnnnnnnnnnnnnnnnnnnnnnnnnnnnnnnnnnnnnnnnnnnnnnnnnnnnnnnnnnnnnnnnnnnnnnnnnnnnnnnnnnnnnnnnnnnnnnnnnnnnaattctaagatctcaagtgtaaaagcttaatttcactgactaaaaactgaagtccagaaaaggaaagaggtttttggcaaggggacacagccaactagtggcagagctggcaatagaacccaggatccttttgacaacccccaccccacatacacacatcctcccaaagtgtgatcttgctccaaaaagctagcttctctccgagttttcgcgtttctatcagaagccccctcatccttttctttttctcccccctttatggctatctatcttctacaggaaggacagaagcccttttcttctcagtgaataagattgggaatcttggccgcgcgcagtggttcacacctgtaatcccagcactttgggaggccgaggtgggcagatcccctgaggtcaggagttcgagaccagcctggccaacatgatgaaacctcatctctactaaaaataccaaaccagcagggcatgatggcgcatgcctgtaatcccagctactcagtaggctgaggcaggagaatcgcttgaacctgggaggcagaggctgcagtgagccgagattgtgccactgcactcaagcctgggcaataagagtgaagctccgtctcaaaaaataataataataaataaaaagattgggaatcttgagaaactaaaagaaaagggcaaatacttaaagaaaaaagaaaagactgggaatctgagagtcattcttaagtatttttgttatcccacgtgtgcaagtaatgattcctattgaggcttgctttaaaatatcttactctctattccac

SEQ ID NO: 720778 - DNA, 613 bp, Homo sapiens
ttttctgtggccccaggaaccgactcaacctcatatttgagttctgggatattgctgatgytaatctcaatgctatataattttcttttggttttctgtggggatgagtgaagccagctttcatctatgccaccattttggaaacaagtatttttttttttaaattgtttcaacttttagtattcactgtcatttaaacctggaatggttttgcaagataaaaatatttaaaatgtaaaagatttttacggaatctataacaacctaaaaatttagaacaaacttataataaaattgttgagacagtctgataacccacttgtcaaaatcttatatgtatggcattataaacaccctattatctcaagaaaatattagaaaataagttttgtaattaaaaatctgctataaaatagatagccaaaaataaaaattttacttttataagcaatatgttcaaattgtgaagaaacccatattgggcacatgaattaaactcattaatgtgatatgaaaatcattcactggtaggattttaaataatttccaaaaaggctttatattacaatggaatttattattacatatgataatttgtactatataatgtttt

SEQ ID NO: 720779 - DNA, 1825 bp, Homo sapiens
tctataacatgcagaagaccgctactacaataattttgtcttcactcaacggttagaaatatttttaccagggcttataggatatttcaaaactaattttaaagaatggacctaagtaagcaaatctaaattacatcttgcactagttactatctttttgtgtgtggaaacctggttggcagggtttatttggaacagatgcaatcttaactttgaaatcttttcaatctcatataacccaaaaatgtatctgttgattcagctcagcaagttatgttcacatttatcagcttgtatttctgatcatgatgtctagagagtaaaactctatgatacaattacctttgaagtgcaaggagctgaatgttgtagtggaagctgcacccaggcgcctctagggcaatgattcaattcagctacaacagaaaccaaaactaagactgagtgtcattatctgcttcttatacatattttatagtcattgtaccgtgcagaactaaaatggtgcttatttcaagaaaactgtgggaatcaagctccattttcagtacaatatatgtcaatttggagattaagggagaaattcaacatatactagaaaattcaacatatactagaaaagcattgtgcaatctgtcaaaagcagattttttaaaattcctagtgatccatttgctcctgaacttgccaatctacatgatgccaagattaaattttttaaagagttaaatttaaatattacattaatgcaacattaaggttgacatttttaatcattaatagttctaagccaaataattcagttacctttcacagccactgtgccaccaaggcaaatttatacgtgttacttttctaataaatacagcacaaaaattgaacacgtgcatgcaaatcaaaatagtttttctcttcaagcagcgtataatccccaggacttctgaaatatagtacaaagcaaaaggacaatttcacttttatcaggctcatttgatgaacatagacaaatccagaaagccgacttttgggagctgattttctttcttaatatttaccaaataattaataacattttatttattttactatgctagatttacttagctataggggcagaggttaagtacctcatgttttggttaatttatgtttgactgggtagtattgtaagatcctggcttttacatgaaaatagagatgacatgtactgttataatctatttatgaaagcattagctacagaatattgtggctacaggttaataacttaagtgttttcaagtataccatgaattagctctcaagttgtttgaaacaacctatttttagtttatgtactgagtattattttttgtctatctatgatctattttccccattgtacctcttgagtattctttgttttttatgagtgtctttttcttttccatggagcctataagctttaaacctgcactgtgcaatatagtagctactagccatgcctggctatttaaattaaaattgattaaaataaaataaaataaaataaagaatatattacatatatggataaagtttaatcaaatatgtatttatatatatatatatacacacacacacacacacatacacacacactctctctcacctacaatatttgtctatgktggggatataacctaattaacactaatgtcaacatgaatttgagaagtctttctagaaatgcttgaaaaggaaaatcaagtctttgatttcctcatcgagtcttctggactaacaaatcctgaagcctgcccaacttctggacttctcagtgagatgactccatcaattcctatag

SEQ ID NO: 720780 - DNA, 951 bp, Homo sapiens
caaagaagagcaagcgccttaaacgctggcatgactcagaagactccctcacagccacctgcattttaacattcagaacagaagtcgatggctcggagtgaaatgcagagacactttgcttgggttccagtgagtcttcgaggcagcctcatttcagaagaagagacatttcccaagcaccatcatgttccaggtatcaccgtaggagatttaaagatattatctcctcatttctcacaactacctagcaaggcagatgatatttgttttctctaaagaaagaagaagtgaaaacacacrtagttcttatcccacttctccgtcggtaatgtgatagagacagagatgatctcttacatttcctcaactttcccactccaaaaccttgaagtacaggagtttcctggcttctgtttcttaattagaaagccacttccgcagtctctggcgcaccacagcacctcacctagcatccttctctctcgccagcctcatctcatgttgtttcctaccccctggtttatattcacttaagaggaactcacgctcctcccctcccatgatccttcagcctgagtacccttcctcagtttgcctggtgaactcagtttacccttcaatttggctcagacatctcttcgcctttggagcctgccctgcctccctgtctcactcttattccatatcactcacaccgtcgacatatgctgtcacactctactgcaatttaagtacttatctccttgacgaaactgtgacgtaataacaaagcaaaacctgccttttcatccctggtagttagtaaagtaacacccacaaatagggacttcctaattattgctgaatcattaaagtgatttttaacacccacaataactagaaacagaaaaacacagccaaagacgagagaccaaacatgatgaagtggctgacaagaaaaaacaaacaaac

SEQ ID NO: 720781 - DNA, 919 bp, Homo sapiens
aagtgtactgggtgtatgaccttgggcaagtcatttacctttctaaaccattactggctcataaaaatctatttaagcaacacatttacaaaaattgatacataaagcaaaggctgtctgcattattaacatttagaatcatcactgcccctttcttcctcagtggattttcagaaatgtacatttctcttctactgtaagtaactacagtaagctttcccattgcagataaagaaaggagcaatacttcccttcaaacctcaattctaaatttaaaaatcacagattacatgaacaagtcatctgggcaacatagtctcttcagcmatgaataatctttgccttgccagggcaccgtttcactttctgttccttctacccaaaacacttttcccctggctattcacactgccagctccttctcacctttgaaaccctgtccttacctgcccgtgctttccaaagcttgccccgcccgccttctcccctgccattcatttccagcccagtgccatgtttgtttgtttctgaaaatgtatcgccactggaatatattttatcttggtgtttactgattttttggctggctcccccactgaaatgcacactctgtaaacctggcttgtctggggttcacctttgtgtcttcagaagcttgagaaacgcctggcttctagtaggaagctggttgagtaactgcagcagctgggcttcgtggctcacacctataatccctgtactttgagaggcagaggcgggaggatcacttgagtccaggcatatgagaccagcctgagcaacaagcgatactgcatctctataaaagaaaaattaaaaaaaattaggcaggcatggtggtgtatgcctgtaatcccagctactcgggagactaaggcatgaggatcgcttcagcccagga

SEQ ID NO: 720782 - DNA, 919 bp, Homo sapiens
aagtgtactgggtgtatgaccttgggcaagtcatttacctttctaaaccattactggctcataaaaatctatttaagcaacacatttacaaaaattgatacataaagcaaaggctgtctgcattattaacatttagaatcatcactgcccctttcttcctcagtggattttcagaaatgtacatttctcttctactgtaagtaactacagtaagctttcccattgcagataaagaaaggagcaatacttcccttcaaacctcaattctaaatttaaaaatcacagattacatgaacaagtcatctgggcaacatagtctcttcagcaatgaataatctttgccttgccagggcaccgtttcactttctgttccttctacccamaacacttttcccctggctattcacactgccagctccttctcacctttgaaaccctgtccttacctgcccgtgctttccaaagcttgccccgcccgccttctcccctgccattcatttccagcccagtgccatgtttgtttgtttctgaaaatgtatcgccactggaatatattttatcttggtgtttactgattttttggctggctcccccactgaaatgcacactctgtaaacctggcttgtctggggttcacctttgtgtcttcagaagcttgagaaacgcctggcttctagtaggaagctggttgagtaactgcagcagctgggcttcgtggctcacacctataatccctgtactttgagaggcagaggcgggaggatcacttgagtccaggcatatgagaccagcctgagcaacaagcgatactgcatctctataaaagaaaaattaaaaaaaattaggcaggcatggtggtgtatgcctgtaatcccagctactcgggagactaaggcatgaggatcgcttcagcccagga

SEQ ID NO: 720783 - DNA, 2711 bp, Homo sapiens
taccaataaagaagttatatgaacataaatcaacaaaatactgtattttctttatatttatatccacctgttagttttagagttttaatctttccgataaccatcccactgcaagctcttcaggatggaaaccatctcttatcacatgtgaaattcaaagaggaagctctaagagcaccatgtgacaagaggtaccgatgggtatttatgatcaaggaagatgatgagctagaagcagcagcctgtcgatgaggtcacatcatattacgaatatggtttattagcagctcccaaagatatgccctctctttggtcaataagaagaggataaaaggttcaagataaggaagaagcactttataaatgaaaacgttcactaatgaaattagtatcgttattgcaggaagtgctaattttcctgctcactgagagtttaataaaaatgttatgtctactctataactgtgattaatcagtgtagtattgagaagtacagcgattctttttcaacaaggcaattttcaaaatttgaaaaggtgtaaatttcatgcaaattgcttcataatcatatatgtacaaaaaggagccgataaaattgcagttacgaaaagaatcattaacatttaactttttcccccttttctccaactgctccttaaatggtttatgataaattaaatgacttgaccaactgaaatgtataatacaggtgaatgtcaacaaaacagtgatattttaaaccaactcaaatgtggatgtcaagtttgaacagtgatatgaaataggacattttataaaggaaaactgccttgattcaatgaaaatgcatctacttgttttaataacaatatagagagacaaggaagcacttttctatttttgattcttctcagtgggaaacagtacatctttgctacagaaagtcacatttctgcccatagggttcttccctcccaccccaacaggtccctaggtatcctgtaattttaagaaacggtttgcaaacctgagtgttcctcagacagagtggcctgtaatgagccagcccaagaggctgacacccaggtgcctccaatctcatcgtgtgtggtgcctaacagcactatctgggtaaatccagagtaggttactcatctgtttacatagctaaggtagaagtggacaataagacctcaagtataaggatgacagtgttaggattattagatgcatctactgatagcccgtaaaacgtgtaagacagaagcagaaaacaaacttacttgcacacactagtattaatattgtgacagctaacagccagttgtttctggcttttaagaagttggggctggacgctgtggctcatgcctgcaatcccagcactttgggaggccgaggcaggtagatcactcaaggtcaggaaatcgacaccagcctggccaacatggcgaaaccccacctctactaaaatacaaaaatcagctgggtgtggcggcgggtgcctgtaatcccagctactcgggaggctaaggcaggaaactcgcttgaatccaggaggcagaggttgcagtgacccaggatcgggccactgcactccagcctgggtgaaagagtgcgactccaactcaaaaaaaaaaaaaaaaaaagttggaagcttttttttaaaaaaaagaaaaatttaatatataacttggaaagcagtggttagcaatttcttggtaataactcaaagtgattctaaatggtctgagtactgccacggttcttgcactgggtggatttttcttcccgcatgcaggcttttggagggacaaagtaatgataagtaggaaccattttcctccstcatcttcatcccgtacctcatatattttctaaaatggccccactcaaggcagttactatgcacagccgatgttgttcagaagagtttttcagaggatgatttttggtgaaagtggcatattttagaaccatctggtcacatgcattaatgcacactttcaaattccgcacggatttttacgacggcgttcttctgccctaagagtctctcgcaggcactgtgtgtaaatgagacaaagactcctgccgccttcaattcgcggagtagtgaacagaggctctagatttcacatggcaacacattttccattatacgctaagattaataaacctcgcagagccccggtgagccactggaaaacaagggcagcagggtgcttgtttctgttccattagacacgggacgagctgcaggcttgacacactctgtcactccagccggtaatgggcctcctcgagaccaccccggctggaggctctgctggtttggtggcccagttgcgggagaaaaactttgtccttttctccccgactcagccacagaggcagggtggatgagctggaactctccacagccagtggggaacagccagttggttcttctttgccctagttacgcagcaaagggcaccctttaaatacaatagcaggctgcggcgagcttgggaacctttcagaatacacaaaaaaaactcacttctttggggtgttttttttttttttgagacggagtctccttctgtcgcccaggctggagtgcagtgctgcaatctctgctcactgcaagctccgcctcccgggttcatgacattctcctgtctcagcctccggagtagctgggactacaggcacccgccaccacgccgggctaatttttttttttt

SEQ ID NO: 720784 - DNA, 1430 bp, Homo sapiens
tcaatttttaaaattaagccctgttttctttccatttatattagcatggaaccctttgagtgctttatcacactgttattattcttcaaattattctctgtgattttacattccttatcccttaacacatggcaaatcagaattacaaaaatcttttactttgaataaggccaagctaatgttttcagtttcatttctttgccagtattcctttgaatcacagtaacatattatgtttgaaaatccaagaaataggcatttacttcttcctagaaaccttccctgggctgtaatttgtaatacatttatttccattattgtttgcatttttaaagtgttgtatatttgccaacagaaaagttttaaaatttcgagtgctattgtcctaaattttttaaatgcattaatagcaatagtttttttaaatggaaatacttgcttttgatggtattgattcttcatttagatgaagctgcaagtggtagcttagtaaatactgaaattgaagtatctgctttaaattacattttgctaaaaataatttycccacattggagacaatttgcaaatataacaagagaaaaaagagtgcaagttaagagagcaagcctgaaaaattgacttctaaaaccatttatatttgaaagtctggttaatccactgcttcctgaatgatggctcttggaacactgatcccaaaacattaacccaaatgagtctattatttgggaaagcagtaattaaacaaacgaaacaagtttctatactccagatatcagttcttaatgtataccaaagatcattataaattttcaagagaaaaacgtgataggaactatttcccacattcctttggctctaggaccctgatattcatgaactgttctcagttctaatgttctgtgaaatacacaatgggactttgggacgccaaggtgggcagagtgcctgaagtcaagagttcgagaccagccaggccaacatggtgaaagcccgtctctactaaaaatacaaaaaaaattagccaaaattagccgggagtggagacccgcacctgtaatcccagctactcaggagggtgaggcaggagaatcacttgaacccaaaaggcagaagttgcagtgagccaagatcacgtgccactgcactccagccttggcaacagaatgagactctgtctcagaaaaaaaataaataaccccccagcgccgcccccgcgacacacacacacactgggaaattcagaggcaagtaatatgtttcataaactataattataaactacaatgatttctaattgtaaaaggtctgctagtaaatatttggagtatcattattacataaggatttattctaattggaaggacactgaagacagcacagaaagagatgttgctggagagagatgaaggtagggtgacaaggcacac

SEQ ID NO: 720785 - DNA, 626 bp, Homo sapiens
caggatgacaaaggcaaccaatgacattgaaatacagtaatcacaacattaaaaaaatagtaatagatgtcrtctattaacacattaaataacaagatctagcaaaggggctccaagtaccatggtgtctcagtggtgaaatgtgtaaatatttcaaggtattgtcaacaactgccatgtaatatgaaaatatctgtagtttccactggtgtcaaaataccggtgctcctagaccacatggtttattgcccacattcctaattaaagaaaatgctaaatttcagtttgaagttagtagaaaatgtaattcctcctccccaccatttcctattcccaagaagtcctttcttcgcattcacggactccagcctcacaaacccctggtcctaactcagtcagctcctcctgccacagctcctcagtcactctggattccatgacctcaacaatcccaaatgcgatcattgacacatttgtgtcactgtccttctcgcctgtgggcaggaattgcgtctgtcctttcacttctgtgaatccagagcccatcagagcaagtctgcacacattagatactcaggaaatgttaaatgaatgaatgagtcatgtcacaccaaggattgtggact

SEQ ID NO: 720786 - DNA, 626 bp, Homo sapiens
caggatgacaaaggcaaccaatgacattgaaatacagtaatcacaacattaaaaaaatagtaatagatgtcatctattaacacattaaataacaagatctagcaaaggggctccaagtaccatggtgtctcagtggtgaaatgtgtaaatatttcaaggtattgtcaacaactgccatgtaatatgaaaatatctgtagtttccactggtgtcaaaataccggtgctcctagaccacatggtttattgcccacattcmtaattaaagaaaatgctaaatttcagtttgaagttagtagaaaatgtaattcctcctccccaccatttcctattcccaagaagtcctttcttcgcattcacggactccagcctcacaaacccctggtcctaactcagtcagctcctcctgccacagctcctcagtcactctggattccatgacctcaacaatcccaaatgcgatcattgacacatttgtgtcactgtccttctcgcctgtgggcaggaattgcgtctgtcctttcacttctgtgaatccagagcccatcagagcaagtctgcacacattagatactcaggaaatgttaaatgaatgaatgagtcatgtcacaccaaggattgtggact

SEQ ID NO: 720787 - DNA, 649 bp, Homo sapiens
gtctgtcattttctagcttattgtgttttaaattattttttatgtgcctacgttttacatttttatgtggtcaaattatctttttctttgtactttcaatgttttcaaagttctttcccagccataggtcatataagtatttagctattttttccccctagttttcttattgtgacctttttttttttttacatttactgccttactttacctggaaaaaaatgggccttcaattttttttgtatcactatttatttaataattcacccttccttccattggtttgtctgttcactcttgtgcaagtatcacatcctatgtgtgcacrtgtgtttaatatataatatgtatttaaatatgtttcagtacacatctgccctcatttacaaaattggatttgttattatgtgttccgactctagaattcaacctaaaatatcaatttaggaatcattattattttacaatattcacctgaagacaagactagtaaattggtcaaatttttgaccgattttcttgggtttcccaggtagactgcaaataatgacagatgtgctgcttgctttccaagggttctaaagcccagatctgtcagatcaaaagcctgtgctcctaaccaccacacagaattgcactctggcgtgtg

SEQ ID NO: 720788 - DNA, 739 bp, Homo sapiens
tttttttttttttttttttacaatatgccaggctctgtactaggaggcagggttatagttgtgaacaaaacagatgaagtccaggctgggaggccaaggtgggaagattgctcaaggccaggagtttgagaccagcctggacaacatagagagacactctctctatgaaaaaaaaaaaaaaaaattagctaggtgtggtggcatgtgcctgtggtcccaactactcaggaggctgaggtgaaaggatcacttgagcctgggagtttaaggctgcagtgagctatgatcaccgctgcactacagccttcgtgacagagcaagaccctgtttcaaaaaccaaaacaaacaaacaggtgaagaccagtggcagagaaaaacaacagcaaagaacagaaattgtttaataattattaaaaattaacaatatattgtttttttctcaggttaaaccttcgtcacataacactgaaaaacacagtctatttattagagcagttttaggttcatagcaaaatggggtggaaagtagagttctcattkactccctgccccgactcatgtataaactctcccactatcagcatcctccaccagagtgtacgtttgttacaatcagtgaacttatattgacacttcattatcaccccaaatccacagtttatatcaagcttcactcttggtgtacattcaatgggttttggcaaaagtataatgacatgtacccaccattacaatatca

SEQ ID NO: 720789 - DNA, 828 bp, Homo sapiens
tacttagtttgtttccgtattttcttgataattttcatggtatcttccttacttatatttccaatctctttttttatttcttaaaaacatgttaaacatggatattttgtattttctctaatttctcaaaaatctcaagcatctgaagatcaaattctattgtctgttctttttatcctgccagttctttgttctctgtacatctgtgatttgggctatgcgttcatactttcctactgaaagcactagttgaaggtgtattactctggagaagacgtgcatctgcaagtgactggaggcacaaccatctgtcactgcttcaactgtcacagctaagtgtttagcttgggctttttcagaccatccaggtaaatgtgaattcaggggtatctgatggtgataaatccaacggtcccaatgttttttttcctcctttatctacctagcattgttgctctagataggcaacctttcttgctgtcttcaacaagtagtggtggtggtggtgggaggtatgctagggtggttgggctggctgaatttaattctagtattcttacactgaaggtttagtgactgtctgagtccccacttgatgcagctggggtctgtcaccatgagaccaagaaagggacacaatagaagggaatatgcacctagcttatcaaatttcctcagggcaaagccagctttagtgttctgcttactattctgagttctgaaccyggtgtacagtctctatgaaatctttctttctaccttatccagacttgcatttatcttcatttatattacattcacaatttttagttatcactagaaggagac

SEQ ID NO: 720790 - DNA, 2014 bp, Homo sapiens
  misc_feature 981, 982, 983, 984, 985, 986, 987, 988, 989, 990, 991, 992,993, 994, 995, 996, 997, 998, 999, 1000, 1001, 1002, 1003,1004, 1005, 1006, 1007, 1008, 1009, 1010, 1011, 1012, 1013,1014, 1015, 1016, 1017, 1018, 1019, 1020, 1021, 1022: n = A,T,C or G
  misc_feature 1023, 1024, 1025, 1026, 1027, 1028, 1029, 1030, 1031, 1032,1033, 1034, 1035, 1036, 1037, 1038, 1039, 1040, 1041, 1042,1043, 1044, 1045, 1046, 1047, 1048, 1049, 1050, 1051, 1052,1053, 1054, 1055, 1056, 1057, 1058, 1059, 1060, 1061: n = A,T,C or G
  misc_feature 1062, 1063, 1064, 1065, 1066, 1067, 1068, 1069, 1070, 1071,1072, 1073, 1074, 1075, 1076, 1077, 1078, 1079, 1080: n = A,T,C or G
accccaacccctggggcctgggggctggggttggaggaagggctctaatacaagccccagagtccaaaggccctagaaccgggagctctgatgtccaaggacagaagaagatggatgtctcagttcaaggggaaagagagagaaagggagaattcagccttcttctgcttttgtattctattcgggccctcaggagatggcatgatgctcatccacattggagagggaggtcttctttactcagtccaccgaggcaaatgccagtctctgctggagacaccctcacagacacgcccagaaataatgtttcaccagctgtctgggtatccctcagcacagccaagttgacgtataaaattaaccatcacagcagcagacaggggtggtcagtcaggagctctacggtccccgtgtctccccgccctgtagctcatccctccctgctccttagcttcccaagaggcacctccactaggatctggccttcagcccaaatgggcactccctgacagagtggccagtgcccccgggaaacatgagcttagagaccaaagtaactaggcaccctgcggtacatcatcataaaagaaaagccaaaaagtggaacaacatatcccatttaaagcagaattattggaacaggctgactaggactttaaaatatttattatttagggctgggcgcagtggctcatgcgtgtaatcccagcactttgggatgccgaggtgggcggatcacaaggtcaggagatcgagactatcctggcttacatggtgaaaccccgtctctactaaaaatacaaaaaaattagccaggcgtggtggcgggtgcctgtagtcccagctactcgggggggctgaggcaggagaagggcttgaacctgggaggcggagcttgcagttagccgagatggtgccactgcactccagcctggatgacagagcaaggttctgtcccaaaaaaaaaaaaaaaaaaaaaannnnnnnnnnnnnnnnnnnnnnnnnnnnnnnnnnnnnnnnnnnnnnnnnnnnnnnnnnnnnnnnnnnnnnnnnnnnnnnnnnnnnnnnnnnnnnnnnnnnaatatctagttgcctgagaataggtagttgccattttctttgatgttgtgatatactgacaaaacttatattttaattgtaagtggctgcaacttaagggaaaaagaaaatagtagaatcaagagattctacttttactattaatttataatttctatctcacctaacctattcctctaaataatctgaaattggctaaaacaattataaattctgcaaaacaacattgttgcaagaatttttagtttattgatttacctcttctccacagagtatgtgcaactttaaaattttgaaaattaaaagtgatttttgcaaccatctttgatatcaaaggcatgataagtaaactcttgcttaagtgaagactaatatgcatcttgtctaaattattaaatagaaagatattgtcaatgtatgtgtcatcattgtaaaaagttaagtggttatggacgggaaaatcacatctgttcttaccagttcattcttggtactatgactcatggctgattatatgtctgctgtccctgcttcctgttggaggaagttcttgaaggaaatgaccatattctcttcctttctggaaagttctttccattcctgacatagttggcttttctgagaccattttgcagtgaccactgccaaaacaaggctttgacagtgcagcttcccactgcctggcagtgcccacacctcttcctctcttctgctgctaactaaatacttgacagctttggcctgggccacccactgtcttacccttcttgctcttagacttagctttcagcacagttcccagctcrgctcactttttgttcgttttttgcatttcctgcgattgtctcaggttagaatttctgcacccacccctaacccaagaaaccccacctttggctccccatgtgtccagaatctaggaactgctcatcac

SEQ ID NO: 720791 - DNA, 747 bp, Homo sapiens
cactgctctctgatgattcactaagatctgtgtaataattctcacaataatccttgctagagacaaaaaggatttgctgtataattttagtagctttctactggtaaaattttaatcatatttcaagaatagcaaaaaggtttataattaagttttataaaaattccaaatgtaatcaagttatatttgtaacttacataaacttcaaaaatggtagtggttcaaatgtatgtctttcaatagactgtattttattgcaggataaatctctaggaaaacraaaatattgccttgattagttattaaatgtcaattggtatgaataacagcaagagtttagaataatactgaatacctgtttttcatctcaactctaaacgtttggacttgtatttgaacattccagagcccctaaccctgcccatacctctcctagagtctcaccttcatggttttaataaatatacaacataatagactttggaattaatttttcctgagagcagtagacttgattagatgcccttttgtagtgtcatcaaatcttagattatgagctcaaagattttatctctatatacacaatttctaatattaaaaaaaatagtcgggccgggtgcggtggctcaggcctgtaatccagcactttcggaggccgaggctggcagatcctgaggtcaggatatcgagaccatcctggctaacacggtgaaaccctgtctctacaaaaaaaataaaaaattagcc

SEQ ID NO: 720792 - DNA, 747 bp, Homo sapiens
cactgctctctgatgattcactaagatctgtgtaataattctcacaataatccttgctagagacaaaaaggatttgctgtataattttagtagctttctactggtaaaattttaatcatatttcaagaatagcaaaaaggtttataattaagttttataaaaattccaaatgtaatcaagttatatttgtaacttacataaacttcaaaaatggtagtggttcaaatgtatgtctttcaatagactgtattttattgcaggataaatctctaggaaaacgaaaatattgccttgattagttattaaatgtcaattggtatgaataacagcaagagtttagaataatactgaatacctrtttttcatctcaactctaaacgtttggacttgtatttgaacattccagagcccctaaccctgcccatacctctcctagagtctcaccttcatggttttaataaatatacaacataatagactttggaattaatttttcctgagagcagtagacttgattagatgcccttttgtagtgtcatcaaatcttagattatgagctcaaagattttatctctatatacacaatttctaatattaaaaaaaatagtcgggccgggtgcggtggctcaggcctgtaatccagcactttcggaggccgaggctggcagatcctgaggtcaggatatcgagaccatcctggctaacacggtgaaaccctgtctctacaaaaaaaataaaaaattagcc

SEQ ID NO: 720793 - DNA, 747 bp, Homo sapiens
cactgctctctgatgattcactaagatctgtgtaataattctcacaataatccttgctagagacaaaaaggatttgctgtataattttagtagctttctactggtaaaattttaatcatatttcaagaatagcaaaaaggtttataattaagttttataaaaattccaaatgtaatcaagttatatttgtaacttacataaacttcaaaaatggtagtggttcaaatgtatgtctttcaatagactgtattttattgcaggataaatctctaggaaaacgaaaatattgccttgattagttattaaatgtcaattggtatgaataacagcaagagtttagaataatactgaatacctgtttttcatctcaactctaaacgtttggacttgtattkgaacattccagagcccctaaccctgcccatacctctcctagagtctcaccttcatggttttaataaatatacaacataatagactttggaattaatttttcctgagagcagtagacttgattagatgcccttttgtagtgtcatcaaatcttagattatgagctcaaagattttatctctatatacacaatttctaatattaaaaaaaatagtcgggccgggtgcggtggctcaggcctgtaatccagcactttcggaggccgaggctggcagatcctgaggtcaggatatcgagaccatcctggctaacacggtgaaaccctgtctctacaaaaaaaataaaaaattagcc

SEQ ID NO: 720794 - DNA, 880 bp, Homo sapiens
tttaaagcatcattagatagcttcttctttctgaaacccagaggaatttatgtataggatgactctttttttcaagtagttaagttaaggtgcaaaagtataaggtaaagtatattatcttaccattgaaaattttggcagtggcagaagagcgaacccttacaaataccttcattgggcaatacactaagcacttgctgtaatgctttttaaaacatctatactctggctgtggtattttaagtgaaaatctctcagtgagatactctttcgtattttagtactgatatccttaatattgctctgagagctaccttatactgacttcagtttcctagtgatttaaactactaatttccaacttatttttttttatagtgaaaactaaatattccttttgtagatgtaaccatttctggaagccctaagtatttttgaatgagtataattcatgcacactttaagagatttcaagcatgacaagyacagtgaataacatatatccatgtgattaccactgaggtttaagaaatgttaacatatgatatctgcttcagatatttatctttttaaaaatagaacattacagctgggcatggtggctcacacttgtaatcccagcactttgggaggctgaggctggtggatcacctgaggtcgggagttcgagaccagcctggctgacatggagaaaccccgtctctactaaaaatacaaaattagccgggcatggtggcacatgcctgtaatcccagctactcgagaggctgaggcaggagaatcgcttgaacctgggaggcagaggttgcggtgagcgagatcacaactccagcctgggccacaagagtgaaactcagtctcaaaaataataataataaat

SEQ ID NO: 720795 - DNA, 2380 bp, Homo sapiens
atcccttcctctctggatgaagtccccttcatcgaccagctttctcacttagttctctaagatagtgaggatctgtctgcttttttcttgaccattattggataggaaaaatgctctcatcctctgtaatgatttgtcaccaaggccataaagacattgaactaaatgtcttatgggagttcattattggaagtcttcaggagtttacacatttatgtacaaagtaagtaggccagctcatttgagtcttggctcatgtgtaatgatctttcatgtgtattgaaaaattattctcaagtatacctcaggtcatttacagtctcaaagatttgtcagtatactttaaaacaatcctgggaacagttctagattgaaggagactaaagaatcatgtactaagtgtaatgtctgatgtttgattggattgtgaattttttaagccatgttatgattgggacaattgtgaaaatgtgtatacggaccgcatagtagacaatgataatatgaagttccattgagtgatgatagtcctctggttatgtcagagaatgccttggttcttaggggctgcacactgaagtcttcaatggtgaagggtcattatgtctgcaactgactctcaaatggttttgtccagaaaatgtatagacatacacacacggaaagctaatgtggcaaagtattagcaactactgattccagatgaaagttatacaggtgttcattataccatttgaaaatgtttcccagccatcctaaggcttaaaggaaaaaaagaaaatgtttaaaataaaaacttgggggcagaaaaagaataccaaaaattttgggctcatgcctgtaatcccagcactttgggaggccaaagagagagggttgcttgtgcccaggagttcgagaccagcctggacaacatggtgaaaccccatttctacaaaatatacaaaaattagccaggtgtggtggcacacacctgtagttctaggtactcaggaggctgaggtgggaggatcacttgagcacaggagacagaggctgcagtgagccaagattgcaccactgcactcagcctgtgtaacagagcgagacccggcctcaaaataaacaaaagaaacacctttgtggcagaggtaaggttgctatacaacaaaatgctgggttacggttccgggtccattccatatgaagatcagaggcttccactggacccaaaggaatactactagtcacttgtgattgttcctttataggtttgaaagatgtctcaggccaacttattggatgcagttttaatctaaaactctatacattgtacccccaactcacagacttcttgtatccatgaaaccctcttctgttttcatagtcttaatatggccccaataaagccatccttttggaggactcagaaaaggccccccacaacctctgcaacacaataattatagttaactcttattgagcactsactgtgcaccaggcatttttcaggtattgattcatttgatcctcaaaattcattagaggtaggtactattataatgacaaggccaaggaacagagattaaacaatttgcccaaattcacattattagcagagctgagattgaagcatagtctggctatggaatctgtattcttaatgaccatgctatactgcctaagattaaccttttacttcagttacagggattgtttttatctctctgaaagtgcccccaataagccacaacaataaattaatcaattgtctcggtcacctcttttgcccaaatttacgtattggaaaaaattcaaacaagccagaaagatgaaagaatagtacagaatccaatcaaagatcaggcactgcatgtcatgtcttcatttcctttaatctaaaacatgcctctactttctttgatctttcatgacactggcattttttaagagtcaaagatagttgtcttgtaaattgtcccacaatccagatttgtctgtttcctcatgatgaaattcaagttaagcatttttgggaaaaatactgcataggtgatgtatccttcctgcctcgtaaccgcagatggcctgtaatactaagtttgatcacttgactaaggtgatcttccaggtctctccattgtaattattttgctggctacagtggctcccacttgtaatcccagcactttggaaggccgaggtgggaggattgcttgagcccaggagttctacaccagcctgagcaacatggggaaactctgtcactactgaaaatacaaaagtacaaaaaaaaaaaaaaaattagctgggcatggtggtgcaagcctatactcccagctactcaggaggctgaatttggaggatcccttgagcccaggggggttgaggctgcattgag

SEQ ID NO: 720796 - DNA, 909 bp, Homo sapiens
aaatctcacagatgaggagacttttcaggaacatgctgggggagggaaggtacttcccgctcagatgccccttgaggcagctagtcccaattccccctgccaaccgcacagacacaccaccttgacctccctctcccttctctttcctcttattgctactcatgtgccccaggcgcccgtggtcctgacacccctgcgccgctggagacccctctaaggtaagatggctccgactacagggcctttttggcacgctcagtctcccagccccaagcgccaaaagtgcattagggagaaacgtcggcacgacgtcaagggcgcgaacaagcgtggtggcccaggtgagcgtgcgcggcagccaggcacgcccggctcccggggaargacgccccttttttgccccggctgccaggccgctccttctcaacttgtgcgcccctggaagagcaaagagagggccctgcgtggaacctatgaagcctccttcggttcctcgctgctccggccctagagagggcgaagaaggaacagcggagcccaatccctttccgaaagccaccgccgccctccagtttctggcccgcagacgaagtggagatccagccaggtcttgagtgctgccgccccatccctgcagccggagactcacctgttgccactcaaggtaccgctacctacaacaccgccgactccgcggcctttaggatttcagctcagttcagctaaaccacgacaggcgtgggggcaggaacagcaaccaaccaatcacccaccgcctcctggagcttttgcaccaatgagctcgaagttttgtgagtgacgacatatctggccaacgcaaagaagagtaagggcctgggagggagggagcgccgtaggcgacgccatgaagctctggcaataccatgt

SEQ ID NO: 720797 - DNA, 604 bp, Homo sapiens
tattaaaaaacttacacttttatatttgctatccagttcaaaggcactgtgtataataacctataagcatttttatttttggtaaagtggggaaaagacaagaacattcattaataggcttagattatttttaaatgagttgagatttctgcattgaaggccagaaaaaaacagtgctttgaaaatagcactttactgccttataagagacaatggataatgtttatatatttctattgcactaatgaatttttaattagctattatttcagtactttgtccaagaaaagcatttttcctgagatttattttctgagatgagctagtcacaactgtacaagtagtttatggtaataacttggccatttgttttctgtatatcagaatcaaactctgaaaataaaaaatacatgtaaaataattgtattttattcatttcttaatgaaattgcatgttrtaaacaatatggcatatccttttatattctccattaacgaaaaggaacccctaagtagcaaataattaatatattagattcaatttgtaggcaactctacatactgtcagtaaataacagtaatttacatatcaagatgcttattt

SEQ ID NO: 720798 - DNA, 1028 bp, Homo sapiens
cagtacaataagataaatgattcaaaacaggacacaccattgtggaattttagaaagccaggtaaaaataagattttaaatatcccataaaggaaaagaaagaaacacacacagagaaccacaataaatcacccacgcaggaatgaggcagtatcagattttcaatagcaacattgatgaaagaataaaatactttcatgttctagggaaatatgtaagttatgcatataaagaaaaaattaagttgttttgaagcacacaggggctcaatattttacctaccaaatcgctttcttctttcttaaaaaattactggaagctgttctccagaaaactaaggtctggggtgggaaagaagaaagaagatatgtaatctaatacagaaaagtgtcaaagggaaggaccatatgggagcgatttcatccaatggaggaataacccaatgtaacaccaagagaggcagccccaggaggaaagaaaggaacaaaaagtgaatatctgaggtctgtatttggacaagatctgtttatggaagtacgycaagtatatggtgataggtacataaaagccaaagcaatgaaaaaattagccaactgatatacttaaggacaaaattacatgaatatgataattgttcattatttgatccttaaatttaaaattttacatattcacatttgatactgatgtaagtaaaaaatgtgtgataaaattatattgacagatgaaattaagagagaggatgaaataatattgtcaaaaatgatctaaatttggtggattaaaatggagaaacatatgccaatgggattgtatatttgactattggcatatgagagcagttctgattttattttatctcttttatggcaaataaaagatattttatctcttttatggcaaataacttttatctctttcatggcaaatgtcatgacaaatgtccacattgaagtgtacttgtctttcagtatctgtgggaaattgcttccaggacttttccctgcggatatcaaaatggatgctca

SEQ ID NO: 720799 - DNA, 1028 bp, Homo sapiens
cagtacaataagataaatgattcaaaacaggacacaccattgtggaattttagaaagccaggtaaaaataagattttaaatatcccataaaggaaaagaaagaaacacacacagagaaccacaataaatcacccacgcaggaatgaggcagtatcagattttcaatagcaacattgatgaaagaataaaatactttcatgttctagggaaatatgtaagttatgcatataaagaaaaaattaagttgttttgaagcacacaggggctcaatattttacctaccaaatcgctttcttctttcttaaaaaattactggaagctgttctccagaaaactaaggtctggggtgggaaagaagaaagaagatatgtaatctaatacagaaaagtgtcaaagggaaggaccatatgggagcgatttcatccaatggaggaataacccaatgtaacaccaagagaggcagccccaggaggaaagaaaggaacaaaaagtgaatatctgaggtctgtatttggacaagatctgtttatggaagtacgccaagtatatggtgataggtacataaaagccaaagcaatgaaaaaattagccaactgatatacttaaggacaaaattacatgaatatgataattgttcattatttgatccttaaatttaaaattttacatattcacatttgatactgatktaagtaaaaaatgtgtgataaaattatattgacagatgaaattaagagagaggatgaaataatattgtcaaaaatgatctaaatttggtggattaaaatggagaaacatatgccaatgggattgtatatttgactattggcatatgagagcagttctgattttattttatctcttttatggcaaataaaagatattttatctcttttatggcaaataacttttatctctttcatggcaaatgtcatgacaaatgtccacattgaagtgtacttgtctttcagtatctgtgggaaattgcttccaggacttttccctgcggatatcaaaatggatgctca

SEQ ID NO: 720800 - DNA, 1170 bp, Homo sapiens
ggcctcattttattttatagagatctgataattaaactgcaagatataaaaagaccctggttcttgctacaggaatactttagcaacaacgtgtatatcagtaagactgtaactataaaaagaggatctaaaattatcattaagataaacattgtacttctaaattgtaaaatagtaatttgtgcaaatatttgtgctaacgaagttaactctatttaaacaagtcactccatgtaaactcagttaatgtaagttgatggccctaaaatgaatattttttgagtttctgcttatggctttcccaaayaaaattgcttctttaatcatgagaaaaattcacatattatctaattaatgtgtacaattttgaattctccttcttgtatatcaaataagtaaaccagttgtgttttttaaagcaaactaaatactacctgctaaaactatttgttgaaggccaaataattaaaaaaaaaattagagccactttagtagaaacaagaataaaaggttgaatctcatagtaatttagcaatatctaccatggacaaatgaagtaatggaaccaactgtgatgcaatgaactgtgcattctcgctgactctgcatctgcatcctcaccctgctcttatcaaaaggtgacttcgaagtaaaatgatgttataggaactggcccttaacgtcaggtgcattgtcctgagacaggaaatctggcaaccgttgtaagtgatgtttctataaaagtgcaaccaaactgtggaagaataagaaaggaacaatttttttcagtgtaaacaggttctcttattttatatgatcagaatctataataagtcattggtacaaaaacgaagaaaagaatcagaatgcaaaagatacatgaaatgtttaactttaaacattaaattataataattcctaaatctgttgatgaatagtcaagtatcccccttttttattagtagctgtgtcatctttctagaatcagtcgtacctataattctttatctataattttctatttaaatgtgtttaaagtcgagggagtagagacattttcaaaacaatctttgctgaattcttgtaaatgtctacattttatctgattaggacagaaaccaattttttacctaagttgttggtattctttcagtaatatgaatataacat

SEQ ID NO: 720801 - DNA, 1170 bp, Homo sapiens
ggcctcattttattttatagagatctgataattaaactgcaagatataaaaagaccctggttcttgctacaggaatactttagcaacaacgtgtatatcagtaagactgtaactataaaaagaggatctaaaattatcattaagataaacattgtacttctaaattgtaaaatagtaatttgtgcaaatatttgtgctaacgaagttaactctatttaaacaagtcactccatgtaaactcagttaatgtaagttgatggccctaaaatgaatattttttgagtttctgcttatggctttcccaaacaaaattgcttctttaatcatgagaaaaattcacatattatctaattaatgtgtacaattttgaattctscttcttgtatatcaaataagtaaaccagttgtgttttttaaagcaaactaaatactacctgctaaaactatttgttgaaggccaaataattaaaaaaaaaattagagccactttagtagaaacaagaataaaaggttgaatctcatagtaatttagcaatatctaccatggacaaatgaagtaatggaaccaactgtgatgcaatgaactgtgcattctcgctgactctgcatctgcatcctcaccctgctcttatcaaaaggtgacttcgaagtaaaatgatgttataggaactggcccttaacgtcaggtgcattgtcctgagacaggaaatctggcaaccgttgtaagtgatgtttctataaaagtgcaaccaaactgtggaagaataagaaaggaacaatttttttcagtgtaaacaggttctcttattttatatgatcagaatctataataagtcattggtacaaaaacgaagaaaagaatcagaatgcaaaagatacatgaaatgtttaactttaaacattaaattataataattcctaaatctgttgatgaatagtcaagtatcccccttttttattagtagctgtgtcatctttctagaatcagtcgtacctataattctttatctataattttctatttaaatgtgtttaaagtcgagggagtagagacattttcaaaacaatctttgctgaattcttgtaaatgtctacattttatctgattaggacagaaaccaattttttacctaagttgttggtattctttcagtaatatgaatataacat

SEQ ID NO: 720802 - DNA, 1170 bp, Homo sapiens
ggcctcattttattttatagagatctgataattaaactgcaagatataaaaagaccctggttcttgctacaggaatactttagcaacaacgtgtatatcagtaagactgtaactataaaaagaggatctaaaattatcattaagataaacattgtacttctaaattgtaaaatagtaatttgtgcaaatatttgtgctaacgaagttaactctatttaaacaagtcactccatgtaaactcagttaatgtaagttgatggccctaaaatgaatattttttgagtttctgcttatggctttcccaaacaaaattgcttctttaatcatgagaaaaattcacatattatctaattaatgtgtacaattttgaattctccttcttgtatatcaaataagtaaaccagttgtgttttttaaagcaaactaaatactacctgctaaaactatttgttgaaggccaaataattaaaaaaaaaattagagccactttagtagaaacaagaataaaaggttgaatctcatagtaatttagcaatatctaccatggacaaatgaagtaatggaaccaactgtgatgcaatgaactgtgcattctcgctgactctgcatctgcatcctcaccctgctcttatcaaaaggtgacttcgaagtaaaatgatgttataggaactggcccttaacgtcaggtgcattgtcctgagacaggaaatctggcaacygttgtaagtgatgtttctataaaagtgcaaccaaactgtggaagaataagaaaggaacaatttttttcagtgtaaacaggttctcttattttatatgatcagaatctataataagtcattggtacaaaaacgaagaaaagaatcagaatgcaaaagatacatgaaatgtttaactttaaacattaaattataataattcctaaatctgttgatgaatagtcaagtatcccccttttttattagtagctgtgtcatctttctagaatcagtcgtacctataattctttatctataattttctatttaaatgtgtttaaagtcgagggagtagagacattttcaaaacaatctttgctgaattcttgtaaatgtctacattttatctgattaggacagaaaccaattttttacctaagttgttggtattctttcagtaatatgaatataacat

SEQ ID NO: 720803 - DNA, 1170 bp, Homo sapiens
ggcctcattttattttatagagatctgataattaaactgcaagatataaaaagaccctggttcttgctacaggaatactttagcaacaacgtgtatatcagtaagactgtaactataaaaagaggatctaaaattatcattaagataaacattgtacttctaaattgtaaaatagtaatttgtgcaaatatttgtgctaacgaagttaactctatttaaacaagtcactccatgtaaactcagttaatgtaagttgatggccctaaaatgaatattttttgagtttctgcttatggctttcccaaacaaaattgcttctttaatcatgagaaaaattcacatattatctaattaatgtgtacaattttgaattctccttcttgtatatcaaataagtaaaccagttgtgttttttaaagcaaactaaatactacctgctaaaactatttgttgaaggccaaataattaaaaaaaaaattagagccactttagtagaaacaagaataaaaggttgaatctcatagtaatttagcaatatctaccatggacaaatgaagtaatggaaccaactgtgatgcaatgaactgtgcattctcgctgactctgcatctgcatcctcaccctgctcttatcaaaaggtgacttcgaagtaaaatgatgttataggaactggcccttaacgtcaggtgcattgtcctgagacaggaaatctggcaaccgttgtaagtgatgtttctataaaagtgcaaccaaactgtggaagaataagaaaggaacaatttttttcagtgtaaacaggttctcttattttatatgatcagaatctataataagtcattggtacaaaaacraagaaaagaatcagaatgcaaaagatacatgaaatgtttaactttaaacattaaattataataattcctaaatctgttgatgaatagtcaagtatcccccttttttattagtagctgtgtcatctttctagaatcagtcgtacctataattctttatctataattttctatttaaatgtgtttaaagtcgagggagtagagacattttcaaaacaatctttgctgaattcttgtaaatgtctacattttatctgattaggacagaaaccaattttttacctaagttgttggtattctttcagtaatatgaatataacat

SEQ ID NO: 720804 - DNA, 1170 bp, Homo sapiens
ggcctcattttattttatagagatctgataattaaactgcaagatataaaaagaccctggttcttgctacaggaatactttagcaacaacgtgtatatcagtaagactgtaactataaaaagaggatctaaaattatcattaagataaacattgtacttctaaattgtaaaatagtaatttgtgcaaatatttgtgctaacgaagttaactctatttaaacaagtcactccatgtaaactcagttaatgtaagttgatggccctaaaatgaatattttttgagtttctgcttatggctttcccaaacaaaattgcttctttaatcatgagaaaaattcacatattatctaattaatgtgtacaattttgaattctccttcttgtatatcaaataagtaaaccagttgtgttttttaaagcaaactaaatactacctgctaaaactatttgttgaaggccaaataattaaaaaaaaaattagagccactttagtagaaacaagaataaaaggttgaatctcatagtaatttagcaatatctaccatggacaaatgaagtaatggaaccaactgtgatgcaatgaactgtgcattctcgctgactctgcatctgcatcctcaccctgctcttatcaaaaggtgacttcgaagtaaaatgatgttataggaactggcccttaacgtcaggtgcattgtcctgagacaggaaatctggcaaccgttgtaagtgatgtttctataaaagtgcaaccaaactgtggaagaataagaaaggaacaatttttttcagtgtaaacaggttctcttattttatatgatcagaatctataataagtcattggtacaaaaacgaagaaaagaatcagaatgcaaaagatacatgaaatgtttaactttaaacattaaattataataattcctaaatctgttgatgaatagtcaagtatcccccktttttattagtagctgtgtcatctttctagaatcagtcgtacctataattctttatctataattttctatttaaatgtgtttaaagtcgagggagtagagacattttcaaaacaatctttgctgaattcttgtaaatgtctacattttatctgattaggacagaaaccaattttttacctaagttgttggtattctttcagtaatatgaatataacat

SEQ ID NO: 720805 - DNA, 1166 bp, Homo sapiens
agtttttcagagtgttttaattgtatccaaacttcttataatcaaactatatttaagggttttataataacataaatggaaacttaaattcttgtctagtttttcctttattgtaggaaatttacttattaactaaaataagtttattgtctcacaatagacacatagttaatatttatggattactcagcattgccaagtgatagaaaggtgatttaacttcaataagatactgcttgaaatattttgaaaaatgaaatttttccaggtatattttgtataaacatgtattgaatgatattttgtgagtaagcatttgcagttatcatcacagtgttttccattgtctagtgattcatgttatttgaaaaataattatggtctcaccaaaatgataaaaaaactatagtaactttttagctaagtaaaacaaagtagaagtaacaaattaaaagcaatagatgaaaaataaactgatctgtgccatgtgtcttccttcctttgtataagagaattaagaaactttttgcttgttttatttttttgcattttaataactttattgaaaagtatatcttctagtaacaaacataagtaacatatctgatatagtaggttagattacctctgtcaactcaaaattaaccctggtatttccaaaatattgaaatgtgtcagccatatggaaaactgtggataaggatatcccttatccacagcacataagggatatccacaaaaacatggtttatacatttgttaatgataataagtactgtagccccttggtttattgtatagcttttattctacatgcagaactccccactgccccagcctgatgcttcatggaaagtacagatgaccattttagctcaaactgaaatgaagcaacaggtttaatctaaaatagtttttgggtttttgttgttgttttgtttttgcatgttttcttttctccttatacacggctcggtatgctttcaataattatgaggggacattattataaatacagagcaagtgatggtaacagatagaatattttatgtccaatttggtcagctttaaccacccaagtacacttctaatatgtcaatcactcatgtggcaaacttgatgacatcttatttaggctcccacgcatgwgtgcagcattagttgcc

SEQ ID NO: 720806 - DNA, 641 bp, Homo sapiens
aaaagtaaagcagtgtcaatcacttacatttataaataaacttagacctaggaaaatgaagccacttgccacaagccacagaactaatcagtagcaggtttggtagaagaatgcaaacctcttaactcccagtcccgtaatgtttctacacattgaatagcatataattgcaaagaatacaccaaagtaactgtgttaatttctcactagtcacgtcagcaggaaaactcaggtttaacaaataacaaattggaaacagccctcaaggcaccactccaaagctggtctgccagtytaggagcctgtgatcccaagttgtgagtcagagccattccaatgagtcacattgcaatgctggccccctgggcatctcactgtatttgtaggagcaattccaaataagcagacagatgggctccatgcagaccataagccagaaagcctgctcctgtatgcttgcctggggatgctgaaagtggttacctgtcatgagtgatatatatatatatatatatatattccttctactcacctgtacctgctacagaagaagtcagattaggtaatttcctaccctagagcgacttgagcagtaggtatcttgctccaagatatccccactagtgtcaattcaaagtttc

SEQ ID NO: 720807 - DNA, 641 bp, Homo sapiens
aaaagtaaagcagtgtcaatcacttacatttataaataaacttagacctaggaaaatgaagccacttgccacaagccacagaactaatcagtagcaggtttggtagaagaatgcaaacctcttaactcccagtcccgtaatgtttctacacattgaatagcatataattgcaaagaatacaccaaagtaactgtgttaatttctcactagtcacgtcagcaggaaaactcaggtttaacaaataacaaattggaaacagccctcaaggcaccactccaaagctggtctgccagtttaggagcctgtgatcccaagttgtgagtcagagccattccaatgagtcacattgcaatgctggccccctgggcatctcactgtatttgkaggagcaattccaaataagcagacagatgggctccatgcagaccataagccagaaagcctgctcctgtatgcttgcctggggatgctgaaagtggttacctgtcatgagtgatatatatatatatatatatatattccttctactcacctgtacctgctacagaagaagtcagattaggtaatttcctaccctagagcgacttgagcagtaggtatcttgctccaagatatccccactagtgtcaattcaaagtttc

SEQ ID NO: 720808 - DNA, 1012 bp, Homo sapiens
tgtaatttcaaaaagacacatcccaagcttgtgaaaattattgtttttccaattgggagaaaagagacaacatatactactggcttaggagcaattagcaccattctagctctgttgccatccctaattatcatggaatctgctctttggcttgcagtttccttacccataaaatatcaggtttagctggattatctctaagatcctgtatcacactacttttatgctcctcttcaaatcctcttggtctcaatcagttctgactttggcctctgaaacaggtactcacaggctttgatcagcttcttgcagatgtacctccctggggccatgctatagccctctctgtttctgccctggagctgtgcttatactagaatctgcttgcatgaccctgcctgggactcagcatgcacaacctggaagtcccctttcatcctctggaagatgattctgaatgcaattcatgagcctactccaaagctcttgcagaattgagagtgagcgagtggttctgtggtagccagcttaacaaatcttttattgactacacttctttcatgtttgattccctctcttcctcattcctcataaattactctcacgcaaggctttgtcttacattctcagttgaagatcacayaagctaagagtggcgccttccacagtcaggtcgttgactctatgatctagtaaaagtgactctaagaacatcttggtggggctgagttggctgaataaattcctcagaccctttccaggcttcccagttcaacttttggaaagttgctaagataattgttggatactcctttaggaagtgttgcatatttacaaaagtcaggaagaataaaaacaggcatttaaagggttattctaatcacccattaaggactacaatctcacttttctaaaattagttggaaagagattttgaactaaagagctcaaatttcaaggcattgtaatctttatcgtgagttttccaaatacctgagaaattatatgttca

SEQ ID NO: 720809 - DNA, 1254 bp, Homo sapiens
tgaatgaaattttttctactattaaatgagccgactggccaggcacggtggctcaagcctgtaatcccagcactttcagaggctgaggtgggcagatcacctgaggtcaggagttcaagaccagcctggtcaacatggcgaagccccgtctctaccaaaaatacaaaaattagccaggcatggtggtaggtacctgtaatcccagctactcgggaggctgaggaaagagaatcacttgaacccaggaggcggaggttgcagtgagctaagatagcaccgttgcactccagcctgggcaacaagagtgaaactctgtctcaaataaataaataaataaataagccgactgaaaaaagtaaacaaaatgaaattaataactttggattgtcaaaaaaacactgtttagaaaatgaaaagacatgccacagattaggaaagaaagtttgcaaaacatatatcttataaaggacttgtacccataatatatagtttccataatttaatgtataaagcaaaaatctcaattaaaaaatagacaaaatatttaaatagacccgaccaaaaaatatattaggtggatggaaaaaaaaaaccgtgaaaaatgttcaacatcattactcattagaggaacacaaatggaaaccacagtgtcataccactacacacctgttagaatgcctcacatcacaggaggtcaaagggcctcacctaactccaaaagggcagggaggtatgatcctagcctatgctcaaaaggaatgcagcaaatatttagccaacagcacagatgactatctcacaaggtcttcagggctctacatggtccttcctttaacaactactcacacctaattgtaaaacatctccgtcttgctccccgtccttcgtcttctcagccttttttaaaaatccttcatactttccatgttgctttcaaccactggactttctcacataagtgatcctctccctcgagttttcttatctctcttgacctagtccagttctacccatctgaaaacacagytgactcttaattcataggttaaatgcccttcctccttcagaatggctggaaatttaatacggattgtaaaagtatgtgattaacatctctttatctactagcccataaagctctgagggaatgaagactacccttgattttactttcccttatctctttagtacctagtacaactgtggcaccttttaggtattcactcaacattgttgaatcagtgtgtgaatgaa

SEQ ID NO: 720810 - DNA, 1239 bp, Homo sapiens
caatagcatgacgctgtgttaaaattttaagaacatttccactaaagtccactacctgtgctatgcaacagtcaagcaatcttaattcataactaatgcaaaaaggcaaggaacagaaattagatataaatattacattatattttagttatataatatgcttatcataattgaaaattcaagataatctgaagcacaacaattagaaataaataatactggagtttagcaaggttgctatatgaaagttgaacataygaaattgaaatgggaaaagttcccagatccggaaagggacatgtgatgggggaggggcttgcttcttcagtgcccggctgctcaaacctctaggggagcatacagacaaacagtccatggggctctaaccccacggcagtgactagaggtggatgtttacagctcctgaagccccagtgggcgtgtgttacagggtgctcttttagttttgccgtctacaggcttgtgttaaccagctcatagacccgcttacttaccacaaggacggagggatttctgtatcccagggtttcctgccgtggtgtaccggaagaaccagatcacgcgagggcttggagaatgagtccgaggttttactgagtagaagtagttctcagcagatgggggagccagatgggagatgcaccaggggtccctctgcttagcggcccgtgctctcctcctcctgatctcgctaaactccacatcgttcctccagtcaatggcctgctgtcctgccagtgtctgtcatgtgctcttccactggcatgctcccctcgacatcctctcgatgtccggctgcttgtgtcttcttccgctgatcccctcctctggacgtccagacgcttgtgtatctatctgcctgctagggtctcagtttttatccgcccaggatgggggtgtggtgggccagggtggttttggaaaatgcaacatttgggcccaaaggcaggagtgcctgtcctcacctaggttcgtgggcacaagccagagggtgaagccctagccaggaaccggccttgctctacccagcacttccctgtcccccgttcggtatcatttaaagggaccatgctcgtcccttcccagcactcctgtatcaaaatcaatagcatttctgtacactaggaaaaatgtactagccacaatagaacagaaaccctaatttgcccaacagtaaatcccacaaaagatgattttaaaaacttttagataaaaaaa

SEQ ID NO: 720811 - DNA, 633 bp, Homo sapiens
agtgtaaaatatgaggggggtatattaaaaagataaaaggatctttgtaatcctaaggagctaggaagatagtctactagaagatataaatatagggattttgaaagctctgtgttcagaaatggcatcaaagtaataaagttccaatagagaaaaggaattacaattcacattacagtatttagataggactgtaagagaaataaatagctcttccttatttctcgtttaaaatttcagacaaatttgaccttcaaagatatgtctgaacaataacaatagaacataatagaaaaattgttctgactgcaaagaaatagacctttcccaacagtcacttcaaaatgcaaaccagaatgtatggtctatattgtttttaatttaatatatctatgtgaacaagcatacttcttcctcattttcattgcataaatttttacttggaatgcctttgaagttaaaccaatgtgcttcaaagttacatgtatgtatggtttttttttttttaccaactgtacatatgtctacaatttcccaccaaatatggtatcaaatatgtagaatctgagrtgttataaaagcattcaaaatcatattttcctcataaaggaaacacaaaattgaccttaatag

SEQ ID NO: 720812 - DNA, 1224 bp, Homo sapiens
tgtttatagtattctctgatggtatttctgtggagtaagtagtgacatcctctttatcattttttattgtatctacttgattcttctttcttttcttctttattcatctagccagttgtctgttttattaattttttttwaaaaaaaaacagctcctggattcattgatgttttgaagagtttttagtgtctctatctcctttagttcccctctgatcttggttatttcttgtcttctgatagctctgggaatcccactttctactttttttttttttcctgtaagaccaagacaatcccaaatatcagttagctctggtaagcaaaattctgcctttggaaaatggactcgttctccctttgatattcttccttcattcacaaaactcaaagggcatagcttatagaattgggcccataatactggaaaccaaagtatcctccagtttaagggtttatgagaatcaaggatcccatttcagaaataaagcctcaggggaaggaatttagaagacttgaatgagtagggagtccttaaagagtttatctcacctaaaatagtttctatttctgcctcctctttttaacttttctttccccatacttctctgtaattcctaaagccaggtttcagggatagctctctgtctttcctatttaacaagaatttttagcagggtgtatgggcttcccagtgtacatttctcagcttcccttgcagctaggtatggtcatgtgactaaaatctggccaataaaatgtgaatagaagtgatatgtgcaacttccaggtcatgtccttaaaggagagggacaggtccctcctttgctttattcccttcccactggcagaatgtgatggtgcaggtagaagagggatcacccactttggctcatgtgatgggagtcacgtgttaaagacggcaaagcatcaagagagaaggatcttaattgccaataaaaatatgcggccactacacctaccctagactttcatgtaagagagaaatagacttctgtcttgtttaagtcagtattagttttagtatcttggttaaatcatcctcacctatgtcataacaaatataccagcttaacaagtatgaatcaccaatggcatcaggggaaagcacagtggttaacagtgaggctttggtatcaggtagacctggattaacttgtaatgcccatgcaccacccacatctatggctgagcctcagtttt

SEQ ID NO: 720813 - DNA, 1224 bp, Homo sapiens
tgtttatagtattctctgatggtatttctgtggagtaagtagtgacatcctctttatcattttttattgtatctacttgattcttctttcttttcttctttattcatctagccagttgtctgttttattaatttttttttaaaaaaaaacagctcctggattcattgatgttttgaagagtttttagtgtctctatctcctttagttccyctctgatcttggttatttcttgtcttctgatagctctgggaatcccactttctactttttttttttttcctgtaagaccaagacaatcccaaatatcagttagctctggtaagcaaaattctgcctttggaaaatggactcgttctccctttgatattcttccttcattcacaaaactcaaagggcatagcttatagaattgggcccataatactggaaaccaaagtatcctccagtttaagggtttatgagaatcaaggatcccatttcagaaataaagcctcaggggaaggaatttagaagacttgaatgagtagggagtccttaaagagtttatctcacctaaaatagtttctatttctgcctcctctttttaacttttctttccccatacttctctgtaattcctaaagccaggtttcagggatagctctctgtctttcctatttaacaagaatttttagcagggtgtatgggcttcccagtgtacatttctcagcttcccttgcagctaggtatggtcatgtgactaaaatctggccaataaaatgtgaatagaagtgatatgtgcaacttccaggtcatgtccttaaaggagagggacaggtccctcctttgctttattcccttcccactggcagaatgtgatggtgcaggtagaagagggatcacccactttggctcatgtgatgggagtcacgtgttaaagacggcaaagcatcaagagagaaggatcttaattgccaataaaaatatgcggccactacacctaccctagactttcatgtaagagagaaatagacttctgtcttgtttaagtcagtattagttttagtatcttggttaaatcatcctcacctatgtcataacaaatataccagcttaacaagtatgaatcaccaatggcatcaggggaaagcacagtggttaacagtgaggctttggtatcaggtagacctggattaacttgtaatgcccatgcaccacccacatctatggctgagcctcagtttt

SEQ ID NO: 720814 - DNA, 1224 bp, Homo sapiens
tgtttatagtattctctgatggtatttctgtggagtaagtagtgacatcctctttatcattttttattgtatctacttgattcttctttcttttcttctttattcatctagccagttgtctgttttattaatttttttttaaaaaaaaacagctcctggattcattgatgttttgaagagtttttagtgtctctatctcctttagttcccctctgatcttggttatttcttgtcttctgatagctctgggaatcccactttctactttttttttttttcctgtaagaccaagacaatcccaaatatcagttagctctggtaagcaaaattctgcctttggaaaatggactcgttctccctttgatattcttccttcattcacaaaactcaaagggcatagcttatagaattgggcccataatactggaaaccaaagtatcctccagtttaagggtttatgagaatcaaggatcccatttcagaaataaagcctcaggggaaggaayttagaagacttgaatgagtagggagtccttaaagagtttatctcacctaaaatagtttctatttctgcctcctctttttaacttttctttccccatacttctctgtaattcctaaagccaggtttcagggatagctctctgtctttcctatttaacaagaatttttagcagggtgtatgggcttcccagtgtacatttctcagcttcccttgcagctaggtatggtcatgtgactaaaatctggccaataaaatgtgaatagaagtgatatgtgcaacttccaggtcatgtccttaaaggagagggacaggtccctcctttgctttattcccttcccactggcagaatgtgatggtgcaggtagaagagggatcacccactttggctcatgtgatgggagtcacgtgttaaagacggcaaagcatcaagagagaaggatcttaattgccaataaaaatatgcggccactacacctaccctagactttcatgtaagagagaaatagacttctgtcttgtttaagtcagtattagttttagtatcttggttaaatcatcctcacctatgtcataacaaatataccagcttaacaagtatgaatcaccaatggcatcaggggaaagcacagtggttaacagtgaggctttggtatcaggtagacctggattaacttgtaatgcccatgcaccacccacatctatggctgagcctcagtttt

SEQ ID NO: 720815 - DNA, 614 bp, Homo sapiens
ctttctgtatcattatctttgttcacagacacacacgcagaaaaattgttccttttattttactttataaaactgacattacacatattactctgaaatgtgcttttaaaaacttactaacgtataaagaacatcttttcaagtcttgttctttttagtaattgtaattgcagaataagtctaacaaaatatagacacccatttgcctattcataaggctttaggtgaatcaagatttttcaaacrtaacattcaagaattaaataaacatccttctacatattttattatatatttgtgcttttacttctgttctgttcaataggctctcataaatgtgattatcatgtcaaagggtaagtgaatttttagtctttaataagcacagcttgattattttccttaaatcttgtagcaatttatatttccttcagtaatatattggagtattttcattcttaacgttatccccagcgctagctattatcaaggtcttaagttttgtcaacaatgacaactgatatacctcaacactgaacatacctcaactgaacatacctcaacactgatgtgttattgttgctttaatgacatttgcgggactgtctctggag

SEQ ID NO: 720816 - DNA, 614 bp, Homo sapiens
ctttctgtatcattatctttgttcacagacacacacgcagaaaaattgttccttttattttactttataaaactgacattacacatattactctgaaatgtgcttttaaaaacttactaacgtataaagaacatcttttcaagtcttgttctttttagtaattgtaattgcagaataagtctaacaaaatatagacacccatttgcctattcataaggctttaggtgaatcaagatttttcaaacataacattcaagaattaaataaacatccttctacatattttattatatatttgtgcttttacttctgttctgttcaataggctctcataaatgtgattatcatgtcaaagggtaagtgaatttttagtctttaataagcacagcttgattattttccttaaatcttgtagcaatttatatttccttcagtaatatattggagtattttcattcttaacrttatccccagcgctagctattatcaaggtcttaagttttgtcaacaatgacaactgatatacctcaacactgaacatacctcaactgaacatacctcaacactgatgtgttattgttgctttaatgacatttgcgggactgtctctggag

SEQ ID NO: 720817 - DNA, 645 bp, Homo sapiens
gacacctgtaactttttactgcaggcacctgcaattccctatctgagggcttttttggccacaggacatgaaaggacccacaacctatgggagttgatggagagatgccccagcttccttgacctacagatggggatagcacgactctgaggtgtgttccatgcagcctcccagagctggagttccaggcacccatgggggtgacctggtccttagccaccctgcattggctgccttccctcttctgtcccacttcctcatttcccttgagtgcttcctaggatcacctcccgaataaattgcctgtgctcaaattctgctcttggggtctattgctaaaggaatccaaaaggaggcaaggaacacctatgagtccccctggatcacagatgatcccagaggtctctgaggaaagtctcaaractgatcaggacatgttgacagcagaaaaatttcatgaaactcaagagcaaagctccctgggcccactccccagacagagcctcagcaggggcagtaagaacccaaagaggaaatgggcatgtggggtagcccagaagagactttctctgtctcctggagagctggctccccaggcatagccagaagcctcagttttctgatcccacaggcacagcaggaaaa

SEQ ID NO: 720818 - DNA, 1842 bp, Homo sapiens
accatggaatgctactcagccataagaaagaatgaaattatgtcttttgcagcaccttgtatggaactggaagccattatcctaagtgaagtaacttggaaatagaaaaccaaataccacatattcctacttataattggaagctaagttataggtacacaaaggtgtactgtgtggtgtagttgacactggagactcagaaggggggagagttgggaggttcctataatttatccatgtaaccaaaaaacacttgtattcctaaagctattgaaataaaaagtaaaaataaaaatgtatactacaacaacaacaaaagtagctaacaataaaaatattgattataaatgcagtcctgaaaagctaatgtgtcatgagatactgatttaatatcaaacagaatattactgttgtttttaggttcagagaagaaagcaagctatgtagtcaagtgtagccacaaaattcttactggactaagtagaatttatgattgcctatgaaggaaagggagaatttctataggcctgggagggccctgctactcagagggaataaggagaacataagcaagaagacagaggcaggaatatgtcattcaggatggaggctactgagtatatcaggcatatgggaagagagggtttgtattaaaaggtatccttggagaggctttgaaagctttaaagaataaattagtataaaattcatatttttattcaacaaatatttattggatgatcatgattgtcctctgacagtactatactgtgagggttataatagtccctaccttttagaartggtatgaagctgtggatctcaagtgggccactatggggttgctgaaaagggcttgaaaatccatacagatactaacctctgtctgtagattaaataaatggtaggttttacatatccatgtccatatttattattttaaaatttgcataagttttgttgtgattaataaaaatggaaaatcacttttgctttttgctgatttttttaatacagtggtacaacttacctgttgcagttgggcaaggaaagtgagattctttcccctgactttgtattttcacgtggagagttatggataagtgtgactgggcttctctctgttcctgttcttttctcagggaagttaactgactcctaaacttgggagcagaaactgagcttgtgtcacttattctctttgtgatcttctcacctgcagaaagtatgtaaggtaagcctagcaataaagaactcgcttgggagacctgatgccagtctatgtagttctagagtgtaggagtaggaagcctacactgccaagggcctaaaccagtatctgcttcatcactagccttactgatgttttaaactcttttgcatgacctctttgccacagtctggcaatctgtggtcactaggacagttctgactcactgcaggccaaatctggacaagcttttctatttacatattgtacgtggctgcttctgtgctacaacaccaatactgagtagttacaacagagaccatgtggcctgcaaagcctaaatgtttaaaatctctggttggtttcttgaaccctggactcttatctataatttagagagtaaataagaaagtcatttattatactgtctacattcctaaattaatcctaatattatcacttagagaatctgtaaaaatttttacttcgaaaaaaatgttttagtattcagaatgatgggaactcctggttaaaatggagctaaattagatgggagtttggagattatttaaatatgtaacataggtatgagctgatgaagcttgaactagcttagtgattatggacgtaga

SEQ ID NO: 720819 - DNA, 597 bp, Homo sapiens
ttgaaatgcattattaagaatttaaagtcgaaacctttatgtgctgaggcagtcaacatgatttagtttagtagcattcagacacttggatttgtttaagtttgggatctgttgtgcctcaactggtttttgaaaaagtgtttagatgtcccagattcttcagaggattagtttggcactggtaacactgtagaaaccagatgtgtgaatatctgtaaagttcagtgtgatagcatgaaaacaatctcaaggataggataagaaaagcaaatagaaaaactgtaacacaaagttcataaaaatgctcccttgtatagaggcaaggaacaacaggctaacctatgagacttaatcatgcactgtgtaaatttaaattcagtcaagttatcttgcatgctttggttaatatttgagtaggcaaatttgcaatactaatgcatgcaatatttttgtacctgaggttatacgttttgcttttaaaaaattgcttttttacaaactttatgccagagtttatctatgaacactctttaaaaaaaaaaaaaaawatatatatatatatatatatatatctacttcttagttcaaaacagttta

SEQ ID NO: 720820 - DNA, 634 bp, Homo sapiens
cctataatcctagctactggagaggctgaggcaggagaattgcttgaacctgggaggcggaggttgcagtgagctgaggttgcaccactgcacaccagcctgccaacagagggagactccatctcaaaaaaaaagggcggggtggggggggggggtctctctagatgtcccaggaaaacagtgagggctcagcagagattttatgaatgaataaaatggtatctccgatgacattgggaggtagtggggtaaaagagaggaaggtacagacagcggaaagccagagctccctggaggatctggctgagaggcagaaaatggccctcagcgctctcggaacggtccttccagaagaactgatgaaakagctactacgccaggcacgtggcagggaaagcccaacaggaaaggcaaaagggaaaacccaacgccccagccctgacacgggcctgactcatgcacacagagtgtgtggtaagagaacgccaaagagtccaatcatgcggcaagatgttcaacctcacagtaagagaactgcaaattcaaactacaatcaggcagcctggtggctccccaaaaagttaaacgtagagttgccatataaccagcaattcctctcctaggtatagaccca

SEQ ID NO: 720821 - DNA, 1742 bp, Homo sapiens
cttgagcctgggagttcaaggctgcagtgattcttgattgcgccactgcactccagtctggtagacagaccctgtctcaaaacagacaaacaaacataggtagtgccttctgaccgcatccttacatggcagaggggctagacagctctttggggtcttttttttttttgagacggagtcacagagtctcactctgtcaccaggctggagtacagtggcgctatcttggttcactgcaaacttcacctcctgggttcaggcaattctcctgcctcaggctcccaagtagctggggctacaggcgtgcaccaccacacctggctaatttttgtatttttagtagagacggggtttggccaggatggtctcgatctcctgacctcatgatccacccacctcggcctcccaaagtgcttggattacaggcctgagccactgcgcccagcctgaggtctcttttataacagcactaatctcattcatgagagctgtatcctcgtgacctactcttctcccaaatgtcccatctcctaataccatcacgttggggattaggttttgacatatgaattttggaggagcacaaacatcctgaccgtagcacctccctttccccagcaggcagtggaacgctctcctgatggtcagctcctctgtggacacacacccaccactttcccctctctccagctatatgacgcgtgtctcccacctccccacaccctcccttttcctttggactcagctttcctcctttcacatcctccctctgacacctgtacttctgcctttgcttttccaaggccgatcacatccctgttctattctgttagtcacactcagagccttacttacatgggatgtgtgccatcgtgagggttttcactgtgggtctgtacatccttgtgactgcctattgtttactgcaggatcaagcggtggcctgagtgcctctcctttctagatagccttttgtttttctctcccgatgcttgcttcttttcttctccctggcttcattttacatcagtgctatttagtttttgttttttttgttttttgttttgatagggtctcgctctgtcacccaggctgagtgcagtggcatgatcacttctcactgcaggcttgatcttcctgggcgcaggtgatcctcccaccccagcctcttgagtaactgggaccacaggcacgtgccaccwtacctgactaattttttgtgattattattattattattattattattattattattattatttttgagactgagtcttgctgtgtcacccaggctcgagtgcagtggcgctatcttggctcactgcaagctccgcctcccaggttcacgccattctcctgcctcagcctccccagtagctgggactacaggcgcccaccaccacgcccggctaattttttgtatttttagtcgagacagggtttcactgtgttagtcaggatggtctcaatctcctgacctcgtgatccacccgcctcggcctcccaaagtgctgggattacaggcatgaggcactgtgcccggccctaattttttgtgatttttatagagtcagggtttcgccgtgttgcccaggctggtcttgaactcctgggctcaagaaatccacccgcctcagccttccaaagtgctgggatcacaggcatgagccatagcgcccagccagccatctgtgctatgagttaaggagataagagttaatggttataaccattttatg

SEQ ID NO: 720822 - DNA, 647 bp, Homo sapiens
ggctgtcctcatttctcacagtgtttccttgtatttaggctgctcaaacagcggaagatgccatgcagataatggaacagatgaccaaagagaagactgagactctggcctccttggaggacaccaagcaaacaaatgcaaaactacagaatgaagtaatcagatttaaatagctttttatacaaagaacagcttaccaacttggtagaatgtttggtcactgactcaggattgcttatgtttttgaagtgtgtgactttacacaggtttgaaatgcatgccagagccacgataatcttaaataaagtgtatcacttcattacttattaggatcaactttacaaattgaggaaaaaatcctaatagtgtggctaaggtgactgtttactgatggcactagtgagaggaggtactgatggcctgctctagcttttgtatccttsatcttacatcacacacattgttttttctcttctctttcccaactttgagccactaagttttcttcctcagccctgagtctgatgtaggccttttcttggcccaattcagtactgatttccttttgtgtcatcttgaatgagtcacttttggagcagggacaaatatgtggcgtcaagatattttgattctgtccacaagtagca

SEQ ID NO: 720823 - DNA, 1278 bp, Homo sapiens
gcaatatgaggataatggcaccaataatgttttgagcagccactgaccaattgtaaatctaaattattgttttcagagtgcgttcgttctgggaagccctctattagactcaccaggggtattttaacacaactgagggtttcaaggacatacacagacttcctaaatcactctctaggagttgagagtccaggaatatgcaggcaaaatcagctcacctggtgtttctacagttccaacatgctgaattaacaaatatttttaaatggagtgtttcttcttctaaattcttgtaataccttaaacaaccttaaagaatgtcattcttttcctcattaaaaatgaagctccccaaaggcctgagggtttcgtttaaatcaagcaggttaaatgagaattgactgtggcaaaattgaagtccatttggggatatgtaaataagtgttcctgaaatgcacttgaatgtctaagatctaagaatttccctcagctcttctataactctttcatgtgattggttttctctccctattctgtctgttcttactctacagttgatggaactctgctcatttgaaaggatttgctaaatggctagagtttctgggtctgaaaggaagacgtttgctgcctgggtggttataagagtctgaacttcctcagctgtagtgtcacagatgcagggaggcaggcacacagagaaacacttctcttcattaataaaggagattaaccttaacatttcttggcagctgttcagcaggcggcttgttatcacgacaagcattttttttaaagactcacaatgataaacaatatgtcacaacagctgtcaaagtgtgttttatgcagtgactttccatacgtagcttaggggggttttttttagaattgtccctgtgactaaccatgtcctgttggctgaaggcagctatagagggtgatatggtttggctgtgtctccacccaaatctcatcttgaattgtagctcccataattcccatgtgttgtgggagggacctggtgggagttaattgaatcatggagtcagtttccccctactcttcttgtggtagtaagtctcacaagatctaatggttctataaggaggaacaccttttgattgattctcattttctctcttgctgctgccatgtaagaagtgtctttcrccttctaccatgattgtgaggcctccccagccgcatggaactgtgagtccattaaacctctttttctttataaattaccccatctcgggtatgtctttatcagca

SEQ ID NO: 720824 - DNA, 1392 bp, Homo sapiens
tctctgattaaaccctgactgacacatggagtgttttattaccatttaataaacatcatgtcaaacctaatgatttacggtcaacataaattacacagggaaggtgagcaaaagaatccctttcctttttgcctctatgctgttctagtttcagcyggcctgagcttccctctcttggactcttcagtctaacagctaacccatatatgacacaaagatcaaaggtcagattcttgggctccattaaggctgctactttaaatgacagcactatttatggactctttattgaagacagatcacccttggaggctgccacaacctttactcataaatcagacatcaagtgcctcttgggggctaaatactgcctctcctgttgaagacatgaaggggtgtaacatatactcaatttgctgccacacaaggatttagaatctgcttactccctcaacctaggactcaaggtccagacaaggaaatttgattttttttttcttcctttttctttccctgccagccacacacaccagccggtgttcccaggggacactggcaactgtatgtaggctgagctttggcgtagaagaaataaataatctatagaagaaaatacgtcagaatattttcttataaaaatgaaggaatgaccgttgcatcattccaagtaccaaaataatacactaattgaaaattttcctctaaatttcaatgttctctaacagagattattctaacttagttgttttcaacagggtcaattttggcaacgtcttgggacttatttgtaggtagtttgtttaatcctctatgcctcaatttccttacctttaaagaaaatagaaaatatagtaacgctataaggttgttgcaaataataaatgagctggccaggaacagtggctcacgcctgtaatccaagtactttgggaggccgaggtggctggatcacttgaggtcaggagttcgagaccagcctggccaacatggtgaaaccctgtccctactaaaaatacaaaaattagttggatgtggtggtgcatgcctgtaatcccagctacctgggatgctgaggccagaaaattgcttgaacccaggagacagacattgtagtaggccaagattgcgccactgcactccagcctgggtgacagagtgagactccatctcaaaaataaataaataaataaaaataataataataaatgagttaatacatgtaaaaaccacttgaaacagtgtccattgtttataagcacttatacgtgctagctattatggttaggtatacaaattgaataaagggactagcagtgtggtgaatgaattccctttgtaacataatttgagttcattctacttgtaatctaatacaaatcttattaagccata

SEQ ID NO: 720825 - DNA, 1506 bp, Homo sapiens
attcccacaattttagtaaagttagcacactgggaatcaagaaagtagagatttagattcctttactattcaattatcacatcattagactttaagcaccggctagcacaaataggaagaaaaacaatttaactyaaagtatttttgtctattttaagaagggatcaatattttgatgtcaggttcaactttagttaatatggattaatacataataataccaagtttctctttgtaatgtacacttcatctggaaattgattttatcatttatttaaaatataagtatattcttggaattatttctggtggaatagcatctggaaactggtgtaaatgggtttctccacagaactgcttcatcacttgcggcggggcctgctgtttcttcagatgcacaggcagattacttcacacagataaatgcaaagcagcattccttccaccatgtgccataacccctcttaaacgatatcttcttacacattgatttacatatcaatggtctttaaagaactatgaaatatatagtgctcttttcagttaatactccatatatccaaaacctgtcctatcgtatgtggaaaaaggtggccgctctgttaaaagtgcaatgctgttttaaccaaggaacagatgttttccctaaaataaggtgtgaattccttaaatacaaatgtgatgcaagagcctcatgcaaaactgagtgacgtcctccaccatgaaatgatgcccggcctgcagtgtgccaggacagcctgcagcagtgcagagtaactcccaatgtcagcatgcaggacagctgccatttttaccaacccagccagccaccaggcttttgtacaaatttagaggctgctcagaccaacaagccacctgcctgaggttttaatattgctaagtcatgagatccctgcttctatggtccatccactagatagaacagcccggagcagtggctccaacttgaatcaaatgaaaggcaatcaaattctaatcaagtcaaatcctgagcttagtgctgtaaatcacagacaaatttgctgacctagccaacaggccagtcccctttcatcccattcctgccctatcttggctttctgccttttccctgaaactgtagcttagaacccagcaagaactggggccgagcctgttcagctgcaaaaggtaggcaccgagcctatgtaaatgaagagcaggccctgtcaaagtactctccaggtcaatcaagtggagaactgattgacgtcaattggagaatactctgaccagggcctgctcttctttaacactcatacctgcatctctttaatgctgagatcttactttcctatggactgtgttcaacggtgatctcttcatgttatgaatgagtcagaattattctgagctctgacggtgacaaatagaatcttgagggatccctaccctcaatcagcctaccatctaattaaagatttgactaaatcttatataattacagctatcctaagaaaagtataa

SEQ ID NO: 720826 - DNA, 901 bp, Homo sapiens
cactgcactccagcctgggcaactggagtgagacgctgtctcaaatacttaagtaaaagtaagctagtttaaataaaaatattaagaaagtgacagaagaggtatgtgaatttgttcatttacttaacaaatacttcctttgggagactcctacctggcaggcatttctgtggagcctgcaaatacaacattgaacaaagaagacaaagaccctggaccttcaaaagacccaaaaaagccctttaagaaacaagttatccaaatggccaataaacacacgtaaaggtgctcaacttcattatatgttggggaaatgcaaaatttaaatccacagtgagctataccaagcacccaccataatggcttaaaaaaaaataaatttcaaamgagatgataccaggatttggcaagaatgcagagcaactgggagttttgtatattgcttgtgggagtataaattggtacagcctctttagaaaactatttggcaatatctgctaaagcgggcccagtagttccattcctagtcacctacccagccgaaaaatacatgtgtttattaaaagacatgtataatctttgagcaataaacaggtctcagaaaatgctaattgaaagaactaaaacctattctggagcaaagaagtagcagcggcaataagacattatccatgtccatgaggatagtagattactgtcattgaacacactttctctgagtgtatactgtgttctggattttatgctggacgcttgaaatacaggactaaatccaaggtgtcccttaacctctcaggaacacacagtcactcaccttacaaccagaaaagctaagccttttgaactttgctcaaagaaatttggatgaatgaacatcaagatgggtaaccttggtttacat

SEQ ID NO: 720827 - DNA, 631 bp, Homo sapiens
  misc_feature 10: n = A,T,C or G
tttagctgancagcaggatcaaaggtagccacctgaagcagagcgtttcctgttttcagcatactccatatcctccttctcaagccatgaaagcaacagcctaggtaagatcatgaaaagtccctttccagctgggggaacagtcccatgtgaataacagctggcaaagtcacatgatgggcaatgtaaaagttccttggccaagctgatgtgacagactaagagcccacctggctaattgttgttgatggtacccaccactattgcagaagaagagtaggcttctttgacttggctatgctgacaattgtgggaatgtagacaaccccacataaaattaaccaaggggggttgttcaaatctttttaaatcagatgatcagagaacgagggaaattctcttttgcaaagctgtaattttcccatggtattttgaagagtttatatggacacattcagttacattcattcactttcaagaaacatctgctatgtcctatcactggctaggtactcactaggcacttgctagaacacagatgatgtgatatgyggggatgaacaggtgatcaacaggtgaaatatggaaaattgagggaaaggctatgccagatggaactatgtaatgggta

SEQ ID NO: 720828 - DNA, 631 bp, Homo sapiens
  misc_feature 10: n = A,T,C or G
tttagctgancagcaggatcaaaggtagccacctgaagcagagcgtttcctgttttcagcatactccatatcctccttctcaagccatgaaagcaacagcctaggtaagatcatgaaaagtccctttccagctgggggaacagtcccatgtgaataacagctggcaaagtcacatgatgggcaatgtaaaagttccttggccaagctgatgtgacagactaagagcccacctggctaattgttgttgatggtacccaccactattgcagaagaagagtaggcttctttgacttggctatgctgacaattgtgggaatgtagacaaccccacataaaattaaccaaggggggttgttcaaatctttttaaatcagatgatcagagaacgagggaaattctcttttgcaaagctgtaattttcccatggtattttgaagagtttatatggacacattcagttacattcattcactttcaagaaacatctgctatgtcctatcactggctaggtactcactaggcacttgctagaacacagatgatgtgatatgcggggatgaacaggtgatcaayaggtgaaatatggaaaattgagggaaaggctatgccagatggaactatgtaatgggta

SEQ ID NO: 720829 - DNA, 527 bp, Homo sapiens
aactgaagaacgattatttgtaaaaggttatttattgtagcagcatagcattttttttgcattgttttccttkcaagaaaggaaactagaaggctagatggagtaggagggaggtttttgtttgtttgtttttgagacagagtctcactctgttgcccaggctggagtgcagtggcacaatctcagctcactgcaacctcctcctcccaggttcaagtgattcttgtgcctcagcctcctgagtagctgggattacaagcacctgccaccacacctggctaatttttgtatttttagtagagacaggatttcaccatgttggccagactggtcttgaattcctgacctcaagggatccacccacctcagcctcccaaagtgctgggattacaggcatgagccatcatgaccagcctgagggagatttttcactgggtactttcatgcctttgaattttgaacttcaagaatgtctgtattagtccattttcacgttgctgataaaggcatacctgagactgagtaat

SEQ ID NO: 720830 - DNA, 1078 bp, Homo sapiens
caagtgagtatggctgtacttcagtacaactctgttatggacacagaaattaaatttcctttttttcttttcttttcttttctttttctttttcttttctcttttttttttttttttttgttttttgttttttgttttttgaggcagagtctcactctgtcacccaggctggagtacagtggcaccatcttggctcactgcaacctccgcctcccgggttcaagaaattctcctgtctcagcctcccaagtagctgggaccacaggctcatgctaccacatccagctaatttttgtatttttagtagagatggggtttttgccatgttggccaggctggtctcatactcctgaactcaggtgatctacctgcctcagcctcccaaagtgctaggattacaggtgtgagccaccacgcctggcctggccttttatctttctatcagaatatagattcaacaaagtccctataactaaacagaaacacagtcatctgtccatctgtgcagtttaggaaggcagcaaaaaactgtatttttataagccaattcagtgtcctacaaagacaatctcatcatagcaatattaaagtttttwaaaaatctatttttttaagatcagatttttttggaggaaacaaaaaactcacaacccaaaggatgggattttacatctcaggacatctcccacataataagtctatagattataaatcattttcaaattttacatgtatttaggagagggacattaatcaatccccatttctattttaacaggggggcaaggtaggggagagggaaaaacagtttggtatctatttggagggagagtagacatgaagagggcaaaccctagcttctcattatctacaatcaatgttttttttttcttaaaaaaaagctttcaatctctctttaaaagcctacttcttagctactagccagtccaccctaattatttaaattcatttggtacacacttttgttcactgggcaaattatattcattatgcccactgctgcagcacgcataaaccaacacccctgcatggctgagcagggcctaatctaggactg

SEQ ID NO: 720831 - DNA, 1487 bp, Homo sapiens
caaattctttctgaggagtgctatttaccttttttattttctgctttgttagcgatgcagaggtttcattagcaaagaacaagtgaattacaaagacagctaatcctacacacacacgaagacacacacatacaatagagaagaaaactaacccattttctcatgaggtagaataaagaaatgagaggtacttttggggtaatgagcttatttttgcatcattatttgaataaattatgttccaggtaatgggtgatccaatcacataatggagttctgtatttttacctgtgaagatatggagccaaacttgtggtatgtcacaaatgtaatgagattgagcccaacagcctttttattggctcaaaaagctcgtatattcccatcagaagaatatcttatatttggaatagtagataagtacaaataaagcttagattatgaggattgatctgtgtaaaagttccaagacaaagacagaaaaattccaaaatacgaatgtgatgactagggctctttgaaagagaccattcattgtctattccacactgaaatgtataacagccactcagtgctaaactaaattcccatagaacgttaaagaagaaatgcagtataccccaaacatctcagctgaaagaggaggaaaaatatagaaccatagaactgaagaagaacatacaaaatttcataggtggtctggagaggccctcccttactaggacccattctaatcagcgggtataagatccagagttatccctgcagtaattgtcaaaaacctttcaaggatttatcccaagaaatacagaaagaaataatttaaaatctaccaaataagttcttagaggttcagtaagcctggtgcacagaagggaagagatcgtcaaatcaaaactattgacttctagccatggcaattcctaatggaagttgccatgaagaaaatattggctcattataaggaaaaaatagactaaaaaataaaacactcttcaatagtgggatgggttttcttatgaactggtgagttcctcatcactatagggataaagcaaagatgagatgagtgttaaatgtcagtccatcgatttattcagtcatgcatttatttaacaaatatttattgggctcctacttatgtgtcaggggatgttgattgagctggaaatatcaaagacatatcaactcaaaaattttataaaagttctgagtttagggcaagaattgtaaatgcaggaattaatcaataatggctgaggcaattctaaatgtatatcttaaataccttaatatctatacttttacaacccagaggattttcatccaatctatgtattggggtaaaattacacaatgctcccaatctcctcacttgtggctttctcttcacctttatcttattgtttagtagttacatttctagacaarttgagtcaggaacattgctttgatgttcttgtttgcatggaaagttgccaggcctg

SEQ ID NO: 720832 - DNA, 782 bp, Homo sapiens
tacaatggtaaaccacagttaataaaaaacatcagaaaagaatgaaactgttatctacaaataattaaggaattttggcttctacaggtcattgttttattgattcattattaatagtagtagatagkctgggcgcagtggctcatgcctgtaatcccagcattttgggaggctgaggagggtggatcacctgaggtcaggagtttgagaccagcctggccaacatggtgaaccctgtctctactaaaaatataaaaattagctgggtgtggtggtgcatgcctgtagtcctagctacttgggaggctgaggcaggagaatcgcttgaacctgggaggcaaaggttgcagtgagcggatattggggccactgcattccagccttgcaaaagagcaagactctgtctctaaataaataaataaatagtagtagtagtagtagtagtggtagtagtagtagtagtagtagtagaagtagtagaagtagtagaagtggaagtagaagataatattcaaggacaactgtgctttgtgtggaaacctttggtcactaggtattttctgtcttttgtgtacatgtattctctttttcagacacaatggaattgtggatgttgcttgtactctttgctgaaaaataaaagcctatataagaataagtgggccaggaatgaaggccaattacatctgtttaatgtaaccctgggttcatatttaaagtgacaggatatatccagagctgataatcaaattaatcagtctattggcacatatgaaaaaata

SEQ ID NO: 720833 - DNA, 782 bp, Homo sapiens
tacaatggtaaaccacagttaataaaaaacatcagaaaagaatgaaactgttatctacaaataattaaggaattttggcttctacaggtcattgttttattgattcattattaatagtagtagataggctgggcgcagtggctcatgcctgtaatcccagcattttgggaggctgaggagggtggatcacctgaggtcaggagtttgagaccagcctggccaacatggtgaaccctgtctctactaaaaatataaaaattagctgggtgtggtggtgcatgcctgtagtcctagctacttgggaggctgaggcaggagaatcgcttgaacctgggaggcaaaggttgcagtgagcggatattggggccactgcattccagcctkgcaaaagagcaagactctgtctctaaataaataaataaatagtagtagtagtagtagtagtggtagtagtagtagtagtagtagtagaagtagtagaagtagtagaagtggaagtagaagataatattcaaggacaactgtgctttgtgtggaaacctttggtcactaggtattttctgtcttttgtgtacatgtattctctttttcagacacaatggaattgtggatgttgcttgtactctttgctgaaaaataaaagcctatataagaataagtgggccaggaatgaaggccaattacatctgtttaatgtaaccctgggttcatatttaaagtgacaggatatatccagagctgataatcaaattaatcagtctattggcacatatgaaaaaata

SEQ ID NO: 720834 - DNA, 782 bp, Homo sapiens
tacaatggtaaaccacagttaataaaaaacatcagaaaagaatgaaactgttatctacaaataattaaggaattttggcttctacaggtcattgttttattgattcattattaatagtagtagataggctgggcgcagtggctcatgcctgtaatcccagcattttgggaggctgaggagggtggatcacctgaggtcaggagtttgagaccagcctggccaacatggtgaaccctgtctctactaaaaatataaaaattagctgggtgtggtggtgcatgcctgtagtcctagctacttgggaggctgaggcaggagaatcgcttgaacctgggaggcaaaggttgcagtgagcggatattggggccactgcattccagccttgcaaaagagcaagactctgtctctaaataaataaataaatagtagtagtagtagtagtagtggtagtagtagtagtagtagtagtagaagtagtagaagtagtagaagtggaagtagaagataatattcaaggacaactgtgctttgtgtggaaacctttggtcactaggtattttctgtcttttgtgtacatgtattctctttttcagacacaatggaattgtggatgttgcttgtactctttgctgaaaaataaaagcctatataagaataagtgggycaggaatgaaggccaattacatctgtttaatgtaaccctgggttcatatttaaagtgacaggatatatccagagctgataatcaaattaatcagtctattggcacatatgaaaaaata

SEQ ID NO: 720835 - DNA, 782 bp, Homo sapiens
tacaatggtaaaccacagttaataaaaaacatcagaaaagaatgaaactgttatctacaaataattaaggaattttggcttctacaggtcattgttttattgattcattattaatagtagtagataggctgggcgcagtggctcatgcctgtaatcccagcattttgggaggctgaggagggtggatcacctgaggtcaggagtttgagaccagcctggccaacatggtgaaccctgtctctactaaaaatataaaaattagctgggtgtggtggtgcatgcctgtagtcctagctacttgggaggctgaggcaggagaatcgcttgaacctgggaggcaaaggttgcagtgagcggatattggggccactgcattccagccttgcaaaagagcaagactctgtctctaaataaataaataaatagtagtagtagtagtagtagtggtagtagtagtagtagtagtagtagaagtagtagaagtagtagaagtggaagtagaagataatattcaaggacaactgtgctttgtgtggaaacctttggtcactaggtattttctgtcttttgtgtacatgtattctctttttcagacacaatggaattgtggatgttgcttgtactctttgctgaaaaataaaagcctatataagaataagtgggccaggaatgaaggccarttacatctgtttaatgtaaccctgggttcatatttaaagtgacaggatatatccagagctgataatcaaattaatcagtctattggcacatatgaaaaaata

SEQ ID NO: 720836 - DNA, 782 bp, Homo sapiens
tacaatggtaaaccacagttaataaaaaacatcagaaaagaatgaaactgttatctacaaataattaaggaattttggcttctacaggtcattgttttattgattcattattaatagtagtagataggctgggcgcagtggctcatgcctgtaatcccagcattttgggaggctgaggagggtggatcacctgaggtcaggagtttgagaccagcctggccaacatggtgaaccctgtctctactaaaaatataaaaattagctgggtgtggtggtgcatgcctgtagtcctagctacttgggaggctgaggcaggagaatcgcttgaacctgggaggcaaaggttgcagtgagcggatattggggccactgcattccagccttgcaaaagagcaagactctgtctctaaataaataaataaatagtagtagtagtagtagtagtggtagtagtagtagtagtagtagtagaagtagtagaagtagtagaagtggaagtagaagataatattcaaggacaactgtgctttgtgtggaaacctttggtcactaggtattttctgtcttttgtgtacatgtattctctttttcagacacaatggaattgtggatgttgcttgtactctttgctgaaaaataaaagcctatataagaataagtgggccaggaatgaaggccaattacatctgtttaatgtaaccctgggttcatattwaaagtgacaggatatatccagagctgataatcaaattaatcagtctattggcacatatgaaaaaata

SEQ ID NO: 720837 - DNA, 623 bp, Homo sapiens
ggactctatacctacaccagcatagcctaagcctgaaaatcagagagtcaaaccctggactcctttggttggctcatcagtgttgggaagaaattaataagagttataaaagacggcctttatctcagaggaactagagaatgggaggccaaatgaaaaataggtgtaaagaacaaggtcactctcaaggttatttctgaggcaagattttggtcttcaagaacaaagcaaaggtactactcttggaaccagagctagaagtcagaaaaaggctcttaaggatgatttcatgtgcagctattatgcttaagatctggaggttcttgtgtttccccagcctggggttgcactgaacccagagcctaagccagaggtgagcctgctcaggtcagccaaatgactttgcattggggactgacaggttaaaagggacmcagcaggtcctcacagtgcagcagagcacagcatagcagaaaacgagcaggcttaagagacagatgggctctgcaactttctagctttgtgactttgggtaaggtatctaaattttcagagcctcagtttgttcatcattaaatggagatagtaatattgacccagcagagctgttttgaggattataa

SEQ ID NO: 720838 - DNA, 2283 bp, Homo sapiens
gcatttcataacttatgcaagttttgtttgcaccatgataaaaatctttttctcagaggcacaaattaaaaataagccatcatttgcattatatctactttctgattttaaatccattgttatctaagagctgatacttccatttctcctatttaattcaaacagataggcagagtccctgctacaaaacatcctcaaagattaagaaaaggcactgcaaatatcagatcaattatgaaaacgatgttctgattagatgtcatttgaattgcactattattcaccaaaggatattgtaggcaagcatttgtaataggggaggaaatgatttggaattgctaaagattaggagggcttgaaaacaagcctttattggcctttgaagccttgggaagaatgtttgctcttcaggtgcccgtgtagccctgctctggagatcttctcagatgctgtcctactgcattgtccaaattaaacagagaagtcaccatcctttccttggggttgtgctactgtccaatgagtgcacagcaagagcagtcctactaaccctacataacacacctgccccaactagagctttgcttcacctcggtgcagtttttgcaaaaaaggaaaacctctttttcatgaaataaaatgaaataaaacaattaaaaaataatagagagatcagaacttcccactagagccattagattcaaagctaatcctagaatctcagcatgacaaccaatcaagtaaaagattaacgcttttagaccacgtttataattttctcactgaggcaccaatgaatagtccttaatgaaaagttctacctataggtacaagtctttacaaaataaaaataataatttttttaaagtcaccttagcactcacttgcaacctgaatttgggagcagttttccataaatatactaccctgtgtatgatgcatctattagaaaatttaacctgaatatttttctctttttttccagccggcctccttccatctcattttccctttctttctytctttctctctctctctttctctctttctttctttttctcattacctgtgttctttcttccacaaaaacgtatggagccccaagtagaataacagtataatgtagcgattaagagcagaagttttggagacaaggcaagtatcttgctgccacaagctagacaatacttgataataaattaccctagagcaaagaagaatgatgagatgcagaggaaattgtagagagaggggagagaaactaaagcttgatgaaatgatgcaatcccctaaatagaactgagtctggagttttcttaagttctgtgtgctcacaagttacccttttaacccattttaagttgtgtttgtatcactcacaactgagtccagattagtaaagtgtttttcttctaccagagaatttaatatacatatttccttcattgactcaataaatacatactgtgtccctaatatatttttggccctttgtgataaagaatggcaagattaataagatacagccattgctggggacatagagacacacttgctctgaacatgtaaagtgctgtgaatattataggttcatcctgggaagaattatgctatgaataataaatatttttccttctattcaatgacagagtactattagtaccctgaagtgaagagactgaatatacaggggaatactggccagactgtctataaaaatggaactctgacccacaaccagcaacaattagctcaggaaaccaacctactatctatagtaaccagcccaggaagtcagacttatgtgtaccaaccagctcaagaagccaaacaattaatccaaaatggccaagacttgataaataaccaaaaaaaaaatcccagtattcacccctgctttcaacttgtgatcaaccagagaaagccaaacatgtaccactaaccaatcatgtaagctactaattaggctgcctacaagtgggttcccttgcaaacatacttgcatcagggtctttcccttactccattatacacctgacccatttctctgcctgcctttgagtctctgccaaaacacaagtgatgatagctgattcccttgctgtaaatagcaagctctgaataattgttctcattggaggcaggggccttcatttattttcacaaattgatgaggtaagaaagaaatccctataacgctatctacccaataacaccttcagtgaaatacaccctattgacaccagagcagagctgttccttagcctcacattttgtttccat

SEQ ID NO: 720839 - DNA, 2283 bp, Homo sapiens
gcatttcataacttatgcaagttttgtttgcaccatgataaaaatctttttctcagaggcacaaattaaaaataagccatcatttgcattatatctactttctgattttaaatccattgttatctaagagctgatacttccatttctcctatttaattcaaacagataggcagagtccctgctacaaaacatcctcaaagattaagaaaaggcactgcaaatatcagatcaattatgaaaacgatgttctgattagatgtcatttgaattgcactattattcaccaaaggatattgtaggcaagcatttgtaataggggaggaaatgatttggaattgctaaagattaggagggcttgaaaacaagcctttattggcctttgaagccttgggaagaatgtttgctcttcaggtgcccgtgtagccctgctctggagatcttctcagatgctgtcctactgcattgtccaaattaaacagagaagtcaccatcctttccttggggttgtgctactgtccaatgagtgcacagcaagagcagtcctactaaccctacataacacacctgccccaactagagctttgcttcacctcggtgcagtttttgcaaaaaaggaaaacctctttttcatgaaataaaatgaaataaaacaattaaaaaataatagagagatcagaacttcccactagagccattagattcaaagctaatcctagaatctcagcatgacaaccaatcaagtaaaagattaacgcttttagaccacgtttataattttctcactgaggcaccaatgaatagtccttaatgaaaagttctacctataggtacaagtctttacaaaataaaaataataatttttttaaagtcaccttagcactcacttgcaacctgaatttgggagcagttttccataaatatactaccctgtgtatgatgcatctattagaaaatttaacctgaatatttttctctttttttccagccggcctccttccatctcattttccctttctttctttctytctctctctctctttctctctttctttctttttctcattacctgtgttctttcttccacaaaaacgtatggagccccaagtagaataacagtataatgtagcgattaagagcagaagttttggagacaaggcaagtatcttgctgccacaagctagacaatacttgataataaattaccctagagcaaagaagaatgatgagatgcagaggaaattgtagagagaggggagagaaactaaagcttgatgaaatgatgcaatcccctaaatagaactgagtctggagttttcttaagttctgtgtgctcacaagttacccttttaacccattttaagttgtgtttgtatcactcacaactgagtccagattagtaaagtgtttttcttctaccagagaatttaatatacatatttccttcattgactcaataaatacatactgtgtccctaatatatttttggccctttgtgataaagaatggcaagattaataagatacagccattgctggggacatagagacacacttgctctgaacatgtaaagtgctgtgaatattataggttcatcctgggaagaattatgctatgaataataaatatttttccttctattcaatgacagagtactattagtaccctgaagtgaagagactgaatatacaggggaatactggccagactgtctataaaaatggaactctgacccacaaccagcaacaattagctcaggaaaccaacctactatctatagtaaccagcccaggaagtcagacttatgtgtaccaaccagctcaagaagccaaacaattaatccaaaatggccaagacttgataaataaccaaaaaaaaaatcccagtattcacccctgctttcaacttgtgatcaaccagagaaagccaaacatgtaccactaaccaatcatgtaagctactaattaggctgcctacaagtgggttcccttgcaaacatacttgcatcagggtctttcccttactccattatacacctgacccatttctctgcctgcctttgagtctctgccaaaacacaagtgatgatagctgattcccttgctgtaaatagcaagctctgaataattgttctcattggaggcaggggccttcatttattttcacaaattgatgaggtaagaaagaaatccctataacgctatctacccaataacaccttcagtgaaatacaccctattgacaccagagcagagctgttccttagcctcacattttgtttccat

SEQ ID NO: 720840 - DNA, 1355 bp, Homo sapiens
ttgtggatactgaatcaactggttgaatgaataagtgaatagtaagtatgacatagaagcgaatctagctgctaccttgttatgaaatcaaaggccatcaggagtaatcctccttactctcctgtttgacctacccaaactgttatcaacatgtatgtctatactaacttttcttctaattgcagaagagtaggtgtgccctcctcatgtctcctgcttcttattccatccttaggttccaggctcttgctctgttggtcatacatagtattcctctcctatgtcttcaactattttttcttttttttttttgtttttttcttgcccatatcaaaaatgtagactttgctctcccatcaaataaagccatctcttttttctactccctgtagccaccatctagtctcttacttccccttttcctgctgagcttcctaaaagcatagcttgttatatatttctgttatctcccatttatttctcaactacccttgatctagattcatttcttaatacttctaaaggtagttctggcttaaacaatggcatgtgtattttcatattttgtggacacgattccatcttgattgaccctctgctccctgacatcattctctctggtttctatactttggaatttagttggatttaatgtttcttgaatggacaaatccatttcctgcatatattttactagaattgagtagtcacctagagaatgccatgtagatgacagcagaacaggccaagacatattgcttgttccatttttcttcatttcatcttgatatggtttggctttggctctgtgttcccacccaaatctcatcccgaatccccatgtgttgaaggagggacctggtgggaggtgactggatcacaggagctttttccttaacactgttctcatgacagtgagtgagttctcacgagatctgatggttaaaagtgtggcacttcccctaattctctctctctctmctgctgctatgtaatatgtgccttgcttcccctttgccttctgccatgattgtttcaccctcatggggggcctcccctgccatgaggagctgtgagttaaacttcttttttttttaataaattactcagtctcaggtagttctttacagcagtgtgaaaatggactaatacacacctcattttacttttattaagataaagaacattttaaaatgcattctgaaaactcattaacagcacactgagtgaatcattgttaaattaaatgtttctatgtcaatttatctggtaattttctcttcattactatgatagccatccaaagataaggttcctttttatttaacatgaggaaggcgccaacaaaattataa

SEQ ID NO: 720841 - DNA, 661 bp, Homo sapiens
ataaacttgagtttatgaagatctatccaccttaactaacccttccttattatgttatctttctttaacacagtagtctttcaaaaaattgattaaagcatacacattccatatattacagctgatacagtgtcttatcacattaaattatctcttcactcattcaacatgtatgcattgattatggactatgtgtgatatggtttgcctctgtgtccccacccaaatctcatgtcaaattgtaatctccaacgtcagggaaggaacctgaygggaggtaattggagcatataggcatacttctcccttgctgttttttgataatgatggagttctcatgagatctgactgtttgaaaatgtgtagcacttcccccttttctctctcctgctgccatgcaaagatgtgcttgcttcccctttgctttctgccatgattgtaaatttcctgagccctccctggccatgcctcctgtacagcctgcagaactgtgagtcaattaaacctcctttcgttataaactacccagtctcaggtaattattcatagcagtgtgacaacgaactaatacaatgtgctagacactatttaagtcactaaaactaaagcacaaataggagaaatatttgaccgaaatgattctcagtattttaaaagcatc

SEQ ID NO: 720842 - DNA, 615 bp, Homo sapiens
ggtatgacccaccacatgtggggttgacctcttcagctcccattgcttgggtgttcctatgtcagaggctgttgcaaacttcccaggcgagctgtgaagttcagcgcgtgatggtcaacaagtaatgagcatccyttcctcctcacagctgaatgcagctccttcttcctcaatacctagccaggccttttaggtttctgccaaacaggacagagggaagtttattggtagaagctccgaggaggcaggctggaaagagcctcaggcctaaggtcaagccacttgggttcatatctcagctcttctgcttgcaggatttatgaccttgggcaattgcccaacccactggagctcggtttcctcagctgtaaaacgaggattgctaatgttggcctcatctgcctcacagggttgttgcgtttaaatcccatgtccaccacttcctatcaaagtagccataaatcatcctcagctttctcatctgtaaagtggggatacacacactccttcagagggttgtggtgagggtgaaatgaggggacggatgcaagttgctcatcacaatggggctatgagcattggtaagttccaaggtgtgctaagatctggaattag

SEQ ID NO: 720843 - DNA, 615 bp, Homo sapiens
ggtatgacccaccacatgtggggttgacctcttcagctcccattgcttgggtgttcctatgtcagaggctgttgcaaacttcccaggcgagctgtgaagttcagcgcgtgatggtcaacaagtaatgagcatcccttcctcctcacagctgaatgcagctccttcttcctcaatacctagccaggccttttaggtttctgccaaacaggacagagggaagtttattggtagaagctccgaggaggcaggctggaaagagcctcaggcctaaggtcaagccacttgggttcatatctcagctcttctgcttgcaggatttatgaccttgggcaattgcccaacccactggagctcggtttcctcagctgtaaaacgaggattgctaatgttggcctcatctgcctcacagggttgttgcgtttaaatcccatgtccaccacttcctatcaaartagccataaatcatcctcagctttctcatctgtaaagtggggatacacacactccttcagagggttgtggtgagggtgaaatgaggggacggatgcaagttgctcatcacaatggggctatgagcattggtaagttccaaggtgtgctaagatctggaattag

SEQ ID NO: 720844 - DNA, 651 bp, Homo sapiens
agcactgggaagttgcatttgcagggagcacccatgtgggtcttctggcaggaaaaccattggccaaaggaaataaatgaacattttattaaccactgaactctccttacactttctccatgagacagtcctccactctcagggctgacttcatgggtgtgagactggagcrcttgcacggggcctgtgcttagaagtgtcccagccagggtttaatactctgttgtcgccatcttgaaattcttaatagcttttgaacaagagcttcctgcaaattatgtctcaggtcatgtcctctaaatagatgagaactgcagaaaggatagacttgcccaggaccacagggctaagttgtgaaaaggcgtttggtatcctgctgtgtttgattccaaagctctgctatcccatgacgttgagacccaaaaagaatgaactctaaatagggttcatttaaaccctctaaatagtagtgtttcagatttcaaccatcctgtcaggacccaggaaatttcagggggaggggaggacctcttccaggaaccctcacactataccaggtaggttactcataaggataatgatgatttataaacgtattcaactttagggtagggaagcttctatgcagctccctctgacagtccctgttgg

SEQ ID NO: 720845 - DNA, 651 bp, Homo sapiens
agcactgggaagttgcatttgcagggagcacccatgtgggtcttctggcaggaaaaccattggccaaaggaaataaatgaacattttattaaccactgaactctccttacactttctccatgagacagtcctccactctcagggctgacttcatgggtgtgagactggagcacttgcacggggcctgtgcttagaagtgtcccagccagggtttaatactctgttgtcgccatcttgaaattcttaatagcttttgaacaagagcttcctgcaaattatgtmtcaggtcatgtcctctaaatagatgagaactgcagaaaggatagacttgcccaggaccacagggctaagttgtgaaaaggcgtttggtatcctgctgtgtttgattccaaagctctgctatcccatgacgttgagacccaaaaagaatgaactctaaatagggttcatttaaaccctctaaatagtagtgtttcagatttcaaccatcctgtcaggacccaggaaatttcagggggaggggaggacctcttccaggaaccctcacactataccaggtaggttactcataaggataatgatgatttataaacgtattcaactttagggtagggaagcttctatgcagctccctctgacagtccctgttgg

SEQ ID NO: 720846 - DNA, 651 bp, Homo sapiens
agcactgggaagttgcatttgcagggagcacccatgtgggtcttctggcaggaaaaccattggccaaaggaaataaatgaacattttattaaccactgaactctccttacactttctccatgagacagtcctccactctcagggctgacttcatgggtgtgagactggagcacttgcacggggcctgtgcttagaagtgtcccagccagggtttaatactctgttgtcgccatcttgaaattcttaatagcttttgaacaagagcttcctgcaaattatgtctcaggtcatgtcctctaaatagatgagaactgcagaaaggatagacttgcccaggaccacagggctaagttgtgaaaaggsgtttggtatcctgctgtgtttgattccaaagctctgctatcccatgacgttgagacccaaaaagaatgaactctaaatagggttcatttaaaccctctaaatagtagtgtttcagatttcaaccatcctgtcaggacccaggaaatttcagggggaggggaggacctcttccaggaaccctcacactataccaggtaggttactcataaggataatgatgatttataaacgtattcaactttagggtagggaagcttctatgcagctccctctgacagtccctgttgg

SEQ ID NO: 720847 - DNA, 662 bp, Homo sapiens
tcttccttgggaggcccctccctcaaatccttggagacagtcactatgtctatcctgtaggggacttttctrgtttaatagctccagtttctccaaccccaaccaacttctccatttagaagtgtttaagacactaattctcaagtttggctgcttgttgaaattaacaggggagttttaaaaatactgagtctaaccctcagagattctgatttatttggtttggagtgtgacctggccatcgggattttttttaaaaaacccaatgctgctaatatgcagctaggtttgagagccacttggagtcaggaattttaggttcctacccagcactttagtctccagacagcaatgctgtccggcctgttctaatcataggtcccccagtgtgagtgaacaagctcttaccttgatcttgaaactagttctttctatgaagagaaggcacagggctacactagcaagggaccagaggctggcatgagacagacccaccatttaaataggcatgactcgaagcaattgtctccacctctctaagccttcgtttccttaccaataaaatgggatcatggtgtagtcagtttctactggataacaaaccaccccaaaacttagtggctgcgttagtccattttcacactgctgataaagacataccc

SEQ ID NO: 720848 - DNA, 662 bp, Homo sapiens
tcttccttgggaggcccctccctcaaatccttggagacagtcactatgtctatcctgtaggggacttttctggtttaatagctccagtttctccaaccccaaccaacttctccatttagaagtgtttaagacactaattctcaagtttggctgcttgttgaaattaacaggggagttttaaaaatactgagtctaaccctcagagattctgatttatttggtttggagtgtgacctggccatcgggattttttttaaaaaacccaatgctgctaatatgcagctaggtttgagagccacttggagtcaggaattttaggttcctacccagcactttagtctccagacagcaatgctgtccggcctgttctaatcataggtcccccagtgtgagtgaacaagctcttrccttgatcttgaaactagttctttctatgaagagaaggcacagggctacactagcaagggaccagaggctggcatgagacagacccaccatttaaataggcatgactcgaagcaattgtctccacctctctaagccttcgtttccttaccaataaaatgggatcatggtgtagtcagtttctactggataacaaaccaccccaaaacttagtggctgcgttagtccattttcacactgctgataaagacataccc

SEQ ID NO: 720849 - DNA, 662 bp, Homo sapiens
tcttccttgggaggcccctccctcaaatccttggagacagtcactatgtctatcctgtaggggacttttctggtttaatagctccagtttctccaaccccaaccaacttctccatttagaagtgtttaagacactaattctcaagtttggctgcttgttgaaattaacaggggagttttaaaaatactgagtctaaccctcagagattctgatttatttggtttggagtgtgacctggccatcgggattttttttaaaaaacccaatgctgctaatatgcagctaggtttgagagccacttggagtcaggaattttaggttcctacccagcactttagtctccagacagcaatgctgtccggcctgttctaatcataggtcccccagtgtgagtgaacaagctcttaccttgatcttgaaactagttctttctatgaagagaaggcacagggctacactagcaagggaccagaggctggcatgagacagacccaccatttaaataggcatgactcgaagcaattgtctccacctctctaagccttcgtttccttaccaataaaatgggatcatggtgtagtcagtttctactggataacaaaccaccccaaaacttagtggctgygttagtccattttcacactgctgataaagacataccc

SEQ ID NO: 720850 - DNA, 996 bp, Homo sapiens
tgggattacaggcatgcaccaccatgcccagctaatttttgtatttttagtagagatgggttttcgccttgttggccaggctggtctcaaacccctgacctcaggggatccacccacctcagcctcccaaactgctaggattacagatgtgagtcactgcacccagcctaaaaattctttcatttctttctatcctccaaccttctaaattccagaaagaggataggtatggctgaaatgcaaaaagagagtaagttcattcctaggcttagccacccacaccccagtagctgatgacttgggaaatttggacctcaagatttgtaatatgttttcttttgttgttgcctttgatctagtcccacatgcaatgcagttccattgtataccctgggtgacagactggggaagcctgactttgattccggagccagtgaaattgattccagtctcccttccctccctgtgatttcttcactcttttatatgtgtcttcactcgaatttatgtcactgtgccttgcagacagaacaggtccaagtcaaatcaaccatactgggttttcaggcaactgaaaatttcagattctttttagtaagtctccctcaacctgccttcttcttcttcttyttttttttttttttgagacaaaatgaaaatgtagtagtttacatttttctgagtttcatttcatcttcctggtttcaacagtttttccagcctgtcaagaccaattgaactttaattggatcacctgtcatacaagctgctcgtcccagacttaggtcttctggaaattttacaactatgccttcggtgtctttattgagaaaaatgttgaacttttaaactctgttggagtgggtggagtcttctgcagaatttcatagccatttagtgtttaaaaaccccacaaccaccatcagattaagatggtgtcagacaaacaggtgggagtgatctgagcagaggctgggtgacttttagattaagtgt

SEQ ID NO: 720851 - DNA, 996 bp, Homo sapiens
tgggattacaggcatgcaccaccatgcccagctaatttttgtatttttagtagagatgggttttcgccttgttggccaggctggtctcaaacccctgacctcaggggatccacccacctcagcctcccaaactgctaggattacagatgtgagtcactgcacccagcctaaaaattctttcatttctttctatcctccaaccttctaaattccagaaagaggataggtatggctgaaatgcaaaaagagagtaagttcattcctaggcttagccacccacaccccagtagctgatgacttgggaaatttggacctcaagatttgtaatatgttttcttttgttgttgcctttgatctagtcccacatgcaatgcagttccattgtataccctgggtgacagactggggaagcctgactttgattccggagccagtgaaattgattccagtctcccttccctccctgtgatttcttcactcttttatatgtgtcttcactcgaatttatgtcactgtgccttgcagacagaacaggtccaagtcaaatcaaccatactgggttttcaggcaactgaaaatttcagattctttttagtaagtctccctcaacctgccttcttcttcttctttttttttttttttttgagacaaaatgaaaatgtagtagtttacatttttctgagtttcatttcatcttcctggtttcaacagtttttccagcctgtcaagaccaattgaactttaattggatcacctgtcatacaagctgctcgtcccagacttaggtcttctggaaattttacaactatgccttcggtgtctttattgagaaaaatgttgaacttttaaactctgttggagtgggtggagtcttctgcagaatttcatagccatttagtgtttaaaaaccccacaaccaccatcagattaagatggtgtcagacaaacaggtrggagtgatctgagcagaggctgggtgacttttagattaagtgt

SEQ ID NO: 720852 - DNA, 413 bp, Homo sapiens
tttcatattggaattttttaaatatgacagacagctatacatactaacatgaaaggatacccacagtatattgttggatatgaaatcaacaaaatgtagaccattgtttatcgtattgtatcaattttctattgctgtgtaacaaaccatcccccaaaatttagtgatttaaaacaacaatcacttatttgtttatgattttgtgggctggcaatttgggttgggcttagctaggacaagtcatctctgctagatacggtgttggctaggcttactaatatatgtccccaaagcagggacagctgggacaactctttctacctggcctttctctcatcctcaaggagaaaagcagaaaaggcaaatcttgagccrtggcttgggattgccacaattttatttctaccaatttc

SEQ ID NO: 720853 - DNA, 2227 bp, Homo sapiens
  misc_feature 1151, 1152, 1153, 1154, 1155, 1156, 1157, 1158, 1159, 1160,1161, 1162, 1163, 1164, 1165, 1166, 1167, 1168, 1169, 1170,1171, 1172, 1173, 1174, 1175, 1176, 1177, 1178, 1179, 1180,1181, 1182, 1183, 1184, 1185, 1186, 1187, 1188, 1189: n = A,T,C or G
  misc_feature 1190, 1191, 1192, 1193, 1194, 1195, 1196, 1197, 1198, 1199,1200, 1201, 1202, 1203, 1204, 1205, 1206, 1207, 1208, 1209,1210, 1211, 1212, 1213, 1214, 1215, 1216, 1217, 1218, 1219,1220, 1221, 1222, 1223, 1224, 1225, 1226, 1227, 1228: n = A,T,C or G
  misc_feature 1229, 1230, 1231, 1232, 1233, 1234, 1235, 1236, 1237, 1238,1239, 1240, 1241, 1242, 1243, 1244, 1245, 1246, 1247, 1248,1249, 1250: n = A,T,C or G
tgacaaagagagttaactaaagagcttcttttcagtataaaagaagttgtaagaaaagataaactcttaggtggatcacgaggtcaggagatcaagaccatcctggctaacacagtgaaaccccgtctctactaaaaatacaaaaaaaaaattagccaggcatggtggcgggcgcctgtagtcccagctactcgggaggctgaggcaggagaatggcgtgaacccggaagcggagcttgcagtgagccgagatcgcgccactgcactccagcctgggcgacagagcaagactccgtctcaaaaaaaaaagaaaaaaaaaatgctgatttccaggttatatagctgcttgtccccttctagttttgtaatctttctaagttttgaggatgtgtttctactcatatatgggagctacctaagctatctcatggaggtagagagtacaactatagttaccagaggctgggaaatggtggggaaaaggaggatgaagtgtggttggttaatgggtacatgcatacacttaggtagaaggaataggatctagtgttctctagcacagcagagtgactacagttaaaaacaatatattgtgtatctcaaaatagaaaacttaaaatgttcccaacacaaataaattataaatgtttgaggtgatagatatcctaaataccctgatttgaccattatacattgtatgcatgcatcatcacgtttccgtaaatatgtagaaatgttatgtattagtaaaataattttttaaaatactcatttgttattgaagaacagattataattaaacaataatataaccatttatcaattcaaaagaagtaacattaaaaatctcaatgccccaaacataaccataaacttgcttctacaagtattaccaatactcattgaatgattttgtaaatgtctaatagtagataaccggcagccctaagatggcataaaatattgaggtgtttatctttgatggttttcatccaatatagtcttgaacagatctttatttacgaagttaatatagtattctctccgtcttctctttgtaaagtaaaaccaatcaggtaaaagtgatgtttgcattttaggtttactgttactacttagatgcttctgcattatcacaccctttcttctannnnnnnnnnnnnnnnnnnnnnnnnnnnnnnnnnnnnnnnnnnnnnnnnnnnnnnnnnnnnnnnnnnnnnnnnnnnnnnnnnnnnnnnnnnnnnnnnnnnatacctctctaacttttggccctggatttccctattctgatggagagtgttttctctccttcattataaccctaaaatccaaatgcatattttaactgtttatggattaagagcataaagatttttgatcttctcttktaatatccccttgattgctagaatgcctgaaggatatgtaataaaaataaataaataacaacaactctgtgttccaggccaacaaggcacataagacataaaaatggaatgtaaactcttgtcactggtttgaaaggaactgtcagttgtttgattctttaagtgattctgtcacacactggggacccccgtcagtgcagtttcactcctaaactacttttattaaaagtatgtatcatcatgtggccacaaaagcatgctatgacagaatagtaattttttctttctcttatcttcactatcttcatcatagaaaagtgttgtgtttctatggttgcaggaactaattaattctatatcaagcagatatattaatagaaaatactttttgggtattgaaaaacaaagttagtattttaacaaattttaggttgttttgttcttcccatcaacaaaatcccaccatttaaaagctattcctgtattattgttttcaacctctccttcttctgtgtttacagaggatctaggccagaatgtgtaacttctgccagattcccatgatgtggattatatccatctctacttctgagtgttttccagaatctctttcttattcccagtgtaatgccaagatgagatcaatcactggaatgtgccaattatcttaatatatgcctttgtcagaggtcaacagcgtgaagtgtgtcctctcttttatatacagagattgtggtgttgttagggatttttccctctttagaattggtgcattttaactgggatgttctatggacatatctgatgattacaattactatataggcctgattgttgtt

SEQ ID NO: 720854 - DNA, 759 bp, Homo sapiens
taacttattggtaatgacaacatctatgaagtgacaatggaaataagtgtctgaggaaatgagagtgcaaggatgattgatgacacgactgggattcccggagagttgaggtatacattatgtatatggggttgggagtggaggccccatatacataatatataacccatakgggctatatctccccatatggggagagttgtgggctcagtaaaagacagggtcttaccaggaacacccagaatactctagcaaaattctctgacaaatcttagcaatttgactgtaccttgtattttttagaagattagggttgactagaacttccttaaattatttttgtttaacttttattttaggtttggggggtacatgtgaaggttatataggaaaacttgtgtcacagggatttgttgtagatattatttaattacccaggtattaagcacagtacccagtagttatgttttctgctcctctccctcctttcaccctccccaagaagtagaccccagtgtctattttcgtctttgtgttcataagttctcatcatttagctcccactcacaagtgagaacaagtggtatttggttttctgtcctgcattcattttctaagaataattgcctccagctccattcccattcctgcaaaagacatgatctcattccttgttatggctgcatagcattccacagtgtatatgtaccacattttctttatgtaatctgtcactgatggaaatttaggttgattcca

SEQ ID NO: 720855 - DNA, 787 bp, Homo sapiens
tctttgcttagccaaccattgctcccttccccacttccttgcaaacacagcttgcctcttgctctagatgaggcgaaagcaccagggacttgctttctcctcctccactggagcggaggcatgggtactgacccgtttctcttcaaggagmcttgatagaatcttcagcaggggaattctgggaaaggcttcccttcctgacaaattaagacagacaaggagaatctaaccttcctgcctgcctttggacgcagttatgtgagaacatgatgcccggagcagtggcagccatgctatgaccataaggggactggcctgagaacaaaggccaatgtgctgaagatggcagcctaggttagacagagtccttgaaatgatcgctgactccctgaatgaaccaaccctagagctcctacctttagacttctggctgagttgaaacaccttgtttttaaagccatcgttagtacactgttcttttacctgtagccaataacatcccacaagcccgatggttttcatctgtccatacttccaccccaatccccaaactgagatcatggtgagatataagatagaaccctgtggctgtaaactgagccccatctgaattctgagttcagtccccacagataatgctttcccctacgtcctctaagcaaaggaaggaaacagctgccaattcctcttgtgcacgagcacctcccccatcacccctatgtgcaccctgcagtataaatgactgataacagtgtctgataatagtgtcaggtatgacccacatgca

SEQ ID NO: 720856 - DNA, 1566 bp, Homo sapiens
acctcttgttaggagctgctgcaaagacacgctcagaggatgagatactgggaggttagtaatggagctgtcattgcgatcagtctacgataataggcattcaataaataaaggatagggttactcttagatatttttggacaatatccatcagacaagcccactgtcactaagttacctagagaattccttgtagtaatcaggactctttcagctacagggaatagaaacataactcatcagaagtcttcctccatctttggctctcatttgtctgttcttttcccacatcccaggagggggcaaagatgaccaccagcagctccaggcttccattttccccatcagtctcccctggctgaaagagaatatctccatgccaacatatcaagggaagccctggaacatctcaccagttcaggtgatgtcaccagacccatcccataagtcctcacagtcaccgattggccaggtccaacaaagcagggagcttttccccagaggaagctcaccatgctgttgtcaagagaaagagaaaagggcactgagagagctgctcaatgtctatgcagctgcatgcctttcctcactgcccaagaggaacccctccctatttccctaaagcccctgtattgatttgaagtttctaggctaaaatgcacttctcagatcttaagtattttttgtatgtgataaggtctagttgtactactttgaactgaagcaatattgcctttaaaagctaatcatgaaatcctccatgaggatattgtgaaaggattaaaatgagaactattcggattagaaagtgaaaggaataaaaaacaaataaaacaaaacaggacagacaggaagttgataagaagagaaggagtccttctgcatacagaacatactggatcctttattcctggtctggagagcatcctggaatgaagcctgtacagagggctaaacagaagagagaatccttggcttctgccaagaggttgctcttacttttaactttgtgttttccatagttctgactcagagtgacctgtattcaaagccctgttgccccaacttactaactgtgatcttgtcaaggtgatatatgaggacacttctgaaaatgaaaggggatgctattagcaatttcaactggggaacagacaatgagattctagaatctcattactttatggtcattgttttcataagaaaaatgaaaaatacttgtatttttagtggtacttaacaacratagtggcattgaacagtgttcagtacttattgtaagactgtgttcagttctttatatgctcactgtaattctatggtgcggagactattattatcctcatttttacagatgaggaaactgagacttggagaagttaattaattttatcaacatctaggggatgatatgtttttattttcctgtaatgatatagtaatgaacctataaagaagcattagaaactgaacatgcagatgagtatccttgtgggggcatacatcttgagaacctatatcaagggttgagctccacctgagctctgccttttgtcagatcagtgg

SEQ ID NO: 720857 - DNA, 831 bp, Homo sapiens
taaagtttaatggaatctacgatacaaacaaaaattccaacttcagaatagatgattattcagtgcctaacaatattaatgtataatttaaatactgagagcatccgtgaaaaccttgaatgataggaaggatctagttgttaattagcttgcctacaagttttcctactgtcactgcctgataatttttaaacagaaatgcttctaycttaatatatgtgactttataaaataaatataataatattataataatgaatataataacaaatatattttacacaaatttggatatatagatgactgagagctttcctgagtgtatatgtaagaggagtcatccaattgcccttgttcattacttttacaattcactacaggataaaattaaagataaaagccacaggaaagagtttaaaatcttgaagccactttaagatagatgaaagatttttaaaaattggattaaagccataaattatcttaataaatatccaaaggttcactggcaaatgagacttctttttttccttaatcaatatatttttaaaatgtgattattgagacagaaagttggcatactctagttatgacatacataattaaatctacaaaaattacttgtttaatttggttgtctaagcaatgctatataaaatagtttttttgatgtctactttgcttgatgaaaatgagcttctctttatatattgacatggtatttcatttcagcaaatactgtagcaattgcatagttataacccatttatttcaactgaactaaacagaatttcagtacaccagaaacatttggactctctctaaagttca

SEQ ID NO: 720858 - DNA, 2221 bp, Homo sapiens
aaataattktatgttcatgatgtttaagataaatggaaataaaaacccttttattttcttcctatcttctaaaatattaaactactttgttcattattctctttaatttctctgatgcagggtcatcctaaatttatatatagataagtgatcactaggacaggaaacatagctctgctttcacttatagcaatacagaataatctataaatattaaatattagatgcctctacaaatgtggtctgcagagcaatgtgtgccatcaggaacttgtttttaagaaaacaaccgtgcatgagtaacttcattttaactcatcaattttaattaaattgagtctcctatgtagccaattttttaacttgtgtgctaagtaaatggcagcatatttagctggagttttgattagagtattaataaattgataacattctcttctatgatcaaagcttaaattttctaataactggtgcctaaatgaataaagagtcctaataaagatattagaaaataagcaacactgtattagttggtacaaaatttaaattaattataataattgtataaaattgaaaaagtatcaaattcacctgtaaggtaattaagagggaaaaactgaaacaaacagactgaaaaaaaaaaagccagcacaaatgcacatgtcttgcctactttgtaaaatgaaactgcaatgattggcaagttcccttgggaaaaggaatttaattctttctattctattatattctaaacatagttaactctagataatcaattgatcaatcattttcattacatcattctccatttgtgatttttgagattagcgccatttattattctttcatagcaagaatctacatgtgtgtacatcaaaacagtcacaattaatagttacaaaaagtatgtataaaaatagaagttaaaatagcctgcttattgggatatacccattcagtctagactattgacaacatctaacatgtaaatggaccctctgcaaaaatagtgattttttttgctagtcatatggtagaataaaaaattaaacattagaaatcttagagaatctacattcattggcaatgtaatactatttttaaataaatacttatctaagtcttattctgagctgctaaggatatgcacgtgtgtgtgggtatgttagaaaatatacagtaaaatattttccttaaatctacagtaaaactttgttgttaaattaactaggatatattttttgaaattcatatgctaggcagacattccagatgaaatacagagaattgttaaaaacccaaattgttagatgatctctcacctttttgaggttagaaagggtacttcctattttgaattttattatgtagcattggggacatggataaattatttaattttattgagtctgaatttttcacgataaaatgaagatgtttcagtaatttctgtaatatcttgcaattctagaactccacacttttataatatatcacttgcataacttattttaattcacagtatgtaacggaagtaattgtttgtaaacatgcctattattatatttttagatcacaaagataaggacttgaaatttaccttaagtgatttcttgatttattatgaagaatcaaagtgcttattcactggaataaagagagacatgcaggttttctcaaacactttagacagattaaatatattaaacttaaatacttccttttatttaaaattttcttttaatccacttaattttgtgtttatctagtgtctagtgggagtcaaaataataataaactactaaaattgagtcaagtaaatatcaaaaaataataaaaatttaatttctaaaactggtactgaaccaattctcattgttataatattttcacaagtattttatggtgacaaaatactaaactgtaacaaaagaagaaatattttttgtaggtttcaaagttatttttctttttttctgactgaaattccacttatatcctttatatgatattaagtctgaatgtttttcccactccaaatgattacttttattgaaagagttcaacacacctgattactgaaatgttgatgggtaaagtttttcagaagacatgtcagtaaccaatagtgaatgcttacatctctgtctcttgttacctgcaatctatcaatgatttattgtgcatctttgaattcagctttctcacatgtaaaacaagg

SEQ ID NO: 720859 - DNA, 2221 bp, Homo sapiens
aaataattttatgttcatgatgtttaagataaatggaaataaaaacccttttattttcttcctatcttctaaaatattaaactactttgttcattattctctttaatttctctgatgcagggtcatcctaaatttatatatagataagtgatcactaggacaggaaacatagctctgctttcacttatagcaatacagaataatctataaatattaaatattagatgcctctacaaatgtggtctgcagagsaatgtgtgccatcaggaacttgtttttaagaaaacaaccgtgcatgagtaacttcattttaactcatcaattttaattaaattgagtctcctatgtagccaattttttaacttgtgtgctaagtaaatggcagcatatttagctggagttttgattagagtattaataaattgataacattctcttctatgatcaaagcttaaattttctaataactggtgcctaaatgaataaagagtcctaataaagatattagaaaataagcaacactgtattagttggtacaaaatttaaattaattataataattgtataaaattgaaaaagtatcaaattcacctgtaaggtaattaagagggaaaaactgaaacaaacagactgaaaaaaaaaaagccagcacaaatgcacatgtcttgcctactttgtaaaatgaaactgcaatgattggcaagttcccttgggaaaaggaatttaattctttctattctattatattctaaacatagttaactctagataatcaattgatcaatcattttcattacatcattctccatttgtgatttttgagattagcgccatttattattctttcatagcaagaatctacatgtgtgtacatcaaaacagtcacaattaatagttacaaaaagtatgtataaaaatagaagttaaaatagcctgcttattgggatatacccattcagtctagactattgacaacatctaacatgtaaatggaccctctgcaaaaatagtgattttttttgctagtcatatggtagaataaaaaattaaacattagaaatcttagagaatctacattcattggcaatgtaatactatttttaaataaatacttatctaagtcttattctgagctgctaaggatatgcacgtgtgtgtgggtatgttagaaaatatacagtaaaatattttccttaaatctacagtaaaactttgttgttaaattaactaggatatattttttgaaattcatatgctaggcagacattccagatgaaatacagagaattgttaaaaacccaaattgttagatgatctctcacctttttgaggttagaaagggtacttcctattttgaattttattatgtagcattggggacatggataaattatttaattttattgagtctgaatttttcacgataaaatgaagatgtttcagtaatttctgtaatatcttgcaattctagaactccacacttttataatatatcacttgcataacttattttaattcacagtatgtaacggaagtaattgtttgtaaacatgcctattattatatttttagatcacaaagataaggacttgaaatttaccttaagtgatttcttgatttattatgaagaatcaaagtgcttattcactggaataaagagagacatgcaggttttctcaaacactttagacagattaaatatattaaacttaaatacttccttttatttaaaattttcttttaatccacttaattttgtgtttatctagtgtctagtgggagtcaaaataataataaactactaaaattgagtcaagtaaatatcaaaaaataataaaaatttaatttctaaaactggtactgaaccaattctcattgttataatattttcacaagtattttatggtgacaaaatactaaactgtaacaaaagaagaaatattttttgtaggtttcaaagttatttttctttttttctgactgaaattccacttatatcctttatatgatattaagtctgaatgtttttcccactccaaatgattacttttattgaaagagttcaacacacctgattactgaaatgttgatgggtaaagtttttcagaagacatgtcagtaaccaatagtgaatgcttacatctctgtctcttgttacctgcaatctatcaatgatttattgtgcatctttgaattcagctttctcacatgtaaaacaagg

SEQ ID NO: 720860 - DNA, 1636 bp, Homo sapiens
aaactaggcaactgaagtaactatccatcttgcttttagaataattgcattttaaatgttatctcagagcagaataaccctagcaattaaccaccttgctttgtgagcaagcagtgtctttgcaagcagtctgtcattgaagcagaactaaggaaataaaataattttcagaatactattttttttcctgaagcagtttgtcccaattaattggctgaatacaggatgttgaatgaaccaaagtgtttgtgtattttaatggactaaaaacatgattctgtttgcaccattttatattcctttcagcaaaaagagagttattgctgtcaactattttcataaaacttgtgtttttctgagtgttttagggaagatttgattatattttactcttaccagtcttgagaatcaggttaatatattattcccactcatctgaatgattcaaatttttttctttgtcttctctgaaaataaatgaatactaagttttgatcatcacttacatgacagtgattaaataggccaaacttgctgagacaaaacaaatgttccaactctgactatatgggcaccctggctgcttgagtttttttttttttttaattcattggtagcaccctccagctactccatgtcaggtgttttgtctaaaagtacaattctgaatcatggtccccaaagttaataactttgactttaaatgagctaataaatacattatattaaaaaccattgaaaggattgcttagggcaaattttaaaataagagttaaaagaaattaccttttgcctgctataacatataccaataataagtatttttaaaataagtcagtacataaaatgttcacattttctagagagaataaatattcaataaagtctaattcaataaaattaatatttgttattaattattgcttaatttgttatattttaaaatttcatattgattatttcacagtgagcaccaatttactgaaaaaattctctgttgaaatgttttaggaattaaaatgaagttaatagtccatcgagtcaaacataaactttcaaactgattgatgatttttttttttttactccaaaatgctctgatcataggaatatttaacttctaattttaacattgcattggtctgttctcccactactaaaaagaaatacctgagactaggtgatttgtaaagaaaaaaggcttaattgcctcatgattccacaggctgtaaaggaagcatgacaggcttctggggaggccttaggaaactttcaatcatgacagaacrtgaaggggaagcaggcatgtcttacatggccagagcaggaggaaggtgggtgggggaaggtggtacagacttttaaacaaccagatcttatgacagttctatcataagaacagcactaaaggaatggtggtaagccattcatgaaagatgaacccccataattcaattacctcccaccaggccccatctccaccattggggattacaattgaacatgagatttgggtggagacacagattcaaaccatatcactccaaccttggcgcctcccaaatctcatgtcctcacattgcaaaataaatacaatcaacccttctcaacagtccccaaagtcttaactcattcc

SEQ ID NO: 720861 - DNA, 1636 bp, Homo sapiens
aaactaggcaactgaagtaactatccatcttgcttttagaataattgcattttaaatgttatctcagagcagaataaccctagcaattaaccaccttgctttgtgagcaagcagtgtctttgcaagcagtctgtcattgaagcagaactaaggaaataaaataattttcagaatactattttttttcctgaagcagtttgtcccaattaattggctgaatacaggatgttgaatgaaccaaagtgtttgtgtattttaatggactaaaaacatgattctgtttgcaccattttatattcctttcagcaaaaagagagttattgctgtcaactattttcataaaacttgtgtttttctgagtgttttagggaagatttgattatattttactcttaccagtcttgagaatcaggttaatatattattcccactcatctgaatgattcaaatttttttctttgtcttctctgaaaataaatgaatactaagttttgatcatcacttacatgacagtgattaaataggccaaacttgctgagacaaaacaaatgttccaactctgactatatgggcaccctggctgcttgagtttttttttttttttaattcattggtagcaccctccagctactccatgtcaggtgttttgtctaaaagtacaattctgaatcatggtccccaaagttaataactttgactttaaatgagctaataaatacattatattaaaaaccattgaaaggattgcttagggcaaattttaaaataagagttaaaagaaattaccttttgcctgctataacatataccaataataagtatttttaaaataagtcagtacataaaatgttcacattttctagagagaataaatattcaataaagtctaattcaataaaattaatatttgttattaattattgcttaatttgttatattttaaaatttcatattgattatttcacagtgagcaccaatttactgaaaaaattctctgttgaaatgttttaggaattaaaatgaagttaatagtccatcgagtcaaacataaactttcaaactgattgatgatttttttttttttactccaaaatgctctgatcataggaatatttaacttctaattttaacattgcattggtctgttctcccactactaaaaagaaatacctgagactaggtgatttgtaaagaaaaaaggcttaattgcctcatgattccacaggctgtaaaggaagcatgacaggcttctggggaggccttaggaaactttcaatcatgacagaacatgaaggggaagcaggcatgtcttacatggccagagcaggaggaaggtgggtgggggaaggtggtacagacttttaaacaaccagatcttatgacagttctatcataagaacagcactaaaggaatggtggtaagccattcatgaaagatgaacccccataattcaattacctmccaccaggccccatctccaccattggggattacaattgaacatgagatttgggtggagacacagattcaaaccatatcactccaaccttggcgcctcccaaatctcatgtcctcacattgcaaaataaatacaatcaacccttctcaacagtccccaaagtcttaactcattcc

SEQ ID NO: 720862 - DNA, 1460 bp, Homo sapiens
gtgttgtggaacaggtgaaaagagtaaattgaaagtctaaatgttatttacaaacagtgtatgacactgttaaaagcatgttgaagaaaaaaatgaatgtgtttttcaatgcaaataaaatggttatagtctcaagttgaatattatttgtttatgtttatatgctgttatattactggtaggctcaatataagacaattattttggatttattatacataattattctaagctatgttattatgtatggatactaaatttcttcaagatatctatatgataaagaattaaactagccaatggaaaactagtaaaaagtagaaatcttcaagcaggaacaatacaattctagaatcctgtaatacttgaacatgaaaatgataagaataataatttagagctgtagtgccactaccatacccacaaactttctgtggctatgtgtaaatttaaatataatttacaattccgttcctttattacactagtcacacttcaattgctgaagagccacatatggctagtaactatcatattagagggcacaggcacagaacatttttcgttactgtagaaacttttattagtctgatttagataaaaatgatattaatttaaaatgataatgttttgtttttattaaacatttccaaatgcataatatagcataaatctgtagaaatttaactcattctctcaacatacttgaggagaagaacattttccttattgtgagaattaaaagcaaataggaaacaagatttaaaggtgtatttcaatctggacagcaggtcactgcccaagttcactgagcattaagtacctttgaaatcttataatggctgacattacattgtagtcctgaatctccaaagatgtctttgataatggctgtaatgattaatttacctgttgcctggtctgggctaaagaataaacaaataactggtaaaacatcatttctgggtgtgttgagagtgtttccagaagagattagcattgaattggtaaactgaagaaagatgatcgtcttcaccagtgtgaatggtcatccaatctgtttaaggccaggatagaatgataaagtgaatagagggaaaatgtactcttggttgagacattcactttctcctgctctcagacatcagcactcctggtttccaggcctacagaccctggcctggacttatatcatcgacctctacccctctctgccaattctagggtatttggacttgaactgaatttcagtaatggctttcccagttctcaagtttgctggcagcagatcatgtgacttctttgccttcacaagtgcacaacccaattcttataacactatgataaagataaatttatctctttctctgtttctttttcacacacacacgtgtgtgtatatcctattgtttttggttctttgaatagctctaatacaaatttttgtycaagagtgttca

SEQ ID NO: 720863 - DNA, 616 bp, Homo sapiens
tggaaggtttgggtgcatttatggggagccttagctgtattgatttataaagtgcctgtttccagaaaggggttgggaaaacccatcctttgccctctcctaccagaaggatctttctaagatgcccttttctctctctacctcctgaacttttaggcattcttcaaggcccacatcaaatctcacctggtctctggaggcttcccagcctccctggctgttagttgtttatttttctgatccaagcttattttctcttccttgtattacattcgacctgttcatctagtcatttgtttaacacatactggctgaacccctactacatgtctggccttgtgctcttagaatgaccaacaagatgaaaatttttgccaccaaagaaccttcaaattgatgtccatctttcctcacagacttgttgaggccatagacattgttgccaacattcagcacaggggctgacccaaagtagggactccaccctgcagaacagagggctgattaaccgagtaagggaatgatgcgtaaatactttgctccagaacatgggctgtgtgtgcaaaaagagsgtttttgatcggcaatgtcctttgaatgataaaggggctgctct

SEQ ID NO: 720864 - DNA, 671 bp, Homo sapiens
aaccttggtcataagtgtgcctggctggtttgcagatatttgttctgctttgtaaaaattggccattagtgcatttattgagatgatctctaaagagctatgccctgacctacccctgattttatgacattggggcccttcttttgctgaaactgccttacgtaatggttttactccttgaaagagatttgacggaatccattttatgccaagtgctgccctgcactgtttttgcaatatgtggtgtatgctgtggtgatcttgctgggaatgattataagtgtgtgtgtggtgggggagtgggtattacatgcattgctgaagagtcatcctggtgttcctcattcctcccaccttcccgtggtcattttaattacggggcagtgtccccgcaaagggaggaaactcaaagccgaaagcaaaattccaggcctgattytggcttttgaggttcctggtttttgaagccaggcctgacccgactttcagatggggtcagtcccgtcgctttgcagactgaccctggaaatttacaaaatgcagattttcctgatttcctcttctcttgcccagttttttttttttttttttttttttttttttaaagcctggattgtaaccagattttcttttttcccccttctcagctgtagatatgatatctcctttca

SEQ ID NO: 720865 - DNA, 976 bp, Homo sapiens
tgaaaccctgtctctactaaaaatacaaaaattagccgggcctggggtgtgtgcctgcaattccagctactcaggaggctgaggccggagaatcacttgaacccaggagacggaggttgcagtgagctgagatcgagccactgcagcactccagcctgggcaacagagtgagactccatctcaaaaaaaaagaaaaaaagaatcgttagaatggtaaactttatgttgcgtgtcgtttaccacaataaataatggaaaaattaaatttttaacccatttatgcctgaggttatgcaatttttggaatttttgcagaccttggtgatgaccttgagcagtaggatataaataactcccacatgcttagcgttgcaattacggaactctaggcttaaatgggttaataaaaaaatcagcaaacaaataaggctctgccctgtgagacaatggcagcgaatgagctgaggcagaggttaaagaaaatatagggacattcttgaatttgggtgggagttagacaggttggcccttcaggtcctttttaatttttgagtttttagttgtctgttttgaacatttgttgagcwctcagtatgtcgtaactatgttaagtatgaagtatatcactgactttctaccactccccgagtcatcactatcatagtcctcattttacctacaaggaaacccaggcttagagttctcaagcaatttgctcaaggcctgccacattctaaatgtaagaaagaagggcagaaactccagagacagcaccaagctacagggcatggatttcactgatggggaaaccgagagggttccgtgactcacacaagaccatgcagagccggcatcagggctcaggtccttcctgctgtcaggggctcctcaatgactctacgctccctccccactctttcctcctctgcttggggcatcaaatgctttgtgggcatcctatttggtcacagaaggc

SEQ ID NO: 720866 - DNA, 868 bp, Homo sapiens
taacaaacctgcatatgtacccctgaacctaaaataaaggttaaaatacatatacatatataagaaatatatacatgtatatgtgtatatatgtgcatataagtatatatttttatatgtatatattaaaaacatacatatatgtatatatttttaactttttttacatatatatgtatataaaatcattggtgcctttgtgtgtggggatgggggattctttgtgaactcacaatgacatcacgattagaagcccatgtttttctcatatgaaattgtattttacataatacatactatatacttaaaaatatcaaaataattgtccaaaaaatcaaaagttagccaggcacagtggtgtacacttgtggtcccagccactctggaggctgaggtgggagaattacttgagcccaggaggtcaagtcattctgtgagctctgattgtaccaccgtactcagcctgggcaacagtgagaccttatctcaaaaaattaaattaaattaataaaataaaataacaacacatatgaaaataactatggattaaaaagctaactataattatgctaaacactttcaaaagataaagtaggcttgtgttgtccaaaattttattagagctatttaaaatttttgtagtccaaatatctttaccatcctacaacctaaaggcatcattatatcaagaaagaaaatcataaaagaactggcaaacattgaaggcatagcagaggagctaagagcataaactgtggaaattaaccgctgagggctgartgtggtggttcatgcctataaccccagcactttgggaggccaaggcaggtggatcccttgaggccaggagtttgggaccagcctggcc

SEQ ID NO: 720867 - DNA, 681 bp, Homo sapiens
tgctgtgcagtggatcatctaatatgatccagcaatcccacttcttggtatatatctaaaggaactgaaatcagtatgttgaagagatatctgcactcccatggtcattgcagctttatttacgagggtcaagatacggaataaacctgagtgtcaatggatgaatggaaaaagaaaacgttatatatatttttatatatatatatatatgtatatatataaccatatgatgtcacttacatgtggaatcttagtcaaactcatagaagtagagagtggaatggtgattactagggtctggggaggcaggtgggaagaacagagaaaacrgaaatgatgatcaaagagcacaaagttagtttcacttgattttttacaatctaaaaaagaagtatcattttatatttatagcaagttagcaaatacatttggttgttttgggtttttgttttttgtttttttgagacaggttctcactctgtcatccatgctggagtgcagcagggtgatgatggctcactgcagcctcaagctctcaggctctgatctccctccctggctcaagcaatcctcccacctcagcctcctaggtagctgggactacgggcacgtgccatcacactgactaatttttttatcttttgtagagatgggggtcccactatgttgcccaggctagtc

SEQ ID NO: 720868 - DNA, 1237 bp, Homo sapiens
  misc_feature 531, 532, 533, 534, 535, 536, 537, 538, 539, 540, 541, 542,543, 544, 545, 546, 547, 548, 549, 550, 551, 552, 553, 554,555, 556, 557, 558, 559, 560, 561, 562, 563, 564, 565, 566,567, 568, 569, 570, 571, 572, 573, 574, 575, 576, 577: n = A,T,C or G
  misc_feature 578, 579, 580, 581, 582, 583, 584, 585, 586, 587, 588, 589,590, 591, 592, 593, 594, 595, 596, 597, 598, 599, 600, 601,602, 603, 604, 605, 606, 607, 608, 609, 610, 611, 612, 613,614, 615, 616, 617, 618, 619, 620, 621, 622, 623, 624: n = A,T,C or G
  misc_feature 625, 626, 627, 628, 629, 630: n = A,T,C or G
tgactaagttggttttagtgcagtttttccttgtctataaagcatttaaccaccccgtacataattcactccttttaaagaaaaaaactctgaaatataaggctgtgtaagatttgtttttaaactgtacagtgtctttttttgtacagttacattaccaaatatgtctttaaataaccctgtcttggtggtattttcaatagccactagccttgcctggtacagtatggggattgtaaattgacaggcaaatgtaaagcaagtccttgttggtgtacagaacaaattagttatatacagggatggtagctttttcatcttcagttgtctctgatgcagcttataggaaataattgttgttctgttagcattgttgttytgaataccactctataattgcaaaaaaaaaaaaaagttgcagctgttttgttgacattccaaacgctcctaagttaaaaaaaaaaaaacaataattttgggggggtgtccaagagtcttagaagtgacttttgcacatatttgttgaaccannnnnnnnnnnnnnnnnnnnnnnnnnnnnnnnnnnnnnnnnnnnnnnnnnnnnnnnnnnnnnnnnnnnnnnnnnnnnnnnnnnnnnnnnnnnnnnnnnnnagttctctttaaatttgaccactattttacacctatttaatgtactatcacatcaaatttttaaaagatttcagctgtttttgaaaagattcaacccactgatgtaggaataaaatgtaccttatgttctatttatgatctttagaaacattttagataataaaaattgtgttggagcaccatgcttcccaattgtcagacctttcagagtgtgtattagaatgaagtggaagtggcatgtgcgtggtggttaaacgtgataaatgaggtttgtagttcacagaaacgctgttcgatatgtttctataatctcctcagtaaacataaagatactccactctttggagacctgacatttttgttcactctgatattcccagtgattaacacagtatctgatattttaggaactcaataaatattttgtgaataaatgaatcagtgaataataatcaatacttagagaaattttactttaataaattttacatgcatttaaaactattctccagcaactgaatgagccatctggttatattgttgagtttattttattttgtcacctgtgcaaattttaaagaccaaagctgtgtcacctaatattata

SEQ ID NO: 720869 - DNA, 649 bp, Homo sapiens
tctctcccactccaatggattcccgaagtgctgtcagaattattatttattttagtgaaaaattaatctgatgatttaatccattagcttttccactgagtaaaataaaataaaagtccttcccattacatacgtgctgtgatccggccggagctccctgctgcaggtgcagctccacaaggacagaaacccytgcttctctccagccgtgccaggcctcctccttgacctggggacgctacactctgtcatgccttcctgcctttgcaaaagtggatctctttgcctggaaagcctgtctccctcttctctgcctagcaaatattatttctctctcagactggcctcaaacatccatcgctgcctctgagaaaccattttcatttccactcagaaaggtggtcactccctcttctgcacatggatggctgattacatggccagatcctcaggcttcaaaaccacatcttacttcacttattatccttttcgtttgcgtcagagcctcatctagtaaattctgattaccccgtgcaatagacgttgatgatcactttgttattgttattattaagtgctacactagatgttgacataggaatatgtaagaaccaaatttggaatcagaatgctgaagatagcatcctgc

SEQ ID NO: 720870 - DNA, 649 bp, Homo sapiens
tctctcccactccaatggattcccgaagtgctgtcagaattattatttattttagtgaaaaattaatctgatgatttaatccattagcttttccactgagtaaaataaaataaaagtccttcccattacatacgtgctgtgatccggccggagctccctgctgcaggtgcagctccacaaggacagaaacccctgcttctctccagccgtgccaggcctcctccttgacctggggacgctacactctgtcatgccttcctgcctttgcaaaagtggatctctttgcctggaaagcctgtctccctcttctctgcctagcaaatattatttctstctcagactggcctcaaacatccatcgctgcctctgagaaaccattttcatttccactcagaaaggtggtcactccctcttctgcacatggatggctgattacatggccagatcctcaggcttcaaaaccacatcttacttcacttattatccttttcgtttgcgtcagagcctcatctagtaaattctgattaccccgtgcaatagacgttgatgatcactttgttattgttattattaagtgctacactagatgttgacataggaatatgtaagaaccaaatttggaatcagaatgctgaagatagcatcctgc

SEQ ID NO: 720871 - DNA, 693 bp, Homo sapiens
caggaaggccttcccatagagctaaagaaagaagaaagaaacatgaaaagtggctcaacagtcaaagacagttttattttggagaataaacctgagaggggctcctggccaatttccatcaggagcattctctcttagagactaagggtatttaagggtttaggaagggggagtttattgcaggcttggaatgtttctgtgtgagggaaagtttattgyggggctggcatgtctctggtcagagggtaggttatcttgggattggcatgtttctggctggagaggggtttatctcagggttggaatgtttctggtcatgctgacattaaccattaggctgaggttttggggctggatttaggcggtttttaatcaagggaacttaaaatggccgtgcgtgtccaagatggcagtgtgtgtccaagatggcagtgctgcggctctgtcacttccctcctcagggccccagtccagaactggctcccatcagagatggctgagtggggagggaaaatgaactgagaaaaggagagaaggtgggcgcttatacaatgtaggatatggatatgaacccttcccacccacgccttttaaatgagcatctctgcagatactgttcagaacccctaaagcctcacactggctggggggccccaacttcatcctatttcacaataggaccacaggaggtgg

SEQ ID NO: 720872 - DNA, 646 bp, Homo sapiens
actgccagcatcgacgagaaacagctgagtcaggagctttctgtgtgagcagagagtgtgcctgccagtgctgttttcacagccgacattttcaaaggacagggagggagcatccccctggcagagccgcagggctccatccccggcctgggaggttcatgcagacccgggccacacccaggaggccagagcctgctgcaaatgcaaatcctctcccccagagagctcgaagtggcccagccactgggtgttcagagcccctgggagctacgagggctggcccgggttgggaagccctgaatggccttcgcagaagaggagattcttctgagaggcaggcggtgcagcgcagagcaggctgggcggggtacccaggatggggggactaggcagtgtggaaaaggccrctgttccagcctccagttcacacctgccctccagaaaattctttccacggaattatagggctagaatatgatgaaggattttcattctgatggcttctagacattttcttatccatacaacttttttatatgaaattttacaagtggtctcaatacacaggagagccagtggacatgtagctgtcttacttacgatggggcagaagcagaaaagaaagaagccagcccctcttgaggga

SEQ ID NO: 720873 - DNA, 591 bp, Homo sapiens
gaaaggaagtattcaggacatgaagtgaccaattatttgctataatggattatttggagtaaagtgatttaaagtactgcataactgatggatcattggaaaatttttttctttaaataggtagagtgatataggcatagatttcatactgctattgccatgaataatatttacataataccgtgtcatgagttgaattatgtcctcacaaaagatatgttaaaatcctaaccttgaaaatactttagaatgtgactgtatttggaaatagagtctttagagctgtaatcatgtgaagataaggacatgaggatgggtcctaatccaatgtgataagtgtctttacaaaatgggtggaaagagagacacagagagaacactatgtgataatgacacagttattggagttacaaagctgcaagccaagaaatgccaaggattgccagtaatycaccagcgtgtgggaggagatctcagacagcccacagccctgctgatgccttgattttggaactgtagcccccagaattatgaattaatacatttctgttgcttggagccacgcagtttgtggtactttgctacagcaaa

SEQ ID NO: 720874 - DNA, 618 bp, Homo sapiens
gttagggtcctcagagctctaggccccatgaattatttctctaaggaaaacacagttgactccatttctccggctctacttcctgaccttccccatccctttaaatcaacactgaagggtgagcttgcccgggccttcaccccctagccgaacacttcccccgccacaccccctcctgcctgcactccgggctgggggaggggaggctgagccagctgccacgccatctcctcttgcaagaccctcggaaggctgcccaagcagaaggaaaagccaggaccctcactcagaccacaacaggcccacgctgcagatcagggttggtcccaaggccacgtgacacctgtgttcttctgagcattcgcatggggaggcttacacggcaaacccaacttcgtgcaagaaagccgcgccgtgggctttcccccagacgcccgagtgcggctccgtcctggtcagggtggagcgcagatggctccsgacgtacacgtgggccctggttttgattcccaaccccaaagccggagctgcccgcacacagcagggagggggccttgctctggcctccatgttggattttctcgggaagcactggaaccaaggacagactaagaaaaa

SEQ ID NO: 720875 - DNA, 628 bp, Homo sapiens
agtcaccctgggcctggggtcaccgtaggccccatgtagcaccctggttcccctgcctgtaggtgacaggagccagcccagccaggtgtgctccctccccaggccctaggcaggcgggtacaggggccagcagctgcgcccgccccaccttccttcccacccacatgccgaagggtggccaggcaggcaggtggacgagtccaggcagcggctgagtcagtgtgtgtggaatgttctggccgctcccagctgcaccctgcccctacctgccaccacctcaccttcatcctcaggcgctgcggccctgagcccctgccaggaatgcacctttagcccaggcctgctcagtgagctccgccgacagccagccctgctcctcccgccatgaccctgcagacccctctgggcttccaagttcctgggggctgcagtgaacatgctccacctgcatggctggcaaaccatggtgggccccagctgtggtgcgtsctggggtagaggcaaggaagtgatgggaccgcagagatgagacccccagggatgagatgggacccccaggcagggcccagggtccagggcccaggagagagaagcagggagggagagagcttcctggtggaggacgcat

SEQ ID NO: 720876 - DNA, 626 bp, Homo sapiens
atttccacaggtgattctgatactcacccaaggatgagaaccactgatctattttttaygaactattttatgttatagatacttaaatggaacctcccattttcttcttagaatcccccttttctttgttgattgtccacattctttcttcttcttcttcttctttttttttttttttttttttttttgagacaaagtcttgctctgtcacccaagctggactgcagtggcatgatctgggtcactgcaacctccacctcccaggttcatgcaattctcacgcctcaaccaccggagcagctgaaactacaggcgtgcaccaccacaccctgctactttttttatttttggaaaaaatggggttttgccatgttggccaggctggtctaaagctcctgacctcaagtaattcacctgcctcagcctcccaaagtgctgggattacaggcatgagccaatgcgcctggccaagggtgaccatattcttgatgagccacctgtgtacaatctgaattcttttcttgtttaactcattggtctgtgcctctgacagtaaagttgagttatttcacttctgtgaaagccaggctgcagttatctttgaccgcttgaaatgctaaaataca

SEQ ID NO: 720877 - DNA, 519 bp, Homo sapiens
acagattccattctattcttgtccttgggaaaagggtggaaacatgcttttaaagaggttttggataagaggttcaattctactcaaaattaattgcctaggaattaagtcaaaaaggtaataagttaatgcattcctgatcattaatcagaaagtatcctttgttcaaattctacattaaaatattccagttttaagaaatttcacgtatcccaataatcattcaaatacttttaaaytataaattatacataaaattcctaaatcttctggtattgtatatggagatcatataattttaaaataaaacaaatctagtaatcaggccagcaataatgctttaaacaaaagacaaagtccatcaaagcatactcaatagcaactaaaatgtaaataaaacaggttaccttgcaaagtgataatctaaagtaaaggatatattcagaaaataactgaaaatgtgaagaaaaaaaggggtaaatatctagaaaaggcttaaaaatctgtatgatgtttcaa

SEQ ID NO: 720878 - DNA, 881 bp, Homo sapiens
gctggaatgcagtggcgggatctcagctcactgcaacctctgcctcccgggttcatgccattcatctgcctcakcctcctgagtagctgggactacaggcgctcgtcaccatacctggctaatttttgtatttttagtagagacggggtttcaccgtgttagccaggatggctttgatctcctgacctcgtgatccacattccattggttgtcaaaggaaagtcatatggctaagaccagcatcattgagttaaggatatgtccttcttttatgtaagttaggggccagtgtgaatatttgctgagcagtaatataaactaccgtatgaggcaaaactattatttaaatgtgccaccatatgtacctgagcatacattcaatttgactcaaaagaaaaagaaaactggacaggattacaaactataggaatagaattcacttcagactcacagtagataacacaatgtcacaactattcattcttgaatacataataagtgttgatgctggatcctggcagttttttgtttgtttgtttgtttttgtttttgtttttgacagagttttgctctgttgcccaggcaggagtgtagtggtgtggtcttggctcactgcaacctccgcctcccgggttcaagtgtttctcctgcctcagcctcctgagtagctgggattacaggcacctgccaccacgtctggctaattttttgtatttatagtagagacaaggtttcaccatgttggccaggctggtcccgaactcttgacctcgtgatctgcctgcctcggcctcccaaagtgctgggactacaggcatgagccactgtgcctggctgctcctggcagcttttaagcaacaatcctgcctttttccctttgc

SEQ ID NO: 720879 - DNA, 679 bp, Homo sapiens
ttattatttcagtgtagattcttgaaactaataccaagaaacatcagcttgatgggactttataagagctaaattatttgaacaagacaagtacttttgagtttcaaataggctaagaaactaaaggacctcaagatctgaaattaattgtaaagcccatgttgatgagaagaatgcatgataaatgaagtttctataacccataataaaataaaatttaaccagctggaaagaagagatagccatcaagtggaaaatgaccagatgatagatcattagggccctgatgcctgcagctgaccctggaaggcccaagatcagcatcaaggaccacacagcctccaaccaaaaaacaccttaagtaacccatacttatagtttaatgggagtcgagtagaatgagcttctagagatcacccagttctttttcaaaggaaatatatatatatgtgtgtgtgtgtgtgtgtgtgtgtgtgtgtgtrtataaatgtatatgtgtgtgtatatatatataaatgtatatgtatatataggtgcctaggcatgaatagcagccaacatcatatgcatataaagatcatccaatgtattttcctgtagcagtgacacatatctattcccccacatgtttagtttcatccagaattctcatttcaacctcttctatttcaatgaccca

SEQ ID NO: 720880 - DNA, 1873 bp, Homo sapiens
ggttacgagtagtgctgtaatttcatgtaaaaaatcctgtccccgatgcctgtgactttgatacataaatatattttgaagtctgtgaagtgaataaatgactgaaaaatggaaggaaggtgtgttctgacaggtccaaattctgactagaaagaaaacaggactttgacttgggatatttaaaatctctctgcttttcagacaacgccaacagccctgaagagatcactaaaagcagaaaagaatacaaaagcaatatgttgtaggaaaagtaaatttgtactcttgattagcccctcatggtcactcagggcttcggcatctgtcatttcacgtattgtccttactcacaggaactctgaggtgtggtggtttaaagcagtgtcctctccactttatggatggagcacaggaaggcaaggcaacgttgtcacctttatagatgacactcactgctaggtcttctgattcaaaatctaaccacttttcaaccgcatcccrttgtagttgtgtagtatgggagaaagagaaatggaataaatgaaaagtgtttgaacggcatgtagaaagatgtcataacggaaacgccatgagagccatagaggagggcctaagtcgctcttcctacaattccctgcttaagtcagcccttccctctctcctttacccacccctctgcagtcaggttttcctattatagattctctctcatatactccacagcagttattacaattgtaattatttacatggggaattttttggttgaatggctctgtcttctttgagtctagattgtaaattccatagcaatgggaactgtgcccattttcttcactgctgtatagtctcggcacacagtccctataactctgtaacttttgagcagatgaaagcgggagtgaatatgtacaattccgtaagtgaatggaaataatagaacagccaatgtgaaggtaaaggctcagacttcaaaaaatttcatttttaaaatttttaatttttaaattttaaagttttaaagtttttaaattgacaaataattgtacttattcatgaggtacatagtgacattgtaatacacatatagtgatcagatcaaggtaattaatacattcatcatcccaaacatttatcattttttgtgttgggagcattcagtatcctccttctatatgaaactgtataatacagtatcattaactgtagtcatcctaaaatggtacagaacactagaacttatttctcttacctaaaaggaaataatgcaaacagcctgaaatcttgggatacgccacatgtcttgaattttccaggaaatctgtatattaaattttaggggctgggtgtggtggctcacgcccataatcccagcactatgggtggcctgaggcctgtggatcacttgaggtaaggaatttgagaccagcctggccaacatggtgaacccccatgtctactaaaaatacaaaagttagctgggcatggtggtgtgcacctgtggtcccagctacctgggaggctgaggcgggagaattgcttgaacctgggaggcagaggttgcagtaagccaagatcgtgccactgcactccagccttggtgataggagtgaaactctgtctcaaaaacaaaaacaataataacaacaaaactttagggtagttatctggttatgtccctcaatttttggttcagaaaatatggttacctatacctcagtaaccattaaaagtaaggtacaccttgtaagaatggaaggagaagggaggaccctgaaggctgtgaaactctgtgatagtcccggatcaggtggtattaactccagtttaacagctggagagatggtggaccagagagatttaacttgtccag

SEQ ID NO: 720881 - DNA, 1873 bp, Homo sapiens
ggttacgagtagtgctgtaatttcatgtaaaaaatcctgtccccgatgcctgtgactttgatacataaatatattttgaagtctgtgaagtgaataaatgactgaaaaatggaaggaaggtgtgttctgacaggtccaaattctgactagaaagaaaacaggactttgacttgggatatttaaaatctctctgcttttcagacaacgccaacagccctgaagagatcactaaaagcagaaaagaatacaaaagcaatatgttgtaggaaaagtaaatttgtactcttgattagcccctcatggtcactcagggcttcggcatctgtcatttcacgtattgtccttactcacaggaactctgaggtgtggtggtttaaagcagtgtcctctccactttatggatggagcacaggaaggcaaggcaacgttgtcacctttatagatgacactcactgctaggtcttctgattcaaaatctaaccacttttcaaccgcatcccgttgtagttgtgtagyatgggagaaagagaaatggaataaatgaaaagtgtttgaacggcatgtagaaagatgtcataacggaaacgccatgagagccatagaggagggcctaagtcgctcttcctacaattccctgcttaagtcagcccttccctctctcctttacccacccctctgcagtcaggttttcctattatagattctctctcatatactccacagcagttattacaattgtaattatttacatggggaattttttggttgaatggctctgtcttctttgagtctagattgtaaattccatagcaatgggaactgtgcccattttcttcactgctgtatagtctcggcacacagtccctataactctgtaacttttgagcagatgaaagcgggagtgaatatgtacaattccgtaagtgaatggaaataatagaacagccaatgtgaaggtaaaggctcagacttcaaaaaatttcatttttaaaatttttaatttttaaattttaaagttttaaagtttttaaattgacaaataattgtacttattcatgaggtacatagtgacattgtaatacacatatagtgatcagatcaaggtaattaatacattcatcatcccaaacatttatcattttttgtgttgggagcattcagtatcctccttctatatgaaactgtataatacagtatcattaactgtagtcatcctaaaatggtacagaacactagaacttatttctcttacctaaaaggaaataatgcaaacagcctgaaatcttgggatacgccacatgtcttgaattttccaggaaatctgtatattaaattttaggggctgggtgtggtggctcacgcccataatcccagcactatgggtggcctgaggcctgtggatcacttgaggtaaggaatttgagaccagcctggccaacatggtgaacccccatgtctactaaaaatacaaaagttagctgggcatggtggtgtgcacctgtggtcccagctacctgggaggctgaggcgggagaattgcttgaacctgggaggcagaggttgcagtaagccaagatcgtgccactgcactccagccttggtgataggagtgaaactctgtctcaaaaacaaaaacaataataacaacaaaactttagggtagttatctggttatgtccctcaatttttggttcagaaaatatggttacctatacctcagtaaccattaaaagtaaggtacaccttgtaagaatggaaggagaagggaggaccctgaaggctgtgaaactctgtgatagtcccggatcaggtggtattaactccagtttaacagctggagagatggtggaccagagagatttaacttgtccag

SEQ ID NO: 720882 - DNA, 1873 bp, Homo sapiens
ggttacgagtagtgctgtaatttcatgtaaaaaatcctgtccccgatgcctgtgactttgatacataaatatattttgaagtctgtgaagtgaataaatgactgaaaaatggaaggaaggtgtgttctgacaggtccaaattctgactagaaagaaaacaggactttgacttgggatatttaaaatctctctgcttttcagacaacgccaacagccctgaagagatcactaaaagcagaaaagaatacaaaagcaatatgttgtaggaaaagtaaatttgtactcttgattagcccctcatggtcactcagggcttcggcatctgtcatttcacgtattgtccttactcacaggaactctgaggtgtggtggtttaaagcagtgtcctctccactttatggatggagcacaggaaggcaaggcaacgttgtcacctttatagatgacactcactgctaggtcttctgattcaaaatctaaccacttttcaaccgcatcccgttgtagttgtgtagtatgggagaaagagaaatggaataaatgaaaagtgkttgaacggcatgtagaaagatgtcataacggaaacgccatgagagccatagaggagggcctaagtcgctcttcctacaattccctgcttaagtcagcccttccctctctcctttacccacccctctgcagtcaggttttcctattatagattctctctcatatactccacagcagttattacaattgtaattatttacatggggaattttttggttgaatggctctgtcttctttgagtctagattgtaaattccatagcaatgggaactgtgcccattttcttcactgctgtatagtctcggcacacagtccctataactctgtaacttttgagcagatgaaagcgggagtgaatatgtacaattccgtaagtgaatggaaataatagaacagccaatgtgaaggtaaaggctcagacttcaaaaaatttcatttttaaaatttttaatttttaaattttaaagttttaaagtttttaaattgacaaataattgtacttattcatgaggtacatagtgacattgtaatacacatatagtgatcagatcaaggtaattaatacattcatcatcccaaacatttatcattttttgtgttgggagcattcagtatcctccttctatatgaaactgtataatacagtatcattaactgtagtcatcctaaaatggtacagaacactagaacttatttctcttacctaaaaggaaataatgcaaacagcctgaaatcttgggatacgccacatgtcttgaattttccaggaaatctgtatattaaattttaggggctgggtgtggtggctcacgcccataatcccagcactatgggtggcctgaggcctgtggatcacttgaggtaaggaatttgagaccagcctggccaacatggtgaacccccatgtctactaaaaatacaaaagttagctgggcatggtggtgtgcacctgtggtcccagctacctgggaggctgaggcgggagaattgcttgaacctgggaggcagaggttgcagtaagccaagatcgtgccactgcactccagccttggtgataggagtgaaactctgtctcaaaaacaaaaacaataataacaacaaaactttagggtagttatctggttatgtccctcaatttttggttcagaaaatatggttacctatacctcagtaaccattaaaagtaaggtacaccttgtaagaatggaaggagaagggaggaccctgaaggctgtgaaactctgtgatagtcccggatcaggtggtattaactccagtttaacagctggagagatggtggaccagagagatttaacttgtccag

SEQ ID NO: 720883 - DNA, 1873 bp, Homo sapiens
ggttacgagtagtgctgtaatttcatgtaaaaaatcctgtccccgatgcctgtgactttgatacataaatatattttgaagtctgtgaagtgaataaatgactgaaaaatggaaggaaggtgtgttctgacaggtccaaattctgactagaaagaaaacaggactttgacttgggatatttaaaatctctctgcttttcagacaacgccaacagccctgaagagatcactaaaagcagaaaagaatacaaaagcaatatgttgtaggaaaagtaaatttgtactcttgattagcccctcatggtcactcagggcttcggcatctgtcatttcacgtattgtccttactcacaggaactctgaggtgtggtggtttaaagcagtgtcctctccactttatggatggagcacaggaaggcaaggcaacgttgtcacctttatagatgacactcactgctaggtcttctgattcaaaatctaaccacttttcaaccgcatcccgttgtagttgtgtagtatgggagaaagagaaatggaataaatgaaaagtgtttgaacggmatgtagaaagatgtcataacggaaacgccatgagagccatagaggagggcctaagtcgctcttcctacaattccctgcttaagtcagcccttccctctctcctttacccacccctctgcagtcaggttttcctattatagattctctctcatatactccacagcagttattacaattgtaattatttacatggggaattttttggttgaatggctctgtcttctttgagtctagattgtaaattccatagcaatgggaactgtgcccattttcttcactgctgtatagtctcggcacacagtccctataactctgtaacttttgagcagatgaaagcgggagtgaatatgtacaattccgtaagtgaatggaaataatagaacagccaatgtgaaggtaaaggctcagacttcaaaaaatttcatttttaaaatttttaatttttaaattttaaagttttaaagtttttaaattgacaaataattgtacttattcatgaggtacatagtgacattgtaatacacatatagtgatcagatcaaggtaattaatacattcatcatcccaaacatttatcattttttgtgttgggagcattcagtatcctccttctatatgaaactgtataatacagtatcattaactgtagtcatcctaaaatggtacagaacactagaacttatttctcttacctaaaaggaaataatgcaaacagcctgaaatcttgggatacgccacatgtcttgaattttccaggaaatctgtatattaaattttaggggctgggtgtggtggctcacgcccataatcccagcactatgggtggcctgaggcctgtggatcacttgaggtaaggaatttgagaccagcctggccaacatggtgaacccccatgtctactaaaaatacaaaagttagctgggcatggtggtgtgcacctgtggtcccagctacctgggaggctgaggcgggagaattgcttgaacctgggaggcagaggttgcagtaagccaagatcgtgccactgcactccagccttggtgataggagtgaaactctgtctcaaaaacaaaaacaataataacaacaaaactttagggtagttatctggttatgtccctcaatttttggttcagaaaatatggttacctatacctcagtaaccattaaaagtaaggtacaccttgtaagaatggaaggagaagggaggaccctgaaggctgtgaaactctgtgatagtcccggatcaggtggtattaactccagtttaacagctggagagatggtggaccagagagatttaacttgtccag

SEQ ID NO: 720884 - DNA, 1873 bp, Homo sapiens
ggttacgagtagtgctgtaatttcatgtaaaaaatcctgtccccgatgcctgtgactttgatacataaatatattttgaagtctgtgaagtgaataaatgactgaaaaatggaaggaaggtgtgttctgacaggtccaaattctgactagaaagaaaacaggactttgacttgggatatttaaaatctctctgcttttcagacaacgccaacagccctgaagagatcactaaaagcagaaaagaatacaaaagcaatatgttgtaggaaaagtaaatttgtactcttgattagcccctcatggtcactcagggcttcggcatctgtcatttcacgtattgtccttactcacaggaactctgaggtgtggtggtttaaagcagtgtcctctccactttatggatggagcacaggaaggcaaggcaacgttgtcacctttatagatgacactcactgctaggtcttctgattcaaaatctaaccacttttcaaccgcatcccgttgtagttgtgtagtatgggagaaagagaaatggaataaatgaaaagtgtttgaacggcatgtagaaagatgtcataacggaaacrccatgagagccatagaggagggcctaagtcgctcttcctacaattccctgcttaagtcagcccttccctctctcctttacccacccctctgcagtcaggttttcctattatagattctctctcatatactccacagcagttattacaattgtaattatttacatggggaattttttggttgaatggctctgtcttctttgagtctagattgtaaattccatagcaatgggaactgtgcccattttcttcactgctgtatagtctcggcacacagtccctataactctgtaacttttgagcagatgaaagcgggagtgaatatgtacaattccgtaagtgaatggaaataatagaacagccaatgtgaaggtaaaggctcagacttcaaaaaatttcatttttaaaatttttaatttttaaattttaaagttttaaagtttttaaattgacaaataattgtacttattcatgaggtacatagtgacattgtaatacacatatagtgatcagatcaaggtaattaatacattcatcatcccaaacatttatcattttttgtgttgggagcattcagtatcctccttctatatgaaactgtataatacagtatcattaactgtagtcatcctaaaatggtacagaacactagaacttatttctcttacctaaaaggaaataatgcaaacagcctgaaatcttgggatacgccacatgtcttgaattttccaggaaatctgtatattaaattttaggggctgggtgtggtggctcacgcccataatcccagcactatgggtggcctgaggcctgtggatcacttgaggtaaggaatttgagaccagcctggccaacatggtgaacccccatgtctactaaaaatacaaaagttagctgggcatggtggtgtgcacctgtggtcccagctacctgggaggctgaggcgggagaattgcttgaacctgggaggcagaggttgcagtaagccaagatcgtgccactgcactccagccttggtgataggagtgaaactctgtctcaaaaacaaaaacaataataacaacaaaactttagggtagttatctggttatgtccctcaatttttggttcagaaaatatggttacctatacctcagtaaccattaaaagtaaggtacaccttgtaagaatggaaggagaagggaggaccctgaaggctgtgaaactctgtgatagtcccggatcaggtggtattaactccagtttaacagctggagagatggtggaccagagagatttaacttgtccag

SEQ ID NO: 720885 - DNA, 628 bp, Homo sapiens
gctggtgggggaatgtaacttaaatccccaaccaagtgatttagacttaccaaaacagagtgtgacttgagaccgggctgctctgagatgagcattgcatgctccagtctctcaaattctccagagggaaggagagagagacaccaaccgagagtgtccattcctcttctcttcagaaacacctggggtgggaagtaatgtaaaggagaagtgcatggtgctgggataatttataatcctgatcaaggtctttagaagctgtattctctttctttgccttgattttttcatctgtaaaataggcaaacaggggyggcctattgtaactcatgagtttgttgtgagcttcaaatgaagtaattggtgtgaagtgcttaaggatgtagtgattggaaattgtaagccatataaaccaccgctgctacagtggtgcagtggtggttggctggttattattattattactatgaaggaatggtatttatttttgtgtcatgaggttgtaagctcaaagagtgcaagaaatttggtttgttcactgctgtagccccatcggggcatgcgtaggtactcagtaaacatttgttgaataaacgctttgggaaagttagtagggaaacagtgtgca

SEQ ID NO: 720886 - DNA, 628 bp, Homo sapiens
gctggtgggggaatgtaacttaaatccccaaccaagtgatttagacttaccaaaacagagtgtgacttgagaccgggctgctctgagatgagcattgcatgctccagtctctcaaattctccagagggaaggagagagagacaccaaccgagagtgtccattcctcttctcttcagaaacacctggggtgggaagtaatgtaaaggagaagtgcatggtgctgggataatttataatcctgatcaaggtctttagaagctgtattctctttctttgccttgattttttcatctgtaaaataggcaaacaggggtggcctattgtaactcatgagtttgttgtgagcttcaaatgaagtaattggtgtgaagtgcttaaggatgtagtgattggaaattgtaagccatataaaccaccgctgctacagtggtgcagtggtggttggctggttattattattattactatgaaggaatggtatttatttttgtgtcatgaggttgtaagctcaaagagtgcaagaaatttggtttgttcactgctgtagccccatcggggcatgcgtaggtactcartaaacatttgttgaataaacgctttgggaaagttagtagggaaacagtgtgca

SEQ ID NO: 720887 - DNA, 586 bp, Homo sapiens
tgaggaaaataatggtatagagattatatttttattgaaagcatttatattttgaatcagcatggtattaatattgagaattctataatttatttgaaaaactttgactttaaaaataatttccaaagcaagatacttggaatggagtaaagaaagacaatgtctataaaaatatttatgtagacacatctccatgtttcaaaatgcaagaatagtaagaatattctttatatagcagaatttgatcttatcttactaggtataccagcatctgtagagaaagtgtttgctcaattaaaaatactgatggacatcaactaaagatatccatatcaaatatgttaataacataatacaactttcaaatgattgcagtcaatttgatgtaaaaaagtaagatcctggcyggtagtgtaagttcatgcctgtaatcccagcaatttgaaaggctgaggcaagtgaattgcttgagccctcaagtttaagaccagctttggcagcatggcaaaaccccatctgtacaaaaaatacaaaaaaattaggtgggcatagtggtatgcactcatagtcccagctacccgggagg

SEQ ID NO: 720888 - DNA, 645 bp, Homo sapiens
atatttctattttgagatacaaagggatagtgcttcattctgtcctctctgctaatctgtgatttcttaaggaccctcatctcatgtagttagtgaaaatgtctgttttctcacatagttgtagaatgactttcaagaaatcctcagaagctactaaaaggatattacgcggaytttgtgtcttttgaaatacctagcacaaaagacattcagaacacccagaagatattcactggaaactggtgactgaaaaatgactaaataactgtgaatgaatgttttaattgctctttttgaactcctggcctcaatttttctttcttccatttgcactaactaaattcagtaaatcccatcttttgcctaacgcttcactcatgacactaggaagatggcaatggccaagtttctatttcacatcgattcaacatatttaccaagcatctgtgatatgcctggtcctggatcacaaacacctggctctcaaattctaggaagccctgaccgacatcacttcactcacgtgtgctactgacatgtaaggcagcaatgcggctgacaaattcatccccatatggctgcagcccagatgcttaattaaactcctgaaatctaccaaactaaagaatgactctaggctgtgtg

SEQ ID NO: 720889 - DNA, 633 bp, Homo sapiens
gccaatcttttcttcaataaaggcaaattgttgtttaagcactatgggtacaaatacaaggcaagcacccatccctgatatcaaactgcacaccaagaagcatggaaaaacaagcctttatatagtactccctccaatgtgatagatcagccaagtggcatgaaagttacacctgccagtcaatctatactttcctagtgagcagagaccaccagctcatatacttccagatagctctggtgtttatggtatataatcctcttaaatgcatgtttgctgagacacagtaatgactcacattgtatatatccccacactacactattcctgcatacagccagaagctgctttaaaatatttccccagtcatattcatatacaaagataaataaatttttcagtttttcaccaagttttaaatgcaatctcttgagtcccatkgttttatcacagaaaggtacacttcagcttaagaagggaagaattaaccattcaacttctaacaataacagtacactgaagacctaattcaattggcacagtctgggaaatgttcaccaactacacacaattgagtgatagaatgcaaaatacttcatgctttcttagcagaacactaaaatctatcagaga

SEQ ID NO: 720890 - DNA, 957 bp, Homo sapiens
tatatgcgaatgggcccacttcactggactgtgaactcactgagggaaagatgtattccacagtattcttatattccatagtagaatgtactgcatattcacttacactttccctagagcacagcaggcccccagtaaatacccattgaatgaaagaataatggagccaggaaaggaacccagcagatgggcgtggtcactggatcacaccttcaggggcagcagctcctggtcacgtggcatgggtcagattgggtaactaatttcctactctctgaccccagcagagaacaggggcttcaggacaagaacagcaaacgtagtgacaattctagtctcctgtacatgcacctaaactgtcagcactgagaagccattcagaaaagggaaatcaggaaagatcycttttggaaacaccatgctgcaacattctacgcataaacattgcacacgtggaacttttgcccatgtgcatgtgtaatgttttgaaattatttcatgcacctatctggccatgctgggagtagatatgaagacaggtgagcatggtacaatatgctagatgctgtcagttctgtccctctacttgggagcattcatagaacctcagtgcttcacatgatctggaacatgttctgggaaaattcactgaagggaagaatcaaaccatatgaatgggctgggtgtggtggctcacgcgctgtaatcccagcactttgagaagccaaggcagggtggatcacctgaggtcaggagtttgagaccagcgctggtccaacatggtgaaacctccgtctctagctaaaaatacgaaaaattgagctgggcgtaggtggcgggtgcctgtaatgcccagccactgcgggaggctgaggtaggagaattgcttaaacccaggaaccagaggttgcagcaagccgaggtggtgccattgtactccagcctgggcaacaagag

SEQ ID NO: 720891 - DNA, 1536 bp, Homo sapiens
  misc_feature 432, 433, 434, 435, 436, 437, 438, 439, 440, 441, 442, 443,444, 445, 446, 447, 448, 449, 450, 451, 452, 453, 454, 455,456, 457, 458, 459, 460, 461, 462, 463, 464, 465, 466, 467,468, 469, 470, 471, 472, 473, 474, 475, 476, 477, 478: n = A,T,C or G
  misc_feature 479, 480, 481, 482, 483, 484, 485, 486, 487, 488, 489, 490,491, 492, 493, 494, 495, 496, 497, 498, 499, 500, 501, 502,503, 504, 505, 506, 507, 508, 509, 510, 511, 512, 513, 514,515, 516, 517, 518, 519, 520, 521, 522, 523, 524, 525: n = A,T,C or G
  misc_feature 526, 527, 528, 529, 530, 531: n = A,T,C or G
ctcattcaacaaatacacatgagatgcctactctgccccaggccctctgctaggcaccagccagccagcattgaagaaagcaacatggtgccaacaacttggagtgtgcatcttagcatcaccttcctcatgaaagattaacttatatctctaagtatcaaaagaacaaaaaagctttctcatgttaaaaagacctggatgactccaaatagatgcacacaattttataacgcccttttcattgtgcatggcctcataccatgctgaacccctgcttgaaacctttggtacaagaacagttccgtgctgtggaagacaacatcgcagctgggcatctcagggttcagagagagctctggaccagtgcctggcacacaggaggccctcaagaagctttgaacaagtaaaactccgtcaggactaacattccannnnnnnnnnnnnnnnnnnnnnnnnnnnnnnnnnnnnnnnnnnnnnnnnnnnnnnnnnnnnnnnnnnnnnnnnnnnnnnnnnnnnnnnnnnnnnnnnnnntgagattgcaggcgcgcaccatgcctggctaatttttttgtatttttagtataggcagggtttcaccttgttgaccaggctggtctcaaactcctgacctcaggtgatctgcccaccttggcctcccaaagtgctgggattataggcatgagccactgcactcagcctctccttcttcttaaggtctagctagtctacacagtcctcccaaatttactaatgcaaactcctaatagctctactagttaatattatgtctgtctttatttctggcatggtaagttctctttttctgactcaacactctgtgatagactacctgctcagagccctggttacccactttgtactccagccttctcaagatcaggatctgagttgtccttggcaatccttctcctcaagctgggagcactgctcttggacccctcaaggtgtatgaaaagtgccaccgacaccgcctactcactcagtcctctgtacctagttgattcccaggttccctttaacaggcttctctacccacttgctggatgtcatttcctaccagcgtcctccctgacttgactttaaccaaccctccacagccagtttatctccaaatactggctgttcctgggaaagtgtatttttcttaagccaggttccccttgccacaatgtacacatatggccacctccaactgttggtttccatttccaaaattcgccatccaacattcaccacagattgactgagtatgtctacatgccttgcactctgctgtgccctggcgagcagtgacaaagggaggttcgccattgggggcaagtgccccattgccattcttctgctcacctgtctgcccagcgatggaggcactcagtctgtgggggatccttgaagacaccttcaaggtcactcggatctggtaatacctaagaaaagagaagaggacagggtgctgaagatcagccttcttaacgttgacttctaaaaatacctagaattaatcctgaargccat

SEQ ID NO: 720892 - DNA, 756 bp, Homo sapiens
tacttccttttacaaatgaagacattgagactgggagagtttaagtatgtcactgctgccacacagctgagcagggaccaagctggagttttaaatcagtgagcctgatgccatctcctcatccccatcattaaccatgatgtgaatgtttaaccaaagaaggttgtgatacctttcgtccttctttggaaggatgtgataatattctagtgtgtatgtggggatgtgtgtgtgtgtgtgtgtgtgtgtgtgtatgtgtgtgtgttctttatccatttattcattgatggacatttaagtggtttccatattttggcttttgtgaataatgcgccaatgaacgtgggagtgccaatttctcttggaaatcctgatttcaaatatgttggatatatatccagaagtgggactctagactctaagctccaccaragcagggtgcgtttctgatttatttacctatgtatgcctggcacgtgacatatggccacgaagcctttgttgagtaaatgagtgttggatgccttggaatctgagaacatctgaacgcagaagaacaaaggaacttacagatagagtgtccggcatttgactttcccaacagacctgtttccagcctgcacattgagcctcccagttccttggctcacccgtggagatcataggtttggccttgcagtggggagcacctttctctgagatgagtgtgctggccaacaaagtgaaatcctccttcctttgttttacttagaagat

SEQ ID NO: 720893 - DNA, 2730 bp, Homo sapiens
  misc_feature 2176, 2177, 2178, 2179, 2180, 2181, 2182, 2183, 2184, 2185,2186, 2187, 2188, 2189, 2190, 2191, 2192, 2193, 2194, 2195,2196, 2197, 2198, 2199, 2200, 2201, 2202, 2203, 2204, 2205,2206, 2207, 2208, 2209, 2210, 2211, 2212, 2213, 2214: n = A,T,C or G
  misc_feature 2215, 2216, 2217, 2218, 2219, 2220, 2221, 2222, 2223, 2224,2225, 2226, 2227, 2228, 2229, 2230, 2231, 2232, 2233, 2234,2235, 2236, 2237, 2238, 2239, 2240, 2241, 2242, 2243, 2244,2245, 2246, 2247, 2248, 2249, 2250, 2251, 2252, 2253: n = A,T,C or G
  misc_feature 2254, 2255, 2256, 2257, 2258, 2259, 2260, 2261, 2262, 2263,2264, 2265, 2266, 2267, 2268, 2269, 2270, 2271, 2272, 2273,2274, 2275: n = A,T,C or G
ccattttcttccctggcagtagctttcctagactcccaactatattaacacatcttcttctggtaaggacactaatgactgcccacaacaacccttttcattgaggacaattcattagaaaacagtttctggtagtgaacctttaaaatctaccttcttttcactttcagtcttagttctggacttaagagaaactaagagtgaatccaattgatcttcctgggaaaccatttgtgatcacaaaattgtgcttgcacagctctgactcatctccaattcatttaattacttcttttaggacatggttggggcataattggccaggcttagagtgcccaggtttgtcaacacgtgcccagtgtcctggactttaaacatggatggggaagcccagagatctgtctggagcagagagttgtggccagggcccaggcccctctggcaccagactagatgaggccagccaaaatgggcaggcaggaggtcatccaaaagtcatcattcaccatgtaaccctagggtgaccaactcattgcagtttgcctgggactttcgtggtcttagcactgaaagtcttacattccaggaaacccccttcagttcacctgggctaatgccccttgtgaagtagcagcaacaaaagcaaaggatgtacctctgtgcctcctcacttcttcactgttcaataaggttgggagctgtttgggaatagggacccagaacatgtgttttggaagggaaactccatgcctttggagaaagaatgtagacttggaagtgagacagacttggaacaggatcctgcacccttcacagagtaccctgcatggcttcaagtaagttattttgctttactctgttgaaggctgtttactcatgtgtaaaacagaacagatagtatctgcttctccaggataattaaacgaaatgatgtagataaaatgtctagcacaatccctaggatatagcaggatatagtagggattaaggaaggctggttctttctttttcactttttctttctttcttaaattccccaacatttgacatacggctggccacaaatgacatatttgatatgtgtatgatgagagataaaatagatgaatgaatgaatgagtgaatgagtgaatgaatgaatacttatgtgtgaggatagatggatggacagacaaactctcaatagaggtagttttgtggctcatacaggcccacttttctgcaggctgagatgagcaaagcagagccagaaatggaaagcatgttcaagaatccataagttctgcagtgagccagattcaggtttcaatcccggacataccattcacctgccatagtgttccctcagacaaattatgggataaacatcttcatgatgatgatcaagaatatccacatagctaaaatttattgagaacaatacacacaattttttgtccacaaaagacctgtgaggtggactctatcgttattctccatgttcagatgagagagattaagtaccttggccatgaccaccatcgctcagatgtcctgaagtaaagactacactcagtcactctgatatcagatgccaggacccaaatcccagtccccaagcaaactcctttggatttcctttgtgtactcatctgagaagtttcctcattctcatgatattgaggtgggaagtgcaggaggagcctaggaatccagaaggggcaggagtgagtgagagagaaactgaagagctgcaagagctggaagaacaggcgaggtgggcatgaggcatcatctggctccccagtgtagtcggattgttgttgtcatttttgcctgtaaaagaactaaggccagtggagttgaaatctcacccagcatctcccagctagtaagcagggagatgctccatgctccattcaggcagtgccactgctctgggccaaggctgcgttcttcatagtgtcaaagggtaattaaagattccctttggctggaggcggtggctcacacctgtaatgccaacactctggggaagccaaggtgggcgaatcacgagtgtcacgagtctgagatccagcctgactagcatggtcgaacaccggttctactaaaaactacacaaattagcccgggattggtggcatgcacttgtaattccgactgccttacaaggttgaggcaggagaatccattnnnnnnnnnnnnnnnnnnnnnnnnnnnnnnnnnnnnnnnnnnnnnnnnnnnnnnnnnnnnnnnnnnnnnnnnnnnnnnnnnnnnnnnnnnnnnnnnnnnntgcaatctcagtacccaggaggctgaggcaggagaatcacttaaacctgggaggtggaggtggcagtgagcaagattgtgccactgcactgcactccactccagcctgggtgacagagtggagctccaaaaaaaaaaaaaaaaaaaaaaaagtagaaagacttaaagagtagggtagagggtagggagcattaaagtaaacagacagagctgtgcaaaatctgtttaattataaagtacgagtagccaagaatgttgtagaaatccagttcagtagagctaagagtactggtcatagctacacttsatataattcacttggaatttgcaacgtgttatggtgagaggaatcacatgcaattgaatacccacaagtcaggaaagtagatgtggtggtctgcttaaatttaccatggaagacatctggagggggacctggttccccaggccacatga

SEQ ID NO: 720894 - DNA, 640 bp, Homo sapiens
atgcaatttccaacagtttcagggtgctataggctttataagcaggtatatgaccaaaaatcctttctctgacattgtattaggccattcttgcattactataaaggaatacctgagactgtgtaatttataaataaaagaggtttaattggctcatggttctgcaggcyatacaggcagcatggccctggcatttgcttgacttctagggaggcctcaggaaacttccaatcatggaggaaggtgaaggagaagaaggcacatcacatggcaaaagcaggagcaagagagagagagagagtgagcagggagttgccacatgctttttttttttctttttttttttttgagacagtctcactttgtcacccaggctggagtgcagtggcgcaatgtcggctcactgcaacctccacctcccaggttcaagcgattctcctgcctcagcctcccaagtagctaggattacaggcatgtgcaccatgcccggctaatttttgtatttttaatagagacggggtttcaccacaaagttttaaatgaccagatcttgcaagaactcactgtcaagaagctaggaccaagccatgagggctccccatccaagcaccttgcaccaggcctccccccgagcaatggg

SEQ ID NO: 720895 - DNA, 1476 bp, Homo sapiens
taaaagattagacagtagaaaacaactagcaaggtggcaaatgtaaatcggatgatacaaattgccttaaacattcatcgggtaaacaccctaattaaaagtaaagattgatagatttgatagaacagcaaaactcatttatgtattgtctataataaatccactttaaatataaagatatagataggttaaaagtaaaagacagaaatcagatatactatgcaaattctaatcaaaataaagttttagtggctatgttgagattagacaaagtaaacattagaacaagtcatattgtcaggaataatgagaaacattatataatgataaaggatcaattcattaaaattatataacaatcataaatgtgtatgcatctaatagtaggcttccaaatttgaactagatatgtactaagaatgatcctgtttgagagattgttcttatacatacttgtttttaaaatattgtttattcttcaagaaatagtcatatcatgtcatacatcaatttgcaaaggtaattttcttagtttataactggtaatatacatctctaagatatattaagaaataatatgaggcctggtgtggtggctcacgcctgtaatcccagcgcttttggaggccaaggttggtggatcacttgaggccagtagttcgagaccagcctggacaacatggtgaaaccatgcctctacaaaaaatacaaaaattagccaggcatggtggcagccacctgtaatcctacatacttgggaggctgaggcagaagaatcaattgaacccaggaggtggaggttgcagtgagccgagatcgcgccattgcactctatcctgggcaatagagcaaaactttgtctcaaaaaaaaaaaaaaaaaaaaaaaaggaaagaaagaaatatggataaccattgagaattccttgtcctccactggtttgatagtttgacaactttgagatcagaagatgttcagggtcctatcttctaaaatacttgggtgcagaggcgagtcttgaatttttttttttttttttaraatattgaatctgaaaacctaggcagacataagaaaatgaactctggaaaatgtggcaatttagtagatcagtctttttcaataatacacatctctgtttggtaggcattaggtttggcaggatttctttctcctacacattccttctcttattcaaattaatattctaattttaacatgggagattccttatatggagttaatcagattaaaagtataatcaacttggttaattacttttttactaagattcctacaggtctaagtgtttgcagttttatattgtgctattatatgttcaattagattttgttatgtctacaactatattttgctattgtatgttctattagattttgttatgtctacaattttaatactaaaatgtctttcaaattttcacgtgtcagaatatagtttttcttttcaaaaatctt

SEQ ID NO: 720896 - DNA, 667 bp, Homo sapiens
atgaaaaatgcccagtaattattgacaactacctagaggaaaccagtttttaaaaactttggtgactctccctttatgttttttttacatactgttacaaaatcaggaatatactatatgtacagttttgcatcctatttattggtgtctttattttcattcaatgttgtagaaatgctttgaaagtatttcctacggttgcaaaattattctattgttgcaatgctatttatttttatattatttctatttttttgcaattataagtartaatttggtttatccacttcagtcataaatatcttaatatttgcttaaaggatattactacacatgaaattagacaattggaagaaatgaagttttatcaacaaatgaagcttatttcaaaatagacacatcatgttaaataaaccatcctaatggggcttttcatgcctaagcctttatcaatatctttgttattgttttctcaaacacctttatttttcattaaccttttcctagaaatgaggtgcctaaaacaaatctctgtattcatactaaacattattttaagcatagccatttaggtaatgcattttcaaaccagctggggtttgtgatacctatgctaaaatgacaaggcctctgaaatttggtcgcttcttaaataagtatcaattcg

SEQ ID NO: 720897 - DNA, 1047 bp, Homo sapiens
ttttttttttttttttttgagacggagtctcgctctgtcgcccaggctggagtgcagtggcgggatctcggctcactgcaagctccgcctcccgggttcacgccattctcctgcctcagcctcccaagtagctgggactacaggtgcccgccactacgcccggctaattttttgtatttttagtagagacggggtttcaccgttttaagccgggatggtctcgatctcctgacctcgtgatccgcccgcctcggcctcccaaagtgctgggattacaggcgtgagccaccgcgcccggccttgagctcatatttttatagcacttcatcacataaagtaaagagaggttcgttagtaggttcaaaaatacacttaaataaaaggaataagttctagtgtttaatagctcagcagggtctctagttaacaatcatttataatactttaaaatagctaaaagagaagatttggaatgtccccaacacaaagaaatgataaatgcttgaggtggtggatagtcctatgaccctaatttgaccatcacacattgtatatatgctataaattatcacatgtatcccataaatatgtacaaatattatgcatcaattaaaaaatgaatcagtcaacactcactaccagcattctaccagcattcaacrctcactaccagcattgatattacaggcaaattgtattcctggtagaaatttctgtttagtcaggtttcaatacagaaacaacacacacatgtgttagcttacagaaatgaaaattcgtttctcattcagctgttgctggtgactctgctaggttctggttgtgtgtggctccactaggctttcctagactctaagaagttgacccaaatcctccaagctcatttaaagcaccctctcagaagggatggcatgaagtctgttccagtttcatcgcatgcgacaatcaaatggcaaacacatatgatgaatgtagagatataatctgcctataggaaggtacaatgtaataaatgtcataccaaatccatgacctaaaaattattca

SEQ ID NO: 720898 - DNA, 1047 bp, Homo sapiens
ttttttttttttttttttgagacggagtctcgctctgtcgcccaggctggagtgcagtggcgggatctcggctcactgcaagctccgcctcccgggttcacgccattctcctgcctcagcctcccaagtagctgggactacaggtgcccgccactacgcccggctaattttttgtatttttagtagagacggggtttcaccgttttaagccgggatggtctcgatctcctgacctcgtgatccgcccgcctcggcctcccaaagtgctgggattacaggcgtgagccaccgcgcccggccttgagctcatatttttatagcacttcatcacataaagtaaagagaggttcgttagtaggttcaaaaatacacttaaataaaaggaataagttctagtgtttaatagctcagcagggtctctagttaacaatcatttataatactttaaaatagctaaaagagaagatttggaatgtccccaacacaaagaaatgataaatgcttgaggtggtggatagtcctatgaccctaatttgaccatcacacattgtatatatgctataaattatcacatgtatcccataaatatgtacaaatattatgcatcaattaaaaaatgaatcagtcaacactcactaccagcattctaccagcattcaacactcactaccagcattgatattacaggcaaattgtattcctggtagaaatttctgtttagtcaggtttcaatacagaaacaacacacacatgtgttagcttacagaaatgaaaattcgtttctcattcagctgttgctggtgactctgctaggttctggttgtgtgtggctccactaggctttcctagactctaagaagttgacccaaatcctccaagctcatttaaagcaccctctcagaagggatggcatgaagtctgttccagtttcatcgcatgcgacaatcaaatggcaaacacatatgatgaatgtagagatataatctgcctataggaaggtacratgtaataaatgtcataccaaatccatgacctaaaaattattca

SEQ ID NO: 720899 - DNA, 656 bp, Homo sapiens
taaatggaaaatagtaccattactgtgtgctgtgaaagaaaaatgtacatttatccaacaaacatctaatgattgcttactctgtgcatgccttatgctggtgtgaaatacaaaaatgaataagacacctttctatttctaaggtgtgtctagtgaaggagacagacaattcaatggtcccaatttaggagcatagtaagtrgcaccaggttcacatgggatcccgaagcatggcacctgccagatggtagttgttgggaaagtttcccataaattttatataaaacaagaaaaaggcagggatggattccaggtagaaagagcaacttgtgtaaaggcaggatggcttgggagagcacgctggcattttagagcaacctgaagcagtgcagtacggctggtccacagaggaccaaaaggagacatgagggaaaaatctggagaggtaggcagaggccagaccacaggctctggagaggcattggtcatttcaagcaggcaagtgcctcatcagatttgcattttagaaagatcattctagtggaagtgggtggatcagcacaagtagaggcagactaggaaaaggacactatttaatagtttaattcaaattggaaatgatgagggaggaaatctgggcaatagtattggggata

SEQ ID NO: 720900 - DNA, 628 bp, Homo sapiens
tttcaattccacatttaattcatctgggatttatttttatgtgcggtatgagatgggtgccacatttttttgaccaaatagccagccaattttcccaacactgtttattaaataattcacctatcttcattgatctgagatgcttccattctgatatgcacatattaggttgactgtaaacatcttakaaaagcaacattgatcttgttaatgatggagcaatgctgacacatctccatttctcctgctctaacatcttgggcatcaatagcctatttccaactgagtgttcaaaagacatccttaaggtcaacatttcccaaactaaactgatcccatttgtcttcatgaattcctgacctcagaaaacaacatcatcagcagcctaactgcccagtgatctttcaactactctgaccctgtcctcccctctcactcttaaatctcttccttctttccctattctctgcaactcctgagtttggacttttcccatgagctattatgattatattatatttgtttccaatgtaatattgaaaatctttcaaaaattgaaagaatccatgagaaaataaagcatttggcctgtttgacagtcagggctgatttgaagaatctgagtgac

SEQ ID NO: 720901 - DNA, 1091 bp, Homo sapiens
tcccctcaaggtgtgytatgccctgtggacagctatgcactgatgaaatttgtagcttctcttaccctggttattttttatacccattgtaccttcactacatttgagatagcttctcacacattgttatttgagttatgaatattttctatttctcttaagatggaagttttatttgtttcttgtccttctctttttttcacatgcttttcaagatgaaaaaaggacaagaccattttatccaccatttaaaaattaaaagtgaagtatacatttagatctaagctatgctatgacatactccctcagaaggcagaatagtacgtctcttcctctccccctatttattaagattagatttccagtccagttcaaatggatgtatttttatccaattagaaaatgctccccccaccctaaaaattgttattgtaacagataagtgccaaaagccaatccggacaataaaaatgctggcattgaacatttctgaagatacaatgagtttaacacttaagtgaattttagactgtagatactttaaggaattagatctgctttgctaaagtgattatttaaacaaattaaattgtaagtaaataagtgaattagtactgaaaggtttatatatggtcatattgttgtataatgtcaattagtgtgctaaattggtggcaaagcagatgcgtgattttctgcagagatgaatggctttgtttttttgttagacctatatgtgtgtatatatatatatgtatatgaatatatatatgtacatatataggcatttataatatgaacgttgcatatgtaacaattgtctaatgctattctgatatgaattcactttagaatttcaatgtcaattatgtcacaggaaattttcctttgtcctgacttcagttaggtactatttcatatgcctgtgatgggaaaaattagaaaaaatggtaaatttaaggcaaacgttatgtgtttttgttttttctatgtatgcataggcttggaataagtgactcttcagctatgtcatgactacgtcagatactctgtgcaagatctataagagagaatgaaggaaacaaaacact

SEQ ID NO: 720902 - DNA, 679 bp, Homo sapiens
tcagtgctctgctactaaaaagatagtaggacaggggtctttttagagcattacagaagttgtgctaggagtaaaggagagtacacacattacaaatgtgtagaacacaacatattttagtcacagataaatgtatttttaataaatctattttcccaaagagttgtaaaatatgttatatattttatatttataaaattattgaattatcaaaaacatttaaaaactcttctttaaagagttatcccattatattctttcctttggcaaagatattttcagacaattttttaatgcaaaaatttccaattctcaatagctgtcataatgccaagtgaagaagttattcatccatgaaagctttctttgttaaaatacagatcgcattatttatacaatctgaatgtttaatgaatgcatacaaattcaaatgtcaatgtagataaactaaaattacatttctatcaaggaagaaaggcttttcaacaaagaataagacttttgttttaaggtgaaaaagttaaaggatgaattctaaattgttttctaagaattaaatgacagagaagtgtaygtaaaggcttccttaaaggttatcttaaaagcaaatatgacagttctgcacttaatatttatacctactttattttttgttttgctttgttttatttttttatta

SEQ ID NO: 720903 - DNA, 627 bp, Homo sapiens
acttctataaagacagttttataggtggtacactgccaatgatctgtcaagtgtatttacaaatgctatcctttcacaggggagaaaagagaaacttccctacattaactccaagaaatttcagtttgaaatattgatagtaggtataagagtaaatattgattattattatcttctgcatccaaggagcagtattatgtatgcctacatgtatgatggacaagaattctaatattgacccataaaagtaaaatttctcagttatctctacctaagtacaatgtaccacaacaaaagtaaaactgtgcatctgaaagatgaagctggcacttctcaaatgcttatttattttaatccagactcctgtagttccaaaaattatttcagaataaaactttcatgagctttaatgggtctctttttttctgagatattgtatggttaatttcacttttgctattaaattaatatcttcaatgttagagattggagaaagataggatccatttcttctgtgaaatcacatatctgtgaaattacggtatrtatataatgtgtgaaagagaatgtatatgtgtttatacattgataataagcatcttcttatattgaattatccaggcttga

SEQ ID NO: 720904 - DNA, 596 bp, Homo sapiens
taagcaataaacaaagaaagtaaaaggtgaggagtataaaagtgtggaaaactgcaggggttcaaaggaaaaaaaaatctcaggataaagctgttcaaaggactcaagagcaatagttccaaataagaacaaaatatcaatgggttctaacaaagttgttatcaagaatactagcaacatttcgctaaaaaccatggacttcaagagaaatataacctaggcacattcctgagacttgcaatgaataatatttataaagtcacaataaaatgttattttgagtttttattttttcattttatttatttttaccttatttatttatttaggcagggtgttgctttgctgcccaagctgaaatgcagtggtgcaatcatagcttatgacagctccaaactccagggctcaagcgatcctccttcctaagtctcccaaagtgttsagattacagatgtgagccactgagcctaactattttcattggtttttaacatgtgaatccaatttacagaggaaaacactgaagtgttcataacagttatagaacaaaagttaacttatccaattataatgctataaatgtaaaggcagagctg

SEQ ID NO: 720905 - DNA, 642 bp, Homo sapiens
atttaccatattcacatttttggtcatattatgggtaataaatggttaaatatatgtcttacaaaaaactcctttttaggttttatttctccccgttcctttttgttgcagattcaaccataatttctccagtcttcttccctactcagtttcaccacaatcccagccccatgttttagaacttgatgtgatacacatgcttctcatacgctctcacacaccccagggtaatgtttccaagcatccatctggatagaatttagaccagggcagaaataactcacaggccttgccttctcattaatcaactgcaaaaaaagaggcatcttgcagcctaaaacgtccattttaaaaataaaactcaagcaagtaactcagaggaatcaaaattaacttcttacaggcgagaaaggaaatagctgagtcattacgatgttctatatggtaattaaaatgtaatgtctattaagcactgaaatagatgaaacttgctttctgtgtgtgtaatctccyatcctctggaaggagagcctagtgctgcccgtttggatttatttgtgagctatcacagaagatacttcagaaatggtaaagattgagagaattaagtcaccaaacatttgctatgcactagctgtgtgg

SEQ ID NO: 720906 - DNA, 830 bp, Homo sapiens
tacacccagccccagaaccattcttctgacagaaatagaaggaaaggtggattgaggtagggataagataaaagcgtaaagaatgcttaattgagatgggagggctctgctggaataaacaatactagtgattccctggaagaaccttaatgtgtctaattccaaaaaaaaagataagattcctgtactctgaacatgaatgcgccacagattcattcattcaccaaggactcaagaatgtacttttggaaatgttagacaggacycaagaaccatggtcgagagaaacttcatgctatttataactcaaactatgactgaaacagaggaaatttggaaaaatacttcctaaatttcacgtacactatgagttgcccatcctattagcaccagaacttctttcctacagattcattagcactgaaacaatacaccataaaaaaggatttacataaaagacagctggagccagttgccaggggaactgacgatgttccagacacattccacattagggggataaatgtctgggtagccagggctgttgaagatgccttcagccatgtagaacgttccaccacaagctggaagaaaatagaaataaagtgagtatcagagcaaagactgcatcagacactataaaataaaggagaaagaacgctagagccattatcaatgtaaaagaatagatagtatttccatctcacattttaaaacattcatgtcatataaaataagggaacaattctgcaaactgaagaccaagggccatgcagtgtggtggattagaaggaatttctgcaatgtcttttctcaaagccgtttcttcc

SEQ ID NO: 720907 - DNA, 1202 bp, Homo sapiens
ctgcagaatacagagcaatgcagccatctgtagcctactttccaaacttggctcaggacctcctttggcagatccagattttccttcccttgtagctatagagaaatttcccttcccaggggcatccctagccctcctaccaaggcaaaagaagctacagttggttttggttttagataatctttttccacccccatttcgctggatttctgagagactggaagttgcatacagaccggygtgccacttttggtgaactaaaaatattaagtaggcccactgaaatattatctgtctcataatagagacagttcacagagtactgggaacacattgcctgctgcaggggagggagaagagagggagaatggcacgtagtctctgttctcagcatagtcctccccggaggttagtggatcctgacatatgggaggttggccttgttttctgaatggaaataggcactggggctaatgtctgggaagaggctgctttctgtttcataagctgtttgttactatttggcttctgtgacatgcatggatgcatttcagagactcaccttacttcctaacatacaaagaatcctttcctgaaagttttggctttaggaggctttgttttcccaaacagcatccattcctgtttttttttgttttgtttttgtttgtttgttttttttatcttaaagagtcacaagttattgttgaatttacaggcttactatgagagcaattcttactctgtgggtgacttaagacattgctgaatgaggtctccttcctggtaatgttaggtggccactttctgcttcctcaatggggcctgttgcctcctgtatcagacaactatcagagactcaatgacctttgggttccttttaactcagaaataccaggattctaaaatgtcttagggaaagtagttttgatagttctccaatatttttagagaccagacaggtaacagggaaaatataaagcagttggatagataggatatgctggaccctgcctaaagccatcatattttttaaaaatgatgccattcatacaaacattcctccagagaccattactcaagagctagtatggaactccatattaaaatgatgctgccaaaatatgtcccttggaaggcctttacactgaaggtagaaaagaacttcctttgaatggttgaagcctttgaacttttcgggg

SEQ ID NO: 720908 - DNA, 1202 bp, Homo sapiens
ctgcagaatacagagcaatgcagccatctgtagcctactttccaaacttggctcaggacctcctttggcagatccagattttccttcccttgtagctatagagaaatttcccttcccaggggcatccctagccctcctaccaaggcaaaagaagctacagttggttttggttttagataatctttttccacccccatttcgctggatttctgagagactggaagttgcatacagaccggcgtgccacttttggtgaactaaaaatattaagtaggcmcactgaaatattatctgtctcataatagagacagttcacagagtactgggaacacattgcctgctgcaggggagggagaagagagggagaatggcacgtagtctctgttctcagcatagtcctccccggaggttagtggatcctgacatatgggaggttggccttgttttctgaatggaaataggcactggggctaatgtctgggaagaggctgctttctgtttcataagctgtttgttactatttggcttctgtgacatgcatggatgcatttcagagactcaccttacttcctaacatacaaagaatcctttcctgaaagttttggctttaggaggctttgttttcccaaacagcatccattcctgtttttttttgttttgtttttgtttgtttgttttttttatcttaaagagtcacaagttattgttgaatttacaggcttactatgagagcaattcttactctgtgggtgacttaagacattgctgaatgaggtctccttcctggtaatgttaggtggccactttctgcttcctcaatggggcctgttgcctcctgtatcagacaactatcagagactcaatgacctttgggttccttttaactcagaaataccaggattctaaaatgtcttagggaaagtagttttgatagttctccaatatttttagagaccagacaggtaacagggaaaatataaagcagttggatagataggatatgctggaccctgcctaaagccatcatattttttaaaaatgatgccattcatacaaacattcctccagagaccattactcaagagctagtatggaactccatattaaaatgatgctgccaaaatatgtcccttggaaggcctttacactgaaggtagaaaagaacttcctttgaatggttgaagcctttgaacttttcgggg

SEQ ID NO: 720909 - DNA, 1202 bp, Homo sapiens
ctgcagaatacagagcaatgcagccatctgtagcctactttccaaacttggctcaggacctcctttggcagatccagattttccttcccttgtagctatagagaaatttcccttcccaggggcatccctagccctcctaccaaggcaaaagaagctacagttggttttggttttagataatctttttccacccccatttcgctggatttctgagagactggaagttgcatacagaccggcgtgccacttttggtgaactaaaaatattaagtaggcccactgaaatattatctgtctcataatagagacagttcacagagtactgggaacacaytgcctgctgcaggggagggagaagagagggagaatggcacgtagtctctgttctcagcatagtcctccccggaggttagtggatcctgacatatgggaggttggccttgttttctgaatggaaataggcactggggctaatgtctgggaagaggctgctttctgtttcataagctgtttgttactatttggcttctgtgacatgcatggatgcatttcagagactcaccttacttcctaacatacaaagaatcctttcctgaaagttttggctttaggaggctttgttttcccaaacagcatccattcctgtttttttttgttttgtttttgtttgtttgttttttttatcttaaagagtcacaagttattgttgaatttacaggcttactatgagagcaattcttactctgtgggtgacttaagacattgctgaatgaggtctccttcctggtaatgttaggtggccactttctgcttcctcaatggggcctgttgcctcctgtatcagacaactatcagagactcaatgacctttgggttccttttaactcagaaataccaggattctaaaatgtcttagggaaagtagttttgatagttctccaatatttttagagaccagacaggtaacagggaaaatataaagcagttggatagataggatatgctggaccctgcctaaagccatcatattttttaaaaatgatgccattcatacaaacattcctccagagaccattactcaagagctagtatggaactccatattaaaatgatgctgccaaaatatgtcccttggaaggcctttacactgaaggtagaaaagaacttcctttgaatggttgaagcctttgaacttttcgggg

SEQ ID NO: 720910 - DNA, 1202 bp, Homo sapiens
ctgcagaatacagagcaatgcagccatctgtagcctactttccaaacttggctcaggacctcctttggcagatccagattttccttcccttgtagctatagagaaatttcccttcccaggggcatccctagccctcctaccaaggcaaaagaagctacagttggttttggttttagataatctttttccacccccatttcgctggatttctgagagactggaagttgcatacagaccggcgtgccacttttggtgaactaaaaatattaagtaggcccactgaaatattatctgtctcataatagagacagttcacagagtactgggaacacattgcctgctgcaggggagggagaagagagggagaatggcacgtagtctctgttctcagcatagtcctccccggaggttagtggatcctgacayatgggaggttggccttgttttctgaatggaaataggcactggggctaatgtctgggaagaggctgctttctgtttcataagctgtttgttactatttggcttctgtgacatgcatggatgcatttcagagactcaccttacttcctaacatacaaagaatcctttcctgaaagttttggctttaggaggctttgttttcccaaacagcatccattcctgtttttttttgttttgtttttgtttgtttgttttttttatcttaaagagtcacaagttattgttgaatttacaggcttactatgagagcaattcttactctgtgggtgacttaagacattgctgaatgaggtctccttcctggtaatgttaggtggccactttctgcttcctcaatggggcctgttgcctcctgtatcagacaactatcagagactcaatgacctttgggttccttttaactcagaaataccaggattctaaaatgtcttagggaaagtagttttgatagttctccaatatttttagagaccagacaggtaacagggaaaatataaagcagttggatagataggatatgctggaccctgcctaaagccatcatattttttaaaaatgatgccattcatacaaacattcctccagagaccattactcaagagctagtatggaactccatattaaaatgatgctgccaaaatatgtcccttggaaggcctttacactgaaggtagaaaagaacttcctttgaatggttgaagcctttgaacttttcgggg

SEQ ID NO: 720911 - DNA, 1331 bp, Homo sapiens
tatgtatacattcaacattttgcagcatatttacattcaagttacatttccaaattctatgccaaatacagtctaactcaccatcaacaatccctcagatattactaaaatcctgtttatttggtaggagtgcaatattatcttattaggaaataattttatgttcctactaagtcaactgcatttttactactttaacaaaattcactgacatttttatcccagttgaagtcaagcctcttttagacaaagtcaatactaactcaaatgttgccagttataaaattatataataatcttttcctccctccttagagacagtattacaactttcaatgaaaggacaccagctatgataaattattttcttttacaagagttaggatgtattacagatacaagttccagaattttaacttgttttcaaaagatggctgaagcacttttccctttcagttgttaccgaattcctcagcaaaatacaacacattcagaaatctacatagcagttttctgaaaacttttctccattgtccccacacatttctcaaatcagagtgcttactcactagcaactggagaatctcttgcttagtttttctaaattatactagagtagctatcctaatttcctgacaatcttcccatttcattttttaaattatgattttattaaaatcaacataaattacaaaggttccatctttgctacggttcttttaaaaatttatcttaacttactgaagggtcaagaccccacagggcctgtctagaacaggcaaacaaaatgtcaagattagaaaattctcatgcctccaaaagactccaggcaaatcaaatctactcaattcttccttatttatctcaagttcaattttaagtctaagaagataattaatgacaaaataacagagattgatgaatttcatttagttgagctcttttttcctaattttcctcaggttgtaacttcgccttcagtacatgatgactggcagttggtagtaggttgctgagatgacaccacttctaagtcagattcacgaacaaaaaccactgcrtcaccacttacatttataagacactgtgcctataagaacaacaaacaggacaggttcagttatactcaacacattcatactcttctgttacataaggggcagtgctgtacagccaaaaaacacaggcttctaaatcattaggataaagataggcaatccaacagaaaaatgagaaaagggtaagagggcaattcacaggaaagaaaactcaaggagctcctgtgaacatatgaaaacatattcaagcccgctattagagatatacagtta

SEQ ID NO: 720912 - DNA, 1753 bp, Homo sapiens
tgttttgttttgtttttaaaagcacagatctggaaatgtctgtcctcagcctcaaaaatactcaacctccatagcagggtaggtaaattattttgaaatctactctctaccattctgaccaactatatcctcactactaatggactatccacatacgtctttccccttctctaaaaatgccatcatcttttatgcgtttgcatctttactttttcatatctagctgagtcaaggtatctttctaattctaaatctttaaaagttttccataatctttctttgacttcacttccctatgtttctaaaagaatttctctgtacctgtattgaagggtttaccacattgtacttgaagttatgagtttgattattattttctcattgactgtcacatctgtgaaagaagggacatattattaagcattatattcccactgccaatgcctggcacatagtcggtgttttaaaaattaaaaggtgaactagtgtacacttcatgatggctaaaattcaaaagactaattaaattaagtaagttgagtcaaggctgtggaagatctcaaactcccatacactgctggaaatagtgggaaaatagtaaaaccactttggaaaatacttggggcaattttttaaatagctacacgtacagatatatgatctgcctattacactactaggtagctacccacatgaaagtaagcatatgtgcatataaaaacttgtacattaatgttcttagatgctctattttaataaccaaaaactgaaaacaactcaaatttccatcgacaggtgcatggagaaacaaactgtggtatacccatacaacgtaatactatttacggcaatacaaaagaatgaacttttgagaaatgcaatgaaatgaatgaatttcaaaataattatgctgagtaaaagaggtcagaaaacacaagtatagggtatatagaccaattttataaaacatcaaaacaatgaaaactcttctatggtgacagaaagcagaatagtggttgctggggtttgcgtgaggcaaatactggaaggctgaggatggaaggattaaaaagaggcatgagaaaactactgagggtgatggatatattcacaatcttggttgtggttaggcttttatgggtgtaaatatatatcaaaacctatcaaattgtgtaaatatgtgcatttttctatgtcatttacacttcaataaagcttttgttaaaaaagttagaaagtgaaatgataaaactatattttgcaagtaattttacaaaatagatgctactggttttcttagggtacaactgggtaggtatatatatttatcaacataatttggtaatgcatacctttttcaagaactgacagcattrttgatttgggatactataaagtcagacactattctttaccatttaaaatatttatattcttctctgttaatcaaatatgtgattatttattatctgtatttactgtggtagaatgggaagaaaaagtgaactgaccttataccaaggtcagtatgtggcccctgagcgggtagtttaagcttgctaggcatcggtgcttcattttgtaaagtaaggcagttaatatacagtgaatacggttcaacaagtaaagtttgtaaaaattgagacagaattttgacaaaaatacttaggaaaggtgttagagttggtagatagtattcatggcctctggagcagtttaaaatctagaaggtatatgaggccatgcctaagta

SEQ ID NO: 720913 - DNA, 660 bp, Homo sapiens
gcatcatcagtgccattaataaatagcaatcagattaatcaatttcagcattagaactctgattttaaaatcaaattatgattagcataaagagttctgtctttactatcgacagcaataatagcttctataagtcaatgcttactatatgatagtcattatactggacacattacatgtttaatccaaatgctagcttcaagtatctctttcctatatgaatcatctacctgaaagttgtttctctgtcatatttgagttctgcattaggctcttactggtcactacctagaaactggcatctattggatgccattctacccaatcccttaatttcacatggacgactactaagacttttatatatatgacagaattgattgaaaagttgaggcattactgaagagaatcaagttacaacatagaaaaaaacaacaaaaaaaatccctaacacactatgctaagtatgamtgttctcacggtgctaaagaaaataactacaggccaggcatggtggctcacaactgtaatcccagcactttgggaggccaaggtgggcggatcacctgaggtcaggagttcgagaccagcctggccaatgtggtgaaaccccatctctactaaaaatacaaaaaattatttttgtatttttatataaaa

SEQ ID NO: 720914 - DNA, 590 bp, Homo sapiens
tggcagaccacaatcaacatgatttattgcagctgcttataggtctgtagcatgaactaaagattgttctgaatactttctctttaaaaaacacagaaataacgtatgctagttgtactaaatttaaagaatacaagagataaaataaaaattataacccaagtcaaacaataattgttttaaaaaacctttgttcattccaatcctaatccccagtaatcaccattaataccagcttggagtatatggagcatatcctttttgatcactctctctctctctcaatatctatttgtgtgtgtatacccatgcacatgcatacatgtgtatacacatatatatatatcatatgtattatatacacatgcagtaattttgctttttagaaaaaccaaatgtgatcagactatgaatattgttctataacttgctttttgcacttaaaaatacatccagaacaagtttctatttatcaaaaaatatacaaatgtcttactcctttaaaaaaatggctctgctattttctrttgcatgtttaggagactattatgttagtgatacctaaagaatcacacctcctggtaatgatg

SEQ ID NO: 720915 - DNA, 1583 bp, Homo sapiens
tcttttagttttcctcttcaaacttgcttaacatgtcttggcttagttgttttgattaactcctggacgtatggtacaacataatacctaagaagaaggagtatacttattatagttgttaaagaggtaagaattcaggctatggattttttckttttctgttgatgaaatgccaaggtaaaagggatagccaattgaactagagcataagtaccactctaattatttggcagagtgtccagtaaaggtcctccataataccaccatacgtccgctcggggatgaataagggcagactgatgggtcagctcttggaagtgcctgacttcactgcatcctgttaagtctccaaggaatgccaaaattttcctcttgtcattagagactagaggtaaaattggttttggaagatggaggctggatggcactcgggggctgacccacagggtgttgagcttcaggaaatagcagagaaagagcttggtacaatttgttattccaggcagtggaatcttgaaaaagaggtaccatgcactctatgtccgcttgatttgaggaccatcccagtggaaagggaacaacctgggcctttggcctactgtacgcaaaagcctaacagtcgcttttgtttgaagtgcgaacggaatatttaatccattttaaccaggcatttacatctttataccctgtttcaatggctgtggtttaccttaggtctcctagttctactactgagaccttgcttttgtcatttggcatgaggcgaggcatagtttgatttcgtaggtttaggaaaggggcagttgtaggaggtggaggagggagaacaaagcgcatcttaaagaagcctatggatcctttccagtgacctctgctcctagaccacagaaacgctttaaagtggggttagagttgctagtggtaggaatagtaatggatataggcactgggttaggaaaggaaaagagagatagactaagcttttcttagcttttatttggtagggcttgatccaggaacagtggcccatgattcttatgataatggcgcttgcttgactcgggtgtgctgtgtccatccccgttctgctgtaggaacagcagtcttggtgggtagcagcacaaggcagggtccttcccaggctggcttgagtttcccttctttctaccctttgatgggaacgtgatccccagggtggtgctggtgtactggaaactccaagggcggcgcctgtgctaaaagaccttttgttttaagggaagagaaggtggaagagaaaccaagtatataatttccaagaaattgattttttgttttaaatgtggggatatcagcagtggattttacagtccttagtgtcttcttgctgagaaatttccgttagcacctatttttattagtttttaggccaaagaaagccaaacaccattttatatttgacaatgcttcctgcatgattttataccagataagctgaattttacctttatattagtgtgttattaatgttaaacttaattttaataaaactttatggacatatttatccaattttaatgtctgaccataaggtaagattttta

SEQ ID NO: 720916 - DNA, 649 bp, Homo sapiens
acagtgggatttaaggcctaaataaggacttttaaaatttacgatatactctatgctgtattctaacaatattttggagggactgatcaggcttcttaggtgttcattgaggctgtgtttttttttaaaatcatctgaatgtatttcatagtttcagatgcccatacacatctgtgtgaacctaaaactccaagctatggggaaagtaaatatagatattaaatgtgagaaatgtgacccatgtgctagagccacacaagttttagagctcctcattcccctgttggtcattttcatcctatatagtacacagcatgtgaaagsctcgatggaaaatatgccggaggctgcaaatgcatttatgaatcacaagagtttatgaattatacatataaaatggcttgccttaggtattttatggaggccttagtatatccatatatttccttctacaatgagtgcattttgtgagtttccaaaagatcagaaattcttcagaagctgggaatattcacaaaagggaggtgcaggtctgcatagatgctaagagctttaaaattctaataatattaggtagcacaatagagacaacaaaagatgagtctatcatttaatgaacttaatggtttttcttttaaaatatagtgat

SEQ ID NO: 720917 - DNA, 2588 bp, Homo sapiens
  misc_feature 2571: n = A,T,C or G
aacttgattagactttgagaaaaaataaaattaaaactgctgtaaaagataatttaagtgaaaattggtctagatatctgacagcattttttaatatattgtattaagaaatttctcagccagtcatagtggctcacacttgtaatcccaacactttgggaaccccatgcaggaaggctgcttgagaccaagagtttgaaaccagcctggacattacagagagaccccaactctgcaaaaaaaaaaaaaaaaatcctgggcatggtggaatattcctgtgttcccagtttctcccagggctgcgtttggaggattgtttgagcccaggtgatcaaggctgcactgagccataatyatatcactgcactctggactggacaatagagtgagaccctgtctctaaataaataaattaattaaatttctctttactttcttatgtgcacatgcacatgaaggttggtcttcagttgccctgttgaaattagagtgtggtgaaacaatgcaagatatactgtggaggttttttatttgtttttgttttcctgtgagttataaacagttcattctctgatgcagaggtatggtgtttccctcaacatatgttgtactaaactggcaggctaacttgttagcttgtaagtagggtaaatctcagatctttcacaatttaactcaaaatttttgaaagcaaggatgatacaacattgaagacctttgtagaggaagtcgagaaccacacaagtcaataagaatcagtagcagacagattgaccaactgtagtttcaattaggcaaaactggtctttctctttgctgtacattaataaggaaaggttattgaaggcctacatctaggacgtagggttgaaataagtgaacgggaagccctaatggtcagggggagaaaaggtcaaggaatttccaaagcttgtataaggcttttgtcaagaagaaaacattagaaatgattttgtttgttgctgtctttaccaggtaggaacagaaagggataattagcttccagagctcttgtaaggctgaaggtcatccaagaacatgggtagttgaaccataaaaagtcattgcactgctctaacctagcttacttattagcatgaagactctttaatagatttgcccattcctttcttccccctctattcaaacctcagttgcctgaaggattcttggtgatttcttcgtctcactacagcaaagggaaactggaatttttttctacccatctgaatataccatggaactcagggaaaggagggactcaaacttttgtaactatattgcaaacatgtgcccacatcaccaacaggtcaaattctgttggggaggagtgctgagtatatgagtgaatgaagatgtggaagaatgtcactcttggcaggtaaaaggacagaaaggaagagcctctgactctgagaggcccccaccaaccatacaaccccagatgcccgcagtgcttggggaataaaataaagaacaaaatacagaaaaaaagctcatcatcttcctcccacatgcccaccctgtagccttaccactctgagtctgtttttgcctcaaagccccagatgagagagaacattgggatttcatggcagttgtaattatagcccttgaaatgccaaattcagctactagggcttgagcaaaacttgcagtgaatgaaaacaaaatggttaaagttattttatgatcagagtcctttaggctgatttatggaattgagtccttatttgcttctacatttaaatctatgatagaaacagatgataagttatattaattcctcttctcatacgtttctcagggaattatcccagtgaaaaaacagctacaggtagagaactctgttcctgggacagatttccctgccatttcccactggtgagataatttatatttatagcagttgactcaagccactgacattctagcaaatcaagaaaatactatgtacctctgttcccttatcaaaaaggaggcttaggaccttattgagtcaagcattgcttttcaacaagggcactgtagacaaaaaggagctgcttttaaagtagcatatctagtagccatgacaaaagcctaagttccaaaagcccaagaaatttttatcccctttggtcagagatacaaatcagcaaaaaatatcatcagttaaaagaaagttgcttcacttatagaggcctgacaacttgggggttggtttagttaggactttataactagtaaaacaggaagggaccaaaaagcctcatttgtcaaatggacactgataattgaggaatgtggccaacctaatccccagggaaataatgactttgcaagaaaaatggtagctatttctgtgagtaaaacatgacttccaattcactggctagagcaaaactactcactcaataagatattcaattcacagaagggtgcctttcatacctgtgttttgtttaaggatgttaagctaaaccaaagcccaatggtgtctgctgtagctgtttcagcctcatcaccagttatgctgggatataagagggcagtggttattattcccangtgggaagaacacagac

SEQ ID NO: 720918 - DNA, 1682 bp, Homo sapiens
gtcttaaatttttgaaaaaaacggaaagcaaaaatgtatgtaccacaaccttcaactactgttttgttttagtaacttctttttcttatgaaaacgactaaccacatttagaataaaaatgaacacaaatctacaaaagtaaaaggattacttggtaatttcatgactatgaggatatcatgggcatattttttgctctatagggtcagactagacaaaaacacttgttttataaacaatactgaatctaatttataaattaaacgtacggaaataattcagaactaccagcacttcattattaatattttagatgaataatactcaagggtaacaaaacagtacttttcaaatgatctattacacaatttgttatgcaaatttcatttaaacatattgtaagcttttttttaaaagccaagggaggagggaacacgttagcagtttccttgacttaaattacttaacagactatacaaaattgccaatacaaattaacatgttgttatacaaattctaactagaattgcaacatgacraaaatcaaccacaaaaatccttaaaaatgaataagctccatcaattaatattagtcacctaaattaaagaatttaaaatgtttttatttcttcatatatttacttacaaaacttataaaattgaagagaactgcaaagatgctgaccaggcaaggtggcaattcaaaattaatactagattcagaaagacttttaggtctccaacatcaaattaaatatcaatttgttaattaataactgttaaaactagatgtctagaataattaaaattataagattttataattataattagatgtttataatctgtagataagaacttcattaaggcaattgtcacagatggcaaagaaaaatctattaaagttacatagaaaggaaaggaaaatgtttccctagaactttgggggaaaaatcgataccgtaaaaagtttacttcatttaatattattgtttgatctacctgtgttttgtagcattaaaaagcccttaagtatttatataaatgacctgagaaagcaactgtaagcgtataggcttaactatcccaccaaaaatctcattcaaaagatcaactcacaggctcaatatattggttttattttgcacattttggtaaagtagctttaaattgtcaagaacatataattgagagaggatggagagcacctttttcttgaccttctcaacttggaaaaaaaatggatccccaggctggagtgcagtggcatgatcacagctcactgcagccttgacctcccaggctcgagtgatcctcccacctgtctcccaagtacctgggacttacaggcacacacaaccatgcccagctaattaaaaaaaaaattgttttgtagatacggtgtctcactatgctgcccaggctggtcttgaactcctgggctcaaatatcctcccaccatgcctcccaaaatgctgagattatagacgtgagtcactgtgcctggccttaaccaaaaatttttaatgtaagattttatatccttaaagaggcctatctctaaccaattaagcaactaaacaaaaataccaaacaacttatctccacttcaatctctgaatattgtaaaaaatcagtctacttttttcctaaatgcatctttgtattctaaatacacaaaa

SEQ ID NO: 720919 - DNA, 658 bp, Homo sapiens
tttttttaatcgagtaacctccaacattaagaagcaaagaagtaaaatgtccatgtttatccagctacttgacctgattagcattttttaagtcaaaatgctagttattgctcatagcttccttcaggattataaattacaaagctcctttgtttttctgacaaaaggaagtgaaaatgttctccaaattcacttggacagtgtgatgtgggactctaagtatattacattaagtatatttcacacttgaagatatgatccttttgttttaatactaaggatgatgtttggtttatttaacatcaagatggcctattaatgtgatgtttgtcatagtgaaagagccttcagttgttcataaataaaatcgtttcctactaaagagtcttgggctcaagcaaggttaggtgacttgaggaagttgatcatatacagttgcttgataactttttggtttcatatattcagtccaaagttttctgttttaacwacatgatgaaaccattattgatttaagttattttcagaaggcatctattttcattttacttttatataaattgttttttttccaatcatacaatatgcttcaaagcttaattaatagttatttttctaaactacatttttgagtcttactgattttttaataaaggac

SEQ ID NO: 720920 - DNA, 872 bp, Homo sapiens
tgatcaaggtggcagcccatttggtttctggcgagggctctccttctggcttacagggggcccccttcttactctgtcctcatacagttgagagagaggaaggagctctttgctgtctcttctcattaagacactgattttatcaaaccgggtctcccctacaccccgtcatggccttatctaaccctaatcacctcttaaaggtcccatctccaaatactatcattttggggattaggggtctgacatatgcattttgggggtacacaaacagcccataacaacatgaatagctgcaggtgacttgaaatgttagaagcaaaaatagcctggaaaggctgggtgcggtggctcatgcatgtaatcccagcactytgggaggccgaagcaggtggattatctgaggtcaggagttcaagaccaacctggccaacatgatgaaaccccgtctctgctaaaaatacaaaaaattagccaggcatggtggcgcacgcctgtaatgccagctactcgggagactgaagcaggagaatcacttgaacccaggaggtggaggttgcagtgagctgaaatcacaccactgcactccagcctgggcaacaagagtgaaactccatctcaaaagaaaaaaaataaagaaaaagaaattgcctggaaacttcttccctcatatgcctggggtctgggacgggacaactctgaggctggactcagctgggaccatcagctgaaacatcaacacatgcccttccatccagcctggactttcacattcagattttgcaagagtccgcaataaacctttgctatgctaagccactaatactttgggttgattgctgcagtgtagcctaccttatcctggactaaga

SEQ ID NO: 720921 - DNA, 653 bp, Homo sapiens
  misc_feature 2, 3, 4, 5, 6, 7, 8, 9, 10, 11, 12, 13, 14, 15, 16, 17, 18,19, 20, 21, 22, 23, 24, 25, 26, 27, 28, 29, 30, 31, 32,33, 34, 35, 36, 37, 38, 39, 40, 41, 42, 43, 44, 45, 46,47, 48, 49, 50, 51, 52, 53, 54, 55, 56, 57, 58, 59, 60,61: n = A,T,C or G
  misc_feature 62, 63, 64, 65, 66, 67, 68, 69, 70, 71, 72, 73, 74, 75, 76,77, 78, 79, 80, 81, 82, 83, 84, 85, 86, 87, 88, 89, 90,91, 92, 93, 94, 95, 96, 97, 98, 99, 100, 101: n = A,T,C or G
annnnnnnnnnnnnnnnnnnnnnnnnnnnnnnnnnnnnnnnnnnnnnnnnnnnnnnnnnnnnnnnnnnnnnnnnnnnnnnnnnnnnnnnnnnnnnnnnnnntgatgacgttaattttggtttctgattctgagggtttaggtttaggaataattttgacacttggctttatagaaatttccccttaagtgcttactttaaaatctgtgacttccccaccctgcagcccccaatcctctaaacaaacataccgttgtcactactctcttaacctccaggcagcagggcacagaggaaggaacactggcattgtctggctgggggaccacaggccttgctttgtcgtctaacttccaagccccttcaaagagattagagccaaaatggaagctcttgttcactacaacttattaaaatgctatatgtgtttccagttttatctgcctaatttgcatcttttctgtccctcaaaattaagtggtyaccccaatggataaataccatctctgaagctatattctgagcagtgcttagagattagactttccaaggacgaacacctggtttaataactatcattgccaactatgcgttatcactatttgcacagttttacctttaatatgacacttttattttcatggcatttcatta

SEQ ID NO: 720922 - DNA, 597 bp, Homo sapiens
atgggtagtgaagaacacaattatagagactcattgggcagcaaagtagataaccaataagccaatgacctgatcaatgggtattagatacattaaatgcaaaagatgatcctgaagtgtccattagcagagattctacaaatatattacctaaaaataatcaatacagcctgctgacaatgtaacctataatagtggtttcagaagcaatttcaaaaacgtgcactgctcacacttgattgtcttttctacttttacgctgcaaaccatacctttccctatctccatcttaagtcccttctttaaggctttttctataatagtttgttgtttcattcttaccacgcagtaagaagaaatggaaaaagggagtcatgtgggttttctgtctctccaggacacaatttgatgaaacatgaccaatatttgctgatggctttgaagacaaaactatgacattacagcctttgcttttaaaggtagaggaaacttgtgagaaagttagcatgggggtgtgtaatgggaagcacsagttgtaaagattggatgcttcctgttaaacttggacaggaaatttgttttgtcatgattgtccag

SEQ ID NO: 720923 - DNA, 1229 bp, Homo sapiens
agtaacgcgggatgatggcattaaaagagacaaacttgtgaggagtatacagatacctgaactaaacccagtttctctttctcctcctttgttgagaaagcacttttaccacattctaaaatactgtatttgttcaagtttactttgatagttttcagtatatttggtttcatagcttcatctgtgtgttcgtggaagagtgccaaactgttagagacttcatgatacgttgcgctatcataggagataggatagtaacttcactacttttcactttgttcccttttatgttgcatgcatgttgttttcatttcatatgacttttagattctacttgtctagttccaagcaataaaactattgatatttctataatggtttatatttataaacataattaaggataattatcatttaataaaatattaagaatacctactcaagaacagatatatgtttccatgtgtgtaggtcaactttcaggttccaagagtgtcaaatgttttcttcatatagttgtgcacagttttattaactatatttctatttgtttttatgttattgctatttttctttcattatgtattccaaagtgttactgaagtatratttctatgatatatttatatattgatatatgtgtttcatattttactatcttttgtgttctcttattgtttctagtagattattggttatttttgtgtctcccagagtatagccatgttataaaaaaaaagtattatctatttcttcctaattattatgcctctatgttatttctcttggataatatatttgaggatattttcattacagttaaaaatcttattgttatcgggggcggtttatctattccatggctttagtagttataaatccctcattttgctggatgtatgtgttacatctatgataaatctttgctctcaagggcgcatgcatatgcatatgtatttaaggtattttattgagtgttcttttttttttaatcaagagcatcatcacttgaaacttttcaaatgccttttcagcacccatggaggcggtaactgatttttctcttcagatctatgaataaaagtgcatctaatatcttttgtgcagcacttcacatccccttggcctgtccttgtgcttgccacggctccactgaccaattgcagcaggtttcactgagctttgcactggtgaaactgacaggggcaggccatggccccatgtagtga

SEQ ID NO: 720924 - DNA, 1229 bp, Homo sapiens
agtaacgcgggatgatggcattaaaagagacaaacttgtgaggagtatacagatacctgaactaaacccagtttctctttctcctcctttgttgagaaagcacttttaccacattctaaaatactgtatttgttcaagtttactttgatagttttcagtatatttggtttcatagcttcatctgtgtgttcgtggaagagtgccaaactgttagagacttcatgatacgttgcgctatcataggagataggatagtaacttcactacttttcactttgttcccttttatgttgcatgcatgttgttttcatttcatatgacttttagattctacttgtctagttccaagcaataaaactattgatatttctataatggtttatatttataaacataattaaggataattatcatttaataaaatattaagaatacctactcaagaacagatatatgtttccatgtgtgtaggtcaactttcaggttccaagagtgtcaaatgttttcttcatatagttgtgcacagttttattaactatatttctatttgtttttatgttattgctatttttctttcattatgtattccaaagtgttactgaagtatgatttctatgatatatttatatattgatatatgtgtttcatattttactatcttttgtgttctcttattgtttctagtagattattggttatttttgtgtctcccagagtatagccatgttataaaaaaaaagtattatctatttcttcctaattattatgcctctatgttatttctcttggataatatatttgaggatattttcattacagttaaaaatcttattgttatcgggggcggtttatctattycatggctttagtagttataaatccctcattttgctggatgtatgtgttacatctatgataaatctttgctctcaagggcgcatgcatatgcatatgtatttaaggtattttattgagtgttcttttttttttaatcaagagcatcatcacttgaaacttttcaaatgccttttcagcacccatggaggcggtaactgatttttctcttcagatctatgaataaaagtgcatctaatatcttttgtgcagcacttcacatccccttggcctgtccttgtgcttgccacggctccactgaccaattgcagcaggtttcactgagctttgcactggtgaaactgacaggggcaggccatggccccatgtagtga

SEQ ID NO: 720925 - DNA, 641 bp, Homo sapiens
ttccagcaaacattgaatgtggtaaaattcaactgggtcaagaagacttagccataacttcccttcaagctaaatacataataaaatatgtgtaaatatgtgtaaaatcacctgattcataaattctgattgctgacaatactgaaatacatttattaaatccttctagactttatttttttaaagcgagatcattatataatttaaatggcttatttgtgatatctaacaaaatagaaacttaaatggtttgtgtgttgcctgtagtatatttctattatatagaggcccattaaatatatttcaaagactacttaatgttatttataaatgttaatcttttttccatccttcatgatgctaaataaggaagtttataaaaatattttaaaactttgtcattccccacttatagcgcagttgacttctttaactactattattctacatagtttgatcctatgttatcttctgyactttgcattctactgaaattacctgaatgtgtaattacttatttaaaaaatgtcgtaaaaatggttttttgaaagtaactagtggaaaaattttctttgtcacattcgaagttgcttttgcaaatgtgtttataattcacgtgtctactaaaatctttttaaatg

SEQ ID NO: 720926 - DNA, 1003 bp, Homo sapiens
cgcagagaaggggcgtggaaaggtaaaaccatcttcttggacgtgggtctgctcctctcctgccggacaatgtgctaccgtggggcttttgtcctgggctgcagtgtggtcctctcgatcctagaaaagaggccgctcaggatggggatgagacttccattgctccgggcccgatgcatcccctcacgttatcgaggcctgcacagacccaaagtggaaccgccgcgaagacgatggacagctggccgcaggacccagggagagacgcagaaagaggctcaccaaagaccggtccacataaaagacatcactttttgacgcacagggcacattcgtccaaagacacacacacacacacacacacacacacacacacacagagggaaagaagcacacagagggtgagagacagagagagaagggagaatgggagacacagccccacacacagtcctaccgcggtggccgagaaatacacgcccccaggcaacccctgcggctgccgggttctgctctggaggggaacaaccctcggctgagagaacagccctcgggcacgcaggcggacctgtcctcgagatcacgggggcacgacttctcgggagactcacccgaacaccgtcctgrcaggcctgaggctgggatgccacgctgcttcccccggactccgcctgtggtttcctcatcctgctcggccccttgcgactcctggcagccggagacgttcctgtggaccccgtggagaggtcaggccggagcctcggaggcccgacacccaggcgctgccacggagggctcccgcgttgccaagcctcggggactggttcctaagacaaccgtgggaagcactgtgaagcaaaaagcggcgccgcctcagctgcgctttggctgggccgactcgcgcttggctcctggcagtcaggcaggctgcgtcccctttaaatacgggcggctgcgcggcggcagggggcgcgcctgctgcagcagcggctgcggctggatc

SEQ ID NO: 720927 - DNA, 1003 bp, Homo sapiens
cgcagagaaggggcgtggaaaggtaaaaccatcttcttggacgtgggtctgctcctctcctgccggacaatgtgctaccgtggggcttttgtcctgggctgcagtgtggtcctctcgatcctagaaaagaggccgctcaggatggggatgagacttccattgctccgggcccgatgcatcccctcacgttatcgaggcctgcacagacccaaagtggaaccgccgcgaagacgatggacagctggccgcaggacccagggagagacgcagaaagaggctcaccaaagaccggtccacataaaagacatcactttttgacgcacagggcacattcgtccaaagacacacacacacacacacacacacacacacacacacagagggaaagaagcacacagagggtgagagacagagagagaagggagaatgggagacacagccccacacacagtcctaccgcggtggccgagaaatacacgcccccaggcaacccctgcggctgccgggttctgctctggaggggaacaaccctcggctgagagaacagccctcgggcacgcaggcggacctgtcctcgagatcacgggggcacgacttctcgggagactcacccgaacaccgtcctggcagscctgaggctgggatgccacgctgcttcccccggactccgcctgtggtttcctcatcctgctcggccccttgcgactcctggcagccggagacgttcctgtggaccccgtggagaggtcaggccggagcctcggaggcccgacacccaggcgctgccacggagggctcccgcgttgccaagcctcggggactggttcctaagacaaccgtgggaagcactgtgaagcaaaaagcggcgccgcctcagctgcgctttggctgggccgactcgcgcttggctcctggcagtcaggcaggctgcgtcccctttaaatacgggcggctgcgcggcggcagggggcgcgcctgctgcagcagcggctgcggctggatc

SEQ ID NO: 720928 - DNA, 1003 bp, Homo sapiens
cgcagagaaggggcgtggaaaggtaaaaccatcttcttggacgtgggtctgctcctctcctgccggacaatgtgctaccgtggggcttttgtcctgggctgcagtgtggtcctctcgatcctagaaaagaggccgctcaggatggggatgagacttccattgctccgggcccgatgcatcccctcacgttatcgaggcctgcacagacccaaagtggaaccgccgcgaagacgatggacagctggccgcaggacccagggagagacgcagaaagaggctcaccaaagaccggtccacataaaagacatcactttttgacgcacagggcacattcgtccaaagacacacacacacacacacacacacacacacacacacagagggaaagaagcacacagagggtgagagacagagagagaagggagaatgggagacacagccccacacacagtcctaccgcggtggccgagaaatacacgcccccaggcaacccctgcggctgccgggttctgctctggaggggaacaaccctcggctgagagaacagccctcgggcacgcaggcggacctgtcctcgagatcacgggggcacgacttctcgggagactcacccgaacaccgtcctggcaggcctgaggctgggatgccacgctgcttcccccggactccgcctgtggtttcctcatcctgctcggccccttgcgactcctggcagccggagacgttcctgtggaccccgtggagaggtcaggccggagcctcggaggcccgacacccargcgctgccacggagggctcccgcgttgccaagcctcggggactggttcctaagacaaccgtgggaagcactgtgaagcaaaaagcggcgccgcctcagctgcgctttggctgggccgactcgcgcttggctcctggcagtcaggcaggctgcgtcccctttaaatacgggcggctgcgcggcggcagggggcgcgcctgctgcagcagcggctgcggctggatc

SEQ ID NO: 720929 - DNA, 591 bp, Homo sapiens
cggaggcatgtggggcgagggcgaaagcaacagtggtgcccaggcatgcgcccggtagaaaggggatcaagtggcctttccctgagtgccaagggaacamaaagaagacctgggaacctggacggggcttgtgcctcagccaagccacatgttgaaatgcctgccagaggaccacagaggtttctgcaacagtcaccccacccccaaccctccaccacccagctagccctgacgcaacctcccctgcacgcagccccagcgccagtcccagcgcagtccctttgtttcctgacattcgttacagccaaaagatccagggagtctgtccacctgtgagcggaggagaggatgtccctcaagagtgagacaggaagcgcaggggaaatgcacttgtcctagaagacaaggccagtctcgccggcctagcgctcgctcatcctaggcaatccacccacccatgaggtgaaacacggagaccgaggaagcttccctgtctgagacacgtatggaagccaagagccccagggtcatcagacctgcgcaatccagcagaaacgggcttggagagagaaacagtcatgacacggatct

SEQ ID NO: 720930 - DNA, 591 bp, Homo sapiens
cggaggcatgtggggcgagggcgaaagcaacagtggtgcccaggcatgcgcccggtagaaaggggatcaagtggcctttccctgagtgccaagggaacacaaagaagacctgggaacctggacggggcttgtgcctcagccaagccacatgttgaaatgcctgccagaggaccacagaggtttctgcaacagtcaccccacccccaaccctccaccacccagctagccctgacgcaacctcccctgcacgcagccccagcgccagtcccagcgcagtccctttgtttcctgacattcgttacagccaaaagatccagggagtctgtccacctgtgagcggaggagaggatgtccctcaagagtgagacaggaagcgcaggggaaatgcacttgtcctagaagacaaggccagtctcgccggcctagcgctcrctcatcctaggcaatccacccacccatgaggtgaaacacggagaccgaggaagcttccctgtctgagacacgtatggaagccaagagccccagggtcatcagacctgcgcaatccagcagaaacgggcttggagagagaaacagtcatgacacggatct

SEQ ID NO: 720931 - DNA, 591 bp, Homo sapiens
cggaggcatgtggggcgagggcgaaagcaacagtggtgcccaggcatgcgcccggtagaaaggggatcaagtggcctttccctgagtgccaagggaacacaaagaagacctgggaacctggacggggcttgtgcctcagccaagccacatgttgaaatgcctgccagaggaccacagaggtttctgcaacagtcaccccacccccaaccctccaccacccagctagccctgacgcaacctcccctgcacgcagccccagcgccagtcccagcgcagtccctttgtttcctgacattcgttacagccaaaagatccagggagtctgtccacctgtgagcggaggagaggatgtccctcaagagtgagacaggaagcgcaggggaaatgcacttgtcctagaagacaaggccagtctcgccggcctagcgctcgctcatcctaggcaayccacccacccatgaggtgaaacacggagaccgaggaagcttccctgtctgagacacgtatggaagccaagagccccagggtcatcagacctgcgcaatccagcagaaacgggcttggagagagaaacagtcatgacacggatct

SEQ ID NO: 720932 - DNA, 1520 bp, Homo sapiens
cttattcacttaatttacattttccaaagttgtttttactctcattactttttaaaaatttttaatttttttgaattatattttaagttctgggatacatgtgctgaatgtgcaggtttgttagataggtatacgtgtgccatggtggtttgctgcatcctctcctcactacttttaatgtctgcatcattggttgtgatgttccctttttcattctattacttatttgtttcatttctcctttattttcttcgtcagtctcaaaaaaggtttatctttttttattagtcttttccccgaactaaatttgttgattaactttattgctgttactttgctgattatttcctattcttgatcattctctttctgatatgtattattagttttctagtgttgctgtaataagttactacaaatttagtagcttaaagtaacacaaatttattatcttacagtctgaaggttagaagaccaatacaggtcccactaggccaaaagcaaggtgtcagcagggctttgatccttttggaagttctaaggaaaaatctgtttccctcccctttccagcttctcgaagatctgtggcatccttactttattgtcagaatcagcaatggcaggtcaaatcctcacattgcatgttggtgatttcagtttctgcctcccccttccactggtaaagaaaccttgtgattacattcaacctgctcagacaatcccacataatttccctattttaagatcagcttgttagcatcttaactccatcttcaatcgtcattctctattgccatgtaaattaatgcattcgcagattctggtgattaagatggatttctttggggagccataattctgcctgccacctacttatttggtcttatttttttcttttactatctgtttgagataaaggtttaactcattagctttcagtgcttcacagaatctgaaaatgccatcaagtttataatctttccttaagtactacatgagctgcatcctcttttatttagaatacattataattcagaccaaatttttctttttttcctctaactcatggattacatagacatgtatttcttgatttataaatatggggcattttgctagtttcctttttgtaattgctattaattcatagtgataagaaaacatggtaatgcagtcattggaaagtgttccaagttgctagaaaatactggatattttgaacttrttttgtgtggtgtttatgtacgtccattgtggaaagctatttaatcatgttgttaaaatattttgaatattttgttgttctaccaattactgaaaaagttgtcttttaaaaacattttattatacatgggtatttgtctattttagtatctgttatttttttacttcattttttgaagttatattattcagtgcataccagtttaaaattgttatgtcttcatgaatatttatttttatgaaatgatactgtttatctccatcaatagagaatttttttccagtagacttacctt

SEQ ID NO: 720933 - DNA, 539 bp, Homo sapiens
ctgttctcatgayagtgagtaatttctaatgagattttatggttttataaggggctcatcccacttcacttggcacttctctttcctgctgtcttattaagaagatgactttcttcctctttgccttctgccatgattgtaagtttcctgaggcctctcagccatgctgaactgtgagtcaatgagagctctttcctttatgaattacccagtctcatgcagtgctttatagtactttgaaaatggaataatacagaggtggaaaaagagaaaggagagatgtgagagggagatatcaacattttctatagatttctatagaaaaattcttgctatcctctattcaatcaggactacaggttcttatgcaagagctcatccatatttatcacagctcttattaaaatctagcatacttaattttttatttcctaaattatttaatggcctatatcagctggtgtcttcttgaaggtattgtagacattcaataatgaattgttgattaagtgatttattgaataaataacagttcaact

SEQ ID NO: 720934 - DNA, 539 bp, Homo sapiens
ctgttctcatgatagtgagtaatttctaatgagattttatggttttataaggggctcatcccacttcacttggcacttctctttcctgctgtcttattaagaagatgactttcttcctctttgccttctgccatgattgtaagtttcctgaggcctctcagccatgctgaactgtgagtcaatgagagctctttcctttatgaattacccagtctcatgcagtgctttatagtactttgaaaatggaataatacagaggtggaaaaagagaaaggagagatgtgagagggagatatcaacattttctatagatktctatagaaaaattcttgctatcctctattcaatcaggactacaggttcttatgcaagagctcatccatatttatcacagctcttattaaaatctagcatacttaattttttatttcctaaattatttaatggcctatatcagctggtgtcttcttgaaggtattgtagacattcaataatgaattgttgattaagtgatttattgaataaataacagttcaact

SEQ ID NO: 720935 - DNA, 870 bp, Homo sapiens
tctctttctattgctacaccacgtgattcactttaaataaaagtctcacatccatgtaatctctggtatctggtaagtagcttcagatatatgaattgagaaacaatacaactagtgagctgaaagataaatcaaaaagtttatctcaaacaagggaaaatgaaatacaaagtaaagtgtaagagtaatatagaacaaaaggaaggaaggaagatgatagagaattgggcaaaagcaatgtgacagtgagaagatgtgataatgagaattttttaagtgaaaacttcatcccctgggcaatatctgcttcagtagtgaacagactccgtgatattagaaaataagcttctagtgtgccaatgatctatattagttttacatgctgcaagacacactttctccaaattttcaggataaagcaatgcctatttattgcttcaatttttgtaggtcagaagtctagacaaactaccattagattctctggtcagggtctcacaaagtagaaattaaggtgttagccaggctgcattgttatgtggagttcatagccctcttgtgagctcattaggctgttggtataatttagttctttcgattgtagaactgaggtctccattttcttaactggccatccatggagrttgttcacaatgcctggaggacattttaaattcctatccatctatccccctcacaatatagaaacttctctttaaagccagaaggataaccattctcagatcagcaatgatctcagcccctcttttaacatcttgcaccaaactgattcttacccacccagaatagtcttccttacaattcactaaaaataaactgatttgggactttaattgcatatgcaaaatc

SEQ ID NO: 720936 - DNA, 593 bp, Homo sapiens
ttttagaaataaatggtgaaatcaactttgaatataatttgattttggtaagaacatgattgacgaaaattttgaaggtttgaattatcactatgcagaatgaatgagatagctgagtaaaaatataaacatccagcagtaggtgcccatttatttacaaagattgcagttgtacacagtaacccaagtacggaaagggaaagtcacaaaattagaatgatggagctttgggctgaagtgtagttatgtagctggtaagcttaatgtaggatggaaactctgtggtgacaggtataaataagaagtgaaaatagaaggaaaaaacacgtactctctaatttaataatattagcccattttaccctccgaacatttcaaaaattaccttgaacatatatatgatttyaatattttttatataaaaaatgtagatctatccatgtgaacttttgattttgtcttaaagtacccaaataattgaatcaattattgacttacagatttaggtccgcaaaaatttatttaattttgagttaaataaagaaaataaacaaattgaggttcaggacttgtacctatattaaacatattga

SEQ ID NO: 720937 - DNA, 1144 bp, Homo sapiens
gacctttttattgatgtaacatgaattttcaacatgtttgtgaacaagcaaaagaagaagaggaggaggagttgcaatggaaaaggaagagagaagagaaaggataaggagaaagaggtggaggagaagaataattcttctaatggaatttgagatatcagaaatataaaagataaactaaaacttgagaaagtactttatgcaagacgtatgtgtgcttgtattttacatgccattttttcctaaaataaaatatgttttaactgtctgagtatcacataacatatgctaattttataatcatttaactaacaaaatgaataaataagaaaattaaaatatcccaaaccacaaacaaaatatacagtaaaagttatcaaaaaaatttccagaatgtggaattgtgggttccatcactcagtgtactatttattggctttaaatcttctagatttctttccatgtcatgagcctaagtctcatcagagctaatgtaaggcaaactttaaagaacatggcctactatttactcagaaaaatagtgatatgtgataatcgactgataaagaaacatgaaatatgaagctagcgtattctcagaaaacctagttttatagatgtatacatatctatgtgcacagagtgtatgtttatatacagtcatgcaccacataacagcattttggtcaatgatggactgcatataaaatagtagtcccataagattataagactgtatttttattgaatcttttctatgcttagatacacaaatacttaccaaggagttataacaggctacagtatttaatatagggacatgctgtataaatttgtggctgagaaggaatagactgtaaaatgtaacctaggtgtgtagtaggtgataccatctaggtttgtgtaagtgcactctatgatgttcacacaatgataaaattgcctaatgacacatttcttagaatatatccccctcattaagtaatgcatgactgtatacatgagtatgtgtgtatgtgtgtgtagatccttgtgagacaattcaatgatatgagctatttgcctaagattctttcaagttacactgaaattcaatttattttgaaatcaagcttattaaattttcttccccaaaataygcaca

SEQ ID NO: 720938 - DNA, 742 bp, Homo sapiens
caattttaatgtttttttaaataaactctcttcactagatactgaatatttttagctcacttttttatcatttataaaattcctttgggactgaggaaaaactggttttcaaactttagagtattttataaacaacaaaggtagcattttatctgctaccgttttgcacttcactgctgcacagaagtgaggaggccaagtcatttggggatctgggcattaactttcttacaagaaggttactatccaatattggacaagtatagaattttccaaagaggcatatttcattcaggttgtgcaattaatgttaaggtcccagaaggtcattatccttttcaagtcagttggaatgacatctgcctcaagcaacctagaggcacagctgattgttctagttctatagtaagaatataaactcttcctgtaacttatgatttatgtcagtataactctmgtggtagaagagatgcatttgggaacaagaagtaagaaatataaagcaagttgatttacttaaaatatgattggattataaatggaaatatatacaaatggctattaaaataagtgtggttttaaatttcaaagcctcattgaattgttggatgacagtaaagggaaaacacttaagtccatattcatggctgggtttcttgattgtatttcttacaatactgcttatctttgcttaaagaaatgaacaaatcaaaaccatatatatatatatatatatatatat

SEQ ID NO: 720939 - DNA, 626 bp, Homo sapiens
ccagcctgatcctctgaatcttccttccctccctttctgatatagtgactggggcaaaaggagccattgtgaccaggggctgcgggaggcctttcctgggaccttccttgggactggtctgggcccctggcgttgtcgcctgccctgagtccggagccctttgcctccttcctctcccctggggctgggaggctccatccgaccaatgtctgtaaagtgctttgaggatctccccagcaaagcaccttcagaatgtatcgacaccagctgggttagggtcaagggtgcctggggagggtgagtaatcctgcattgctaaaagagagggtctgtcccctcctytccacgtcccagaactggcccagctgcaggcactaaaaagctcctcccctgagacaagtgaggggtagtcggtgaaaggcagatggacaaggggctcagggctgctgccttcctgtcctctggagagaacccagccaggcgcggtgcccttcctctcctcaggctcctccttgcccccaccttgccccaggaaaggccaaagtccaggtgactgccctccttctttcttgtaaataccaaccatgcatttgtacagtgggccctgttcatgcgaaatccacatc

SEQ ID NO: 720940 - DNA, 626 bp, Homo sapiens
ccagcctgatcctctgaatcttccttccctccctttctgatatagtgactggggcaaaaggagccattgtgaccaggggctgcgggaggcctttcctgggaccttccttgggactggtctgggcccctggcgttgtcgcctgccctgagtccggagccctttgcctccttcctctcccctggggctgggaggctccatccgaccaatgtctgtaaagtgctttgaggatctccccagcaaagcaccttcagaatgtatcgacaccagctgggttagggtcaagggtgcctggggagggtgagtaatcctgcattgctaaaagagagggtctgtcccctcctttccacgtcccagaactggcccagctgcaggcactaaraagctcctcccctgagacaagtgaggggtagtcggtgaaaggcagatggacaaggggctcagggctgctgccttcctgtcctctggagagaacccagccaggcgcggtgcccttcctctcctcaggctcctccttgcccccaccttgccccaggaaaggccaaagtccaggtgactgccctccttctttcttgtaaataccaaccatgcatttgtacagtgggccctgttcatgcgaaatccacatc

SEQ ID NO: 720941 - DNA, 603 bp, Homo sapiens
ccagatgcacagcgtatctgccgttgatttcaaaacaggaagaagctgaattgccagtcaagcatcgatcgtactggtgaaaatcataatgtattgatccacgtatactctcagggccaaattcagacgtcatttgtttgttgagataaacaaaatgttaagactttgatttttaggtttcattaatcataaaatgaaacaaagagaaggatgcatcatagaacattactaaagtcatatgatgttcattattttgttaggtgattttcattatgtttacagtttccgattcgctacattggcgctgaaaaaygtctaccttcatgttctgaaagaattcatgtagatccttttggtgtttaatttacttccaaggagtataattacacggcaacatacagttctatagggactataccaataggtggccatagtttaatggcagattcagctaagcatttattctacctttattttaaaatgtttgcttcttcagaaatgctgaagcctgactgatatcttcaacatgagttatttctttgtcatatctacatacactaagttccaaaagaaaaataaggtggctagaggaaacatattcca

SEQ ID NO: 720942 - DNA, 3138 bp, Homo sapiens
  misc_feature 2448: n = A,T,C or G
atggggaatcagtgaccctaattcctgcattcattgttcaagggtcaaccgtactaccattttttttgtaccaaatgtattaccatttttttttggctatgatccttaaaaatgaaaataaattctattctttttaaaaatttaaataaaaatattttataagtcatataatttggctaatatgtcacacagctgtggttgtattgatagattacaaaaaatttcatcagctttaaaccaaagccctctcttaaaaatgatgcagtgtatttcaactttgccttgttaaagtgtcaagaaattttaatccattaagagttgttaaaatgtggaaaataaggcatgtgctatgccagatttttaagtgcccatgtgtttgctcttagacaaagagttgtgttaagtagaatcgtatttctcatttttctagttgtatgtgataattgcactttaaactcctcaaattcacttctgtctgacgtggctttgatcttttacttggtccacattttacttactctttttctctttgtccatgttcatactcataaccaatcatgtttaaaagtaactatggaacacatggaaagttggaatattattgggataatgaaagaacttattttttacaacttgatgacataggatttaaagtaaacgtaaatctgggaggtgcttaatagaattaatgttctctgatggtcactgtaaaacacttaagaaaccatgtatctctggcttaaaataaattctgactacattatttattacaaaattataatctacttacattggttaagtgactattaaaggaagtgaatatttttcttatctaagcaagtagcttgtaggccaaaaatacatttggtttgatgggaagataaattttcaacattttaaagtaattttttaacgtttgtatgcattgtgagccaaaatatttgatttcttattccaactgctttaactctagccatgttcttttgaagacattactttctctgagaatcactttgcttatttgttaatggaatatggaaatgcttgtaaatacctaaaaaggaggtacaagtgacataaagtaaaaaaccttaaaaggcagtaggaatgtaagtcattgttattttctttgttgccatttctgtattctatctattcatgttatatctctcactgtttataccttagtttaaactttatattaatagaacagtagccaacttttctttttgcccatttccatcagtcttatttgcacaatctaacttcgaagagagtttttaataaatataattgatgtgaatggatgcttgtgaagtggaaactggagtagcaaaaaatatgccaagagtgagaagatactcagttgtagtgtttacagtaagttttctttatccatggtagttatattgtataaagttgctgtgactattgaattgctgctcctaggggaaatacaagtttagcttcctgagggcacctggttacaacattgtcatcaaatgatcaatacatagtcttattttatgtatgtttctgttttaaggcaccttatttaatatacagttgattcattaacattaaaatcatggccaatagcatgcaactactgccagaaaggatattttctaacatgtattttctctgtaaggcatattacagccttcttgcatttaggaacactggctgacattttaccactgtgctttcgggccattttatacagcaaaatcactaacaaaaagcacagaaatgtgaaaaatgaggcactaaatagacagttatttacagtgtgagagttgaaataagaaggcagagagttgccttatttgacctcagctgagaacatgcatgtcaggcaactcaagtttttgccattctgtcatgtctacaaatgactagaaagtgccacaagtattgacttttgggtcacaaataagttttagcaaatatgtgaatttgcaaatacaaagtccccaagtaaaagatcaactttgttattttctatttacccaccaccctcccactttgtaccagcctcaacaataattgatgttttgtatgctgtgctttaaatttattttcattttaaagattcaaaaaaaatcattccatctctgttatgtcagtactctagtattttttgtttttagcattatttaatactttatgaatattgcaaacactcaaacattaactgactgaactaagtaatttctaagcaataagcagtatatttagggaggagaagagtaagggaaatttatttaagtgtaatcatgagactttgtctaatgatctgtgttaaattcttacattttctaatgagtaaggaataataccctcatctgaaagccatagatttatgtgaattaatagagaacagacaaatatgtttaaaagagatatcggttgtatcataattaaaatgacttatctagaagtganaatcaacacgcttgatagagccatcagtttaatatagtaaattgaatgcctgccttgtaccttgggctgtcaaagttttccgcacttttggagaatggacagcgatttagaatcgtaaccaaggagggaagaaaagscagattaaccaaaaaattttaagaagattggagcccaataatcatgcataatcttcaccaagccactcctcccagtacaaagataatataagtgaaattgtcatctttcctgtccatatgtatcaacaaatttcatattgtcatttcactagcatgacagatatgtcaggcatgtcatttttactttataattctagtgctgttaacatcctgctccatagacattaatactttcagaactttgctaatgatgaaactgaagctttgagtggttgtgacttgttcaaggtcaaatagatagtaagtagtttaattaaaattgaagttcaaggctgagtgattccaaagtccataatttttccgctacatcaggttttatatatatcaacccaaaattcctactattggatatgctatgagacagtccttgcgggagcaatgtcaattctacacactcctttccctggagattcatgttcttcagaaatcactgacagctcctaaaatcaagaagctatggtggaagaaagaaaactgtcggcaccagagcccc

SEQ ID NO: 720943 - DNA, 588 bp, Homo sapiens
gttgagtttctatcactggttttcagaagctccctagtgctatgaatatggaaatagttatttctaaaaagaggtagttcttgagctgaagaagggaaaagagagacctagaagagtagaaagaaggggaaaatagattctttaaccatggcaaggagatacattatagaaaaatgtaagatgaatgaagaaaatcatctcagttaagatagggcrgtactccccagatcttgtcctccatttaatactttcctgatttttgcttttctctaacacatctatgatattgggttttaaaatacatgcattaaaaaatagtcttgttctaagaaataatatccacaaaattagagggttgatttgctagtttcatatacgtagctattaattttttaaaactcatttgtggatctaacatcattatgtgtgttacaaatcatatgaatatcagactttgggaaatactaagagaattaagtctgctgaaggttagaagggaagggtagagtaagtggcaaagggagaaatcaacttcctagttgcatatcttgaatttagccagcttgggagcaactttgtcgcttcagt

SEQ ID NO: 720944 - DNA, 588 bp, Homo sapiens
gttgagtttctatcactggttttcagaagctccctagtgctatgaatatggaaatagttatttctaaaaagaggtagttcttgagctgaagaagggaaaagagagacctagaagagtagaaagaaggggaaaatagattctttaaccatggcaaggagatacattatagaaaaatgtaagatgaatgaagaaaatcatctcagttaagatagggcggtactccccagatcttgtcctccatttaatactttcctgatttttgcttttctctaacacatctatgatattgggttttaaaatacatgcattaaaaaatagtcttgttctamgaaataatatccacaaaattagagggttgatttgctagtttcatatacgtagctattaattttttaaaactcatttgtggatctaacatcattatgtgtgttacaaatcatatgaatatcagactttgggaaatactaagagaattaagtctgctgaaggttagaagggaagggtagagtaagtggcaaagggagaaatcaacttcctagttgcatatcttgaatttagccagcttgggagcaactttgtcgcttcagt

SEQ ID NO: 720945 - DNA, 644 bp, Homo sapiens
taaactgcactctaaaaatgaagtatgaattactgatttgcctatatccttttggaggaatattacagaaaccatctgtgctaaaattatctgagctttttatgatttgtaaaagaagaaaaaaatgtrgaagtagagtctctgttaaatgacattcaacctaaaattgctaacatttaattaatattgtataacatttaatgttggaagatgcatttgtagtgatttacatccacatgacactgcataaaatctactggtacctttatccacattcaatttctgcttttatgttatctgtatatatttaaattcaattgtatgtacattttgatattaaaattgtttctatatttttaattcctttttggaaaccataaaacttttgacattaaacttagggaaattatttcttgagcaataatttgatcagaataacatttttttgtaattcatttacagataaaatactggccatcctgaaaaatatattgtttatgttgtttcaataatgaagttcacatagcactgtgattcatttgtattattttggcaagcattgttacaaacatcactcaagtatcatttttttgatagacactactttaataagatacaggggattaattcaatacatttttaag

SEQ ID NO: 720946 - DNA, 644 bp, Homo sapiens
taaactgcactctaaaaatgaagtatgaattactgatttgcctatatccttttggaggaatattacagaaaccatctgtgctaaaattatctgagctttttatgatttgtaaaagaagaaaaaaatgtagaagtagagtctctgttaaatgacattcaacctaaaattgctaacatttaattaatattgtataacatttaatgttggaagatgcatttgtagtgatttacatccacatgacactgcataaaatctactggtacctttatccacattcaatttctgcttttatgttatctgtatatatttaaattcaattgtatgtacattttgrtattaaaattgtttctatatttttaattcctttttggaaaccataaaacttttgacattaaacttagggaaattatttcttgagcaataatttgatcagaataacatttttttgtaattcatttacagataaaatactggccatcctgaaaaatatattgtttatgttgtttcaataatgaagttcacatagcactgtgattcatttgtattattttggcaagcattgttacaaacatcactcaagtatcatttttttgatagacactactttaataagatacaggggattaattcaatacatttttaag

SEQ ID NO: 720947 - DNA, 644 bp, Homo sapiens
taaactgcactctaaaaatgaagtatgaattactgatttgcctatatccttttggaggaatattacagaaaccatctgtgctaaaattatctgagctttttatgatttgtaaaagaagaaaaaaatgtagaagtagagtctctgttaaatgacattcaacctaaaattgctaacatttaattaatattgtataacatttaatgttggaagatgcatttgtagtgatttacatccacatgacactgcataaaatctactggtacctttatccacattcaatttctgcttttatgttatctgtatatatttaaattcaattgtatgtacattttgatattaaaattgtttctatatttttaattcctttttggaaaccataaaacttttgacattaaacttagggaaattatttcttgagcaataatttgatcagaataacatttttttgtaattcatttacagataaaatactggccatcctgaaaaatatattgtttatgttgtttcaataatgaagttcrcatagcactgtgattcatttgtattattttggcaagcattgttacaaacatcactcaagtatcatttttttgatagacactactttaataagatacaggggattaattcaatacatttttaag

SEQ ID NO: 720948 - DNA, 622 bp, Homo sapiens
atatatttgttaatttcaacatgataaatttagacacagcataattatagtggtgtaattatttacctcattatgatatctatagtattaaagtaatttgataactggctttttaaaaatggggtttacattattaggaaaaagtagatttttatttacttttctatgccatgttttttgtaacttttcaggagaagaaaaaaagtaatawgaactttgctgtatcttcaaagatcctgcaaagaaatattacatctaacaatgtataaacacacaaagctctattctcctgcattaacttgctgtatcctggttgtttgtgtcatgttactttcaatcttccttttatagttttgtacttagagctttgttattcttcaaattcttttctcttagttaaaaaaaaatattattttgtttcccatttcagaaagggtctataaactattcgtgagaatttgctaacctcattgcccattctcacacatttacacaggtcagtgctagacaccagattgtaagctatgtaaggaaaataaactgaatatttttatctttatgtaactcgcacctagtaattagtgaatccttcattggcatatctctctaaatatgtaatgtt

SEQ ID NO: 720949 - DNA, 1899 bp, Homo sapiens
gattagctgagttaaaaagatgccccaaacattgagtcccattattttaagcttgaagttttataattatagctttatccttgccccatgagagacgcattctctatcaagccattcaagcaaggatcagttttcagtttagatacaactacataatgaataaattcacttctgacatttaattaatgcctttctttactctctcctacccctacactccaccccttatagtacttgcctcctctcattctccccatctccagcccaaatccagatgacttctgctatattaaagtttgctttcaggaaaagatctgaaatccgtaagcggtttcatactaaatattagcacacttcaatggtagaacattgatttgctgaagtctggggttgatttcctagcccctaaaatcacattctaactgtgaccacgtgttctttctataagtttaacatagatttagggtgagacttatctttttatataaacgaaaatatttgggagaatgctttctttgtttctttcttttttttttttttttttttgagacagagtcttgctctttcacccaggctggagtgcagtggcgtgatctcggctcactacaagctccgcctccggggttcaagcgattctcctgcctcagcctcccaagtagctgggactacaggcactcactactatatccggctaattttttgtatttttagtggagatgaggtttcaccatgttaaccaggatggtctcgatttcccgaccttgtgatcygcccacctcggcctcccaaagttctgggattacaggcatgagccaccgcacccagccaagaatgtttctttcatacgtgagcacatagggtatttcatgtattagcattaatgttccttatcaaatatgcaatcaggggctctctatagaatcaatttcaataaaacagttaagcaattttttaatggagtaggcattgattataattttctcctcttctgacttttcaattcttcccaattagccagtgataagaaactggaaagacaattcaaattgtttacattcacttgttttttttaacctactgtagtttggaaggattaaattttaggctagctgattcatttcacaaaaaaatttataaaatttataattcatttcacacaaaaaaagttttaataaaaaatatttccctttgtatttgagctcaacttaattctcaattggccctgaaatgtgagaattgttttcctaaaatattgatggatgtcagaaggccacaagaagtgagacctcatcttttttgctctatgagaacatcaatctttctatttctgtgaaaaataaggaaaggtaggtggactctggtgatttcctgatgttgaagttaataaaaagctccattcaaaactacgatattcggcacaattaatcttccctgttaatataaacagaagaaagagtaaactgtttgatctcaaagctctggtttaatttctagcaagtacgattacttcggttcataatttaaaaaatgaaagctttagatttctattccaagccattacttgataaatcattcattaaagaacatgaatgcacaaaacaaaaataaactttttttttaaaatttggtaagtgtcagtgttctaggatgtgctggccattctttgtggaggtctcagaaccacctctacccttccagccccagtgtcacccctcctgcccgagtggcaccttcctgcccgagtgtcaccctgctccctccagctgactccagttggttttgctatgagagacaccacaggaacagtaaggttcagaagtcagagctcaaaagtttcctccctactcactcctgtttccagttctgacaggaattcttttactctatgaccgtggctcc

SEQ ID NO: 720950 - DNA, 1262 bp, Homo sapiens
ttgacccagccatccgattactgggtatatacccaaaggattatgagtcatgctgctataaagacacatgcacacgtgtgtttattgtggcactattcacaatagcaaagacttggaaccaacccaaatgtacaacaatgatagactggattaagcaaatgtgacacatatgcaccatggaatactatgcagccataaaaaatgatgagttcatgtcctttttagggacatggataaaactggaaaccctcattctcagcaaactattgcaaggacaaaaaaaccaaacaccgcatgttctcactcataggtgggaattgaacaatgagaacacatggacacaggaaggggaacatcacactctggggactgttgtggggtgaggggtgggrggagggatagcattaggagatttacctaattttaaatgacgaattaatgggtgcagcacaccaacatgacacatgtatacatatgtaactaacctgcacattgtacacatgtacccttaaagcataataataaaaaaaaattaaaaaaaattaaaagcaaaaaaaaatgccaacagcaagaaagataaggaattgatgattagaggtagcattattctggttgcaaatcttatactgattttatcagtttcactcaatgaaaaattatgcaagtaaatatggtagttttaatgtctcaaattatttaataaaatctaagatacagaacatttgttagtttgactgcagagcttctgtgaacagatcaacagtatccatatttaatgaaaggaaaaaacttccatgtaaaaaatactacatatatatatatatatatatatatatgcagatttcaagtaaaatctcttagagaagtgtctagagaactctgcaataaactcccctattgattctccctttttccagataactcttttataaatctgtgtttttagagtagaagaagtctagatgttgaaagtgatcaaaaataaaggaaggtaagaagccatatctaaacttattttcctcagagtttaaaaagaaagagaaagctattaagcaacactctcccaagaatgaacctaggatacataatctaatctacctatagagtaggtattaattcacctttactcgtgatcctgtgatcatccctgaggtcccaaccagcagtgcccaagtgcagcacagcctggtcactgaagtagaaaagaagagattggtaactagaagaacagcacccatggttcatacggcactccttgtttg

SEQ ID NO: 720951 - DNA, 1262 bp, Homo sapiens
ttgacccagccatccgattactgggtatatacccaaaggattatgagtcatgctgctataaagacacatgcacacgtgtgtttattgtggcactattcacaatagcaaagacttggaaccaacccaaatgtacaacaatgatagactggattaagcaaatgtgacacatatgcaccatggaatactatgcagccataaaaaatgatgagttcatgtcctttttagggacatggataaaactggaaaccctcattctcagcaaactattgcaaggacaaaaaaaccaaacaccgcatgttctcactcataggtgggaattgaacaatgagaacacatggacacaggaaggggaacatcacactctggggactgttgtggggtgaggggtgggaggagggatagcattaggagatttacctaattttaaatgacgaattaatgggtgcagcacaccaacatgacacatgtatacatatgtaactaacctgcacattgtacacatgtacccttaaagcataataataaaaaaaaattaaaaaaaattaaaagcaaaaaaaaatgccaacagcaagaaagataaggaattgatgattagaggtagcattattctggttgcaaatcttatactgattttatcagtttcactcaatgaaaaattatgcaagtaaatatggtagttttaatgtctcaaattatttaataaaatctaagatacagaacatttgttagtttgactgcagagcttctgtgaacagatcaacagtatcmatatttaatgaaaggaaaaaacttccatgtaaaaaatactacatatatatatatatatatatatatatgcagatttcaagtaaaatctcttagagaagtgtctagagaactctgcaataaactcccctattgattctccctttttccagataactcttttataaatctgtgtttttagagtagaagaagtctagatgttgaaagtgatcaaaaataaaggaaggtaagaagccatatctaaacttattttcctcagagtttaaaaagaaagagaaagctattaagcaacactctcccaagaatgaacctaggatacataatctaatctacctatagagtaggtattaattcacctttactcgtgatcctgtgatcatccctgaggtcccaaccagcagtgcccaagtgcagcacagcctggtcactgaagtagaaaagaagagattggtaactagaagaacagcacccatggttcatacggcactccttgtttg

SEQ ID NO: 720952 - DNA, 1262 bp, Homo sapiens
ttgacccagccatccgattactgggtatatacccaaaggattatgagtcatgctgctataaagacacatgcacacgtgtgtttattgtggcactattcacaatagcaaagacttggaaccaacccaaatgtacaacaatgatagactggattaagcaaatgtgacacatatgcaccatggaatactatgcagccataaaaaatgatgagttcatgtcctttttagggacatggataaaactggaaaccctcattctcagcaaactattgcaaggacaaaaaaaccaaacaccgcatgttctcactcataggtgggaattgaacaatgagaacacatggacacaggaaggggaacatcacactctggggactgttgtggggtgaggggtgggaggagggatagcattaggagatttacctaattttaaatgacgaattaatgggtgcagcacaccaacatgacacatgtatacatatgtaactaacctgcacattgtacacatgtacccttaaagcataataataaaaaaaaattaaaaaaaattaaaagcaaaaaaaaatgccaacagcaagaaagataaggaattgatgattagaggtagcattattctggttgcaaatcttatactgattttatcagtttcactcaatgaaaaattatgcaagtaaatatggtagttttaatgtctcaaattatttaataaaatctaagatacagaacatttgttagtttgactgcagagcttctgtgaacagatcaacagtatccatatttaatgaaaggaaaaaacttccatgtaaaaaatactayatatatatatatatatatatatatatgcagatttcaagtaaaatctcttagagaagtgtctagagaactctgcaataaactcccctattgattctccctttttccagataactcttttataaatctgtgtttttagagtagaagaagtctagatgttgaaagtgatcaaaaataaaggaaggtaagaagccatatctaaacttattttcctcagagtttaaaaagaaagagaaagctattaagcaacactctcccaagaatgaacctaggatacataatctaatctacctatagagtaggtattaattcacctttactcgtgatcctgtgatcatccctgaggtcccaaccagcagtgcccaagtgcagcacagcctggtcactgaagtagaaaagaagagattggtaactagaagaacagcacccatggttcatacggcactccttgtttg

SEQ ID NO: 720953 - DNA, 1262 bp, Homo sapiens
ttgacccagccatccgattactgggtatatacccaaaggattatgagtcatgctgctataaagacacatgcacacgtgtgtttattgtggcactattcacaatagcaaagacttggaaccaacccaaatgtacaacaatgatagactggattaagcaaatgtgacacatatgcaccatggaatactatgcagccataaaaaatgatgagttcatgtcctttttagggacatggataaaactggaaaccctcattctcagcaaactattgcaaggacaaaaaaaccaaacaccgcatgttctcactcataggtgggaattgaacaatgagaacacatggacacaggaaggggaacatcacactctggggactgttgtggggtgaggggtgggaggagggatagcattaggagatttacctaattttaaatgacgaattaatgggtgcagcacaccaacatgacacatgtatacatatgtaactaacctgcacattgtacacatgtacccttaaagcataataataaaaaaaaattaaaaaaaattaaaagcaaaaaaaaatgccaacagcaagaaagataaggaattgatgattagaggtagcattattctggttgcaaatcttatactgattttatcagtttcactcaatgaaaaattatgcaagtaaatatggtagttttaatgtctcaaattatttaataaaatctaagatacagaacatttgttagtttgactgcagagcttctgtgaacagatcaacagtatccatatttaatgaaaggaaaaaacttccatgtaaaaaatactacatatatatatatatatatatatatatgcagatttcaagtaaaatctcttagagaagtgtctagagmactctgcaataaactcccctattgattctccctttttccagataactcttttataaatctgtgtttttagagtagaagaagtctagatgttgaaagtgatcaaaaataaaggaaggtaagaagccatatctaaacttattttcctcagagtttaaaaagaaagagaaagctattaagcaacactctcccaagaatgaacctaggatacataatctaatctacctatagagtaggtattaattcacctttactcgtgatcctgtgatcatccctgaggtcccaaccagcagtgcccaagtgcagcacagcctggtcactgaagtagaaaagaagagattggtaactagaagaacagcacccatggttcatacggcactccttgtttg

SEQ ID NO: 720954 - DNA, 1262 bp, Homo sapiens
ttgacccagccatccgattactgggtatatacccaaaggattatgagtcatgctgctataaagacacatgcacacgtgtgtttattgtggcactattcacaatagcaaagacttggaaccaacccaaatgtacaacaatgatagactggattaagcaaatgtgacacatatgcaccatggaatactatgcagccataaaaaatgatgagttcatgtcctttttagggacatggataaaactggaaaccctcattctcagcaaactattgcaaggacaaaaaaaccaaacaccgcatgttctcactcataggtgggaattgaacaatgagaacacatggacacaggaaggggaacatcacactctggggactgttgtggggtgaggggtgggaggagggatagcattaggagatttacctaattttaaatgacgaattaatgggtgcagcacaccaacatgacacatgtatacatatgtaactaacctgcacattgtacacatgtacccttaaagcataataataaaaaaaaattaaaaaaaattaaaagcaaaaaaaaatgccaacagcaagaaagataaggaattgatgattagaggtagcattattctggttgcaaatcttatactgattttatcagtttcactcaatgaaaaattatgcaagtaaatatggtagttttaatgtctcaaattatttaataaaatctaagatacagaacatttgttagtttgactgcagagcttctgtgaacagatcaacagtatccatatttaatgaaaggaaaaaacttccatgtaaaaaatactacatatatatatatatatatatatatatgcagatttcaagtaaaatctcttagagaagtgtctagagaactctgcaataaactcccctmttgattctccctttttccagataactcttttataaatctgtgtttttagagtagaagaagtctagatgttgaaagtgatcaaaaataaaggaaggtaagaagccatatctaaacttattttcctcagagtttaaaaagaaagagaaagctattaagcaacactctcccaagaatgaacctaggatacataatctaatctacctatagagtaggtattaattcacctttactcgtgatcctgtgatcatccctgaggtcccaaccagcagtgcccaagtgcagcacagcctggtcactgaagtagaaaagaagagattggtaactagaagaacagcacccatggttcatacggcactccttgtttg

SEQ ID NO: 720955 - DNA, 1132 bp, Homo sapiens
ttaccattatccttttagaattttctttccttgaagcaataatcctgatttttaaactgtaaggtgtttgaagcttatttacaaatattttcctggtctaagacactaatactaagtaactgattatactgtcattatttctctacaacttataaaaatgtaaagctctaattactatttaaattgaatagaaagtagaatttaaaattcaactcctattctttttagaccttgagcaataatgttcccccaacacagttttcttaagttgatcttacataaaagatttttcaaatatacattttatatggtataatatctaactgaaaataaaatgaacacagtattatcaaaagtgggaggctggaaagctcatgaaattttaatgagtcaccttgaataagaaaaacatagcagggaatggtgataggtcacagaatactattaattcatattcaaagcactactgtacagaagtatggtatctaataagaaggctgaaggggtgacatggtgggaaggaattcttatttgtatctaggttttatcatatttttacatattatttacctttccaacccaaaggtattttttctctacaataaaataatctttatcatccaatataaaaatatcttctattacttgattgtattttattttataataataaaagttccaaacaacacacttctcaatataatttcaaaatgttttatagttaaaatggcatatgccaaacgatgccaaaagtacagataaaacctgctgaacaaaatccaatgccccataaaatatatttgtcataccaaaatcatgacatttwtaagcatacatgtgactaaaactctattaaataagattgacagacaatgcttgtcttagaagactagatagctatcatgtatagatgagtgcctttcaaacatggatatacttcagaatcacctggaaagcttttaaaatggtaatgatatctgaactccatcacgtagatattttcatttttctgggaaagatcctggatatcagtatactcagaaactggtcaaatgattctagaacagagaaagggatgtgaactactaataaagcaaaaagaaagaaaaaagagatggggagggtggaggca

SEQ ID NO: 720956 - DNA, 2023 bp, Homo sapiens
tcgatagatttttaaaaagagacaggaatgttgtaaatttgccaagagtagatatttataatatctactttaaaagtamtaatttctaattgcagtaaaataaaaaagcattaataaattaaatttaatttgatgcttaaaggttttagcatttgattctacatacaggtaatgcttcctcctcgtaagcttcggcattgtatttttacatatacaaattactcctcaatcatcctctccacatggcaatagcactgagatgattccagctacacgagtggtcatttttggagctcatcacttagaatgtgcaagatccaagcacacgtccttcctgaatttgtgcctgcctttgctattgcgcagaatgaccttctaaactgttttttctgcaaggcctaattataacatgttaatttttcgaatgaatgtaaaatgtttctgaattcttccaggcttatttccacacccccattttccagtgatttcttcatccatgtgttacaggcttaatcatattatactgtattatttgttttatgtatatttaagtaattaggcttagaacccccggattaaactggttcattagctaaaaaatcagcaaaatatttgattcatagtcatttattattttagattattaaacaaatgagaaatgaatagccctgttaagtgaagtatctggatatcatgggtctattgtaacattaattctttatgactacacaattgtctactactgaattccatttagggcagtagacactgcactttccatgatgtacagtctgtattttcaactcttcggctctagaccaccagcactgagggtaagttctattaattctttctcttgaaaataatcaatgttctctgtttgtaatacagatatggtgagattatttctacagagtctttagaaataaaccttctcagctataaaatagcaatttaatataatagagtggagaatataattgaataataaataatgctgctattttttgtcattggaatgatataaaccattaacagataaaaaagaaaggaatacataatgtatcccagcaaagtcatgaaatataaaggacgtttcatttttcacaataagaaaaaatataattttaaaactatcaaacattaacaagcaaaatattagcaaaaaaatacaattactaatatacctgtatttttaagtttattagacttattgaatgttaattaccaatatatttattgaatctgattttggttgttttgtaatatttggctatttaaaaggtaaaatgagaatgtttaatagaggcactagcaaatggaagcattaattcgctcaaaattaataaaatgtgataatgagaacatttaatacttctttagagtaccataaaataaaagatgaaagattattttagctgtgcaataattacagtattattacaattaacaggaattcatgataaaggagagtttcaaaaggattgcccacgatttcacagttggtaaccagtggtgccagaatacaaacctttttaattcagtgcccatatcacagttacattgagcagtggcacactttttcaagaacagacagaatgtgcatatgagttctagggcatttttgaaatatatccattattaaataatagagagatcaaactcatgtcttctgtgtcctaagtcagtttactacatacatgtgaattgatgatgtagaaaacaataatactaaaacgccaaacatcacatcaaccttccagtcaatccaatgctcttggtcctagtactatctagagaattttaaaagaaaaaaaattacttccattgcttcttttattcactcatgtatttagtactttttaagttcacttattcatattttttcatcaaatgctgaatacacctgtgaatatgaacttgatgtgtatttgatatctatatcggtaataagtttataactgtaggtaatgcttatattaattaagacatgaaaaatctctttgaaacttacagaatttta

SEQ ID NO: 720957 - DNA, 2023 bp, Homo sapiens
tcgatagatttttaaaaagagacaggaatgttgtaaatttgccaagagtagatatttataatatctactttaaaagtactaatttctaattgcagtaaaataaaaaagcattaataaattaaatttaatttgatgcttaaaggttttagcatttgattctacatacaggtaatgcttcctcctcgtaagcttcggcattgtatttttacatatacaaattactcctcartcatcctctccacatggcaatagcactgagatgattccagctacacgagtggtcatttttggagctcatcacttagaatgtgcaagatccaagcacacgtccttcctgaatttgtgcctgcctttgctattgcgcagaatgaccttctaaactgttttttctgcaaggcctaattataacatgttaatttttcgaatgaatgtaaaatgtttctgaattcttccaggcttatttccacacccccattttccagtgatttcttcatccatgtgttacaggcttaatcatattatactgtattatttgttttatgtatatttaagtaattaggcttagaacccccggattaaactggttcattagctaaaaaatcagcaaaatatttgattcatagtcatttattattttagattattaaacaaatgagaaatgaatagccctgttaagtgaagtatctggatatcatgggtctattgtaacattaattctttatgactacacaattgtctactactgaattccatttagggcagtagacactgcactttccatgatgtacagtctgtattttcaactcttcggctctagaccaccagcactgagggtaagttctattaattctttctcttgaaaataatcaatgttctctgtttgtaatacagatatggtgagattatttctacagagtctttagaaataaaccttctcagctataaaatagcaatttaatataatagagtggagaatataattgaataataaataatgctgctattttttgtcattggaatgatataaaccattaacagataaaaaagaaaggaatacataatgtatcccagcaaagtcatgaaatataaaggacgtttcatttttcacaataagaaaaaatataattttaaaactatcaaacattaacaagcaaaatattagcaaaaaaatacaattactaatatacctgtatttttaagtttattagacttattgaatgttaattaccaatatatttattgaatctgattttggttgttttgtaatatttggctatttaaaaggtaaaatgagaatgtttaatagaggcactagcaaatggaagcattaattcgctcaaaattaataaaatgtgataatgagaacatttaatacttctttagagtaccataaaataaaagatgaaagattattttagctgtgcaataattacagtattattacaattaacaggaattcatgataaaggagagtttcaaaaggattgcccacgatttcacagttggtaaccagtggtgccagaatacaaacctttttaattcagtgcccatatcacagttacattgagcagtggcacactttttcaagaacagacagaatgtgcatatgagttctagggcatttttgaaatatatccattattaaataatagagagatcaaactcatgtcttctgtgtcctaagtcagtttactacatacatgtgaattgatgatgtagaaaacaataatactaaaacgccaaacatcacatcaaccttccagtcaatccaatgctcttggtcctagtactatctagagaattttaaaagaaaaaaaattacttccattgcttcttttattcactcatgtatttagtactttttaagttcacttattcatattttttcatcaaatgctgaatacacctgtgaatatgaacttgatgtgtatttgatatctatatcggtaataagtttataactgtaggtaatgcttatattaattaagacatgaaaaatctctttgaaacttacagaatttta

SEQ ID NO: 720958 - DNA, 2023 bp, Homo sapiens
tcgatagatttttaaaaagagacaggaatgttgtaaatttgccaagagtagatatttataatatctactttaaaagtactaatttctaattgcagtaaaataaaaaagcattaataaattaaatttaatttgatgcttaaaggttttagcatttgattctacatacaggtaatgcttcctcctcgtaagcttcggcattgtatttttacatatacaaattactcctcaatcatcctctccacatggcaatagcactgagatgattccagctacacgagtggtcatttttggagctcatcacttagaatgtgcaagatccaagcacacgtccttcctgaatttgtgcctgcctttgctattgygcagaatgaccttctaaactgttttttctgcaaggcctaattataacatgttaatttttcgaatgaatgtaaaatgtttctgaattcttccaggcttatttccacacccccattttccagtgatttcttcatccatgtgttacaggcttaatcatattatactgtattatttgttttatgtatatttaagtaattaggcttagaacccccggattaaactggttcattagctaaaaaatcagcaaaatatttgattcatagtcatttattattttagattattaaacaaatgagaaatgaatagccctgttaagtgaagtatctggatatcatgggtctattgtaacattaattctttatgactacacaattgtctactactgaattccatttagggcagtagacactgcactttccatgatgtacagtctgtattttcaactcttcggctctagaccaccagcactgagggtaagttctattaattctttctcttgaaaataatcaatgttctctgtttgtaatacagatatggtgagattatttctacagagtctttagaaataaaccttctcagctataaaatagcaatttaatataatagagtggagaatataattgaataataaataatgctgctattttttgtcattggaatgatataaaccattaacagataaaaaagaaaggaatacataatgtatcccagcaaagtcatgaaatataaaggacgtttcatttttcacaataagaaaaaatataattttaaaactatcaaacattaacaagcaaaatattagcaaaaaaatacaattactaatatacctgtatttttaagtttattagacttattgaatgttaattaccaatatatttattgaatctgattttggttgttttgtaatatttggctatttaaaaggtaaaatgagaatgtttaatagaggcactagcaaatggaagcattaattcgctcaaaattaataaaatgtgataatgagaacatttaatacttctttagagtaccataaaataaaagatgaaagattattttagctgtgcaataattacagtattattacaattaacaggaattcatgataaaggagagtttcaaaaggattgcccacgatttcacagttggtaaccagtggtgccagaatacaaacctttttaattcagtgcccatatcacagttacattgagcagtggcacactttttcaagaacagacagaatgtgcatatgagttctagggcatttttgaaatatatccattattaaataatagagagatcaaactcatgtcttctgtgtcctaagtcagtttactacatacatgtgaattgatgatgtagaaaacaataatactaaaacgccaaacatcacatcaaccttccagtcaatccaatgctcttggtcctagtactatctagagaattttaaaagaaaaaaaattacttccattgcttcttttattcactcatgtatttagtactttttaagttcacttattcatattttttcatcaaatgctgaatacacctgtgaatatgaacttgatgtgtatttgatatctatatcggtaataagtttataactgtaggtaatgcttatattaattaagacatgaaaaatctctttgaaacttacagaatttta

SEQ ID NO: 720959 - DNA, 2023 bp, Homo sapiens
tcgatagatttttaaaaagagacaggaatgttgtaaatttgccaagagtagatatttataatatctactttaaaagtactaatttctaattgcagtaaaataaaaaagcattaataaattaaatttaatttgatgcttaaaggttttagcatttgattctacatacaggtaatgcttcctcctcgtaagcttcggcattgtatttttacatatacaaattactcctcaatcatcctctccacatggcaatagcactgagatgattccagctacacgagtggtcatttttggagctcatcacttagaatgtgcaagatccaagcacacgtccttcctgaatttgtgcctgcctttgctattgcgcagaatgaccttctaaactgttttttctgcaaggcctaattataacatgttaatttttcgaatgaatgtaaaatgtttctgaattcttccaggcttatttccacacccccattttccagtgatttcttcatccatgtgytacaggcttaatcatattatactgtattatttgttttatgtatatttaagtaattaggcttagaacccccggattaaactggttcattagctaaaaaatcagcaaaatatttgattcatagtcatttattattttagattattaaacaaatgagaaatgaatagccctgttaagtgaagtatctggatatcatgggtctattgtaacattaattctttatgactacacaattgtctactactgaattccatttagggcagtagacactgcactttccatgatgtacagtctgtattttcaactcttcggctctagaccaccagcactgagggtaagttctattaattctttctcttgaaaataatcaatgttctctgtttgtaatacagatatggtgagattatttctacagagtctttagaaataaaccttctcagctataaaatagcaatttaatataatagagtggagaatataattgaataataaataatgctgctattttttgtcattggaatgatataaaccattaacagataaaaaagaaaggaatacataatgtatcccagcaaagtcatgaaatataaaggacgtttcatttttcacaataagaaaaaatataattttaaaactatcaaacattaacaagcaaaatattagcaaaaaaatacaattactaatatacctgtatttttaagtttattagacttattgaatgttaattaccaatatatttattgaatctgattttggttgttttgtaatatttggctatttaaaaggtaaaatgagaatgtttaatagaggcactagcaaatggaagcattaattcgctcaaaattaataaaatgtgataatgagaacatttaatacttctttagagtaccataaaataaaagatgaaagattattttagctgtgcaataattacagtattattacaattaacaggaattcatgataaaggagagtttcaaaaggattgcccacgatttcacagttggtaaccagtggtgccagaatacaaacctttttaattcagtgcccatatcacagttacattgagcagtggcacactttttcaagaacagacagaatgtgcatatgagttctagggcatttttgaaatatatccattattaaataatagagagatcaaactcatgtcttctgtgtcctaagtcagtttactacatacatgtgaattgatgatgtagaaaacaataatactaaaacgccaaacatcacatcaaccttccagtcaatccaatgctcttggtcctagtactatctagagaattttaaaagaaaaaaaattacttccattgcttcttttattcactcatgtatttagtactttttaagttcacttattcatattttttcatcaaatgctgaatacacctgtgaatatgaacttgatgtgtatttgatatctatatcggtaataagtttataactgtaggtaatgcttatattaattaagacatgaaaaatctctttgaaacttacagaatttta

SEQ ID NO: 720960 - DNA, 2023 bp, Homo sapiens
tcgatagatttttaaaaagagacaggaatgttgtaaatttgccaagagtagatatttataatatctactttaaaagtactaatttctaattgcagtaaaataaaaaagcattaataaattaaatttaatttgatgcttaaaggttttagcatttgattctacatacaggtaatgcttcctcctcgtaagcttcggcattgtatttttacatatacaaattactcctcaatcatcctctccacatggcaatagcactgagatgattccagctacacgagtggtcatttttggagctcatcacttagaatgtgcaagatccaagcacacgtccttcctgaatttgtgcctgcctttgctattgcgcagaatgaccttctaaactgttttttctgcaaggcctaattataacatgttaatttttcgaatgaatgtaaaatgtttctgaattcttccaggcttatttccacacccccattttccagtgatttcttcatccatgtgttacaggcttaatcatattatactgtattatttgttttatgtatatttaagtaattaggcttagaacccccggattaaactggttcattagctaaaaaatcagcaaaatatttgattcatagtcatttattattttagattattaaacaaatgagaaatgaatagccctgttaagtgaagtatctggatatcatgggtctattgtaacattaattctttatgactacacaattgtctactactgaattccatttagggcagtagacactgcactttccatgatgtacagtctgtattttcaactcttcggctctagaccaccagcactgagggtaagttctattaattctttctcttgaaaataatcaatgttctctgtttgtaatacagatatggtgagattatttctacagagtctttagaaataaaccttctcagctataaaatagcaatttaatataatagagtggagaatataattgaataataaataatgctgctattttttgtcattggaatgatataaaccattaacagataaaaaagaaaggaatacataatgtatcccagcaaagtcatgaaatataaaggacgtttcayttttcacaataagaaaaaatataattttaaaactatcaaacattaacaagcaaaatattagcaaaaaaatacaattactaatatacctgtatttttaagtttattagacttattgaatgttaattaccaatatatttattgaatctgattttggttgttttgtaatatttggctatttaaaaggtaaaatgagaatgtttaatagaggcactagcaaatggaagcattaattcgctcaaaattaataaaatgtgataatgagaacatttaatacttctttagagtaccataaaataaaagatgaaagattattttagctgtgcaataattacagtattattacaattaacaggaattcatgataaaggagagtttcaaaaggattgcccacgatttcacagttggtaaccagtggtgccagaatacaaacctttttaattcagtgcccatatcacagttacattgagcagtggcacactttttcaagaacagacagaatgtgcatatgagttctagggcatttttgaaatatatccattattaaataatagagagatcaaactcatgtcttctgtgtcctaagtcagtttactacatacatgtgaattgatgatgtagaaaacaataatactaaaacgccaaacatcacatcaaccttccagtcaatccaatgctcttggtcctagtactatctagagaattttaaaagaaaaaaaattacttccattgcttcttttattcactcatgtatttagtactttttaagttcacttattcatattttttcatcaaatgctgaatacacctgtgaatatgaacttgatgtgtatttgatatctatatcggtaataagtttataactgtaggtaatgcttatattaattaagacatgaaaaatctctttgaaacttacagaatttta

SEQ ID NO: 720961 - DNA, 2023 bp, Homo sapiens
tcgatagatttttaaaaagagacaggaatgttgtaaatttgccaagagtagatatttataatatctactttaaaagtactaatttctaattgcagtaaaataaaaaagcattaataaattaaatttaatttgatgcttaaaggttttagcatttgattctacatacaggtaatgcttcctcctcgtaagcttcggcattgtatttttacatatacaaattactcctcaatcatcctctccacatggcaatagcactgagatgattccagctacacgagtggtcatttttggagctcatcacttagaatgtgcaagatccaagcacacgtccttcctgaatttgtgcctgcctttgctattgcgcagaatgaccttctaaactgttttttctgcaaggcctaattataacatgttaatttttcgaatgaatgtaaaatgtttctgaattcttccaggcttatttccacacccccattttccagtgatttcttcatccatgtgttacaggcttaatcatattatactgtattatttgttttatgtatatttaagtaattaggcttagaacccccggattaaactggttcattagctaaaaaatcagcaaaatatttgattcatagtcatttattattttagattattaaacaaatgagaaatgaatagccctgttaagtgaagtatctggatatcatgggtctattgtaacattaattctttatgactacacaattgtctactactgaattccatttagggcagtagacactgcactttccatgatgtacagtctgtattttcaactcttcggctctagaccaccagcactgagggtaagttctattaattctttctcttgaaaataatcaatgttctctgtttgtaatacagatatggtgagattatttctacagagtctttagaaataaaccttctcagctataaaatagcaatttaatataatagagtggagaatataattgaataataaataatgctgctattttttgtcattggaatgatataaaccattaacagataaaaaagaaaggaatacataatgtatcccagcaaagtcatgaaatataaaggacgtttcatttttcacaataagaaaaaatataattttaaaactatcaaacattaacaagcaaaatattagcaaaaaaatrcaattactaatatacctgtatttttaagtttattagacttattgaatgttaattaccaatatatttattgaatctgattttggttgttttgtaatatttggctatttaaaaggtaaaatgagaatgtttaatagaggcactagcaaatggaagcattaattcgctcaaaattaataaaatgtgataatgagaacatttaatacttctttagagtaccataaaataaaagatgaaagattattttagctgtgcaataattacagtattattacaattaacaggaattcatgataaaggagagtttcaaaaggattgcccacgatttcacagttggtaaccagtggtgccagaatacaaacctttttaattcagtgcccatatcacagttacattgagcagtggcacactttttcaagaacagacagaatgtgcatatgagttctagggcatttttgaaatatatccattattaaataatagagagatcaaactcatgtcttctgtgtcctaagtcagtttactacatacatgtgaattgatgatgtagaaaacaataatactaaaacgccaaacatcacatcaaccttccagtcaatccaatgctcttggtcctagtactatctagagaattttaaaagaaaaaaaattacttccattgcttcttttattcactcatgtatttagtactttttaagttcacttattcatattttttcatcaaatgctgaatacacctgtgaatatgaacttgatgtgtatttgatatctatatcggtaataagtttataactgtaggtaatgcttatattaattaagacatgaaaaatctctttgaaacttacagaatttta

SEQ ID NO: 720962 - DNA, 2023 bp, Homo sapiens
tcgatagatttttaaaaagagacaggaatgttgtaaatttgccaagagtagatatttataatatctactttaaaagtactaatttctaattgcagtaaaataaaaaagcattaataaattaaatttaatttgatgcttaaaggttttagcatttgattctacatacaggtaatgcttcctcctcgtaagcttcggcattgtatttttacatatacaaattactcctcaatcatcctctccacatggcaatagcactgagatgattccagctacacgagtggtcatttttggagctcatcacttagaatgtgcaagatccaagcacacgtccttcctgaatttgtgcctgcctttgctattgcgcagaatgaccttctaaactgttttttctgcaaggcctaattataacatgttaatttttcgaatgaatgtaaaatgtttctgaattcttccaggcttatttccacacccccattttccagtgatttcttcatccatgtgttacaggcttaatcatattatactgtattatttgttttatgtatatttaagtaattaggcttagaacccccggattaaactggttcattagctaaaaaatcagcaaaatatttgattcatagtcatttattattttagattattaaacaaatgagaaatgaatagccctgttaagtgaagtatctggatatcatgggtctattgtaacattaattctttatgactacacaattgtctactactgaattccatttagggcagtagacactgcactttccatgatgtacagtctgtattttcaactcttcggctctagaccaccagcactgagggtaagttctattaattctttctcttgaaaataatcaatgttctctgtttgtaatacagatatggtgagattatttctacagagtctttagaaataaaccttctcagctataaaatagcaatttaatataatagagtggagaatataattgaataataaataatgctgctattttttgtcattggaatgatataaaccattaacagataaaaaagaaaggaatacataatgtatcccagcaaagtcatgaaatataaaggacgtttcatttttcacaataagaaaaaatataattttaaaactatcaaacattaacaagcaaaatattagcaaaaaaatacaattactaatatacctgtatttttaagtttattagacttattgaatgttaattaccaatatatttattgaatctgattttggttgktttgtaatatttggctatttaaaaggtaaaatgagaatgtttaatagaggcactagcaaatggaagcattaattcgctcaaaattaataaaatgtgataatgagaacatttaatacttctttagagtaccataaaataaaagatgaaagattattttagctgtgcaataattacagtattattacaattaacaggaattcatgataaaggagagtttcaaaaggattgcccacgatttcacagttggtaaccagtggtgccagaatacaaacctttttaattcagtgcccatatcacagttacattgagcagtggcacactttttcaagaacagacagaatgtgcatatgagttctagggcatttttgaaatatatccattattaaataatagagagatcaaactcatgtcttctgtgtcctaagtcagtttactacatacatgtgaattgatgatgtagaaaacaataatactaaaacgccaaacatcacatcaaccttccagtcaatccaatgctcttggtcctagtactatctagagaattttaaaagaaaaaaaattacttccattgcttcttttattcactcatgtatttagtactttttaagttcacttattcatattttttcatcaaatgctgaatacacctgtgaatatgaacttgatgtgtatttgatatctatatcggtaataagtttataactgtaggtaatgcttatattaattaagacatgaaaaatctctttgaaacttacagaatttta

SEQ ID NO: 720963 - DNA, 632 bp, Homo sapiens
ctttctgaacttctatggttcagtggaaaaaagaagcattgcactaggttatttcagacattgttagtctgacataatataggaagtatttttgtgctacacttttatcctggcgtaaaatgtggcataatttttaggttcaagagctgttttactcctattcaaaactttcttccagtgacctaaccaaaatagtatgtattaaaagcatgtataagctactacttttctatgaacaatagccttacaatctgtttgccttgcataaaacacatacatatgtgcacacctatgcaccataagctgtggatcctttgtgtgaagaagacacctgtccaccatggagaagtcccacttcccaggttttacatctccaaccccagagttcaaagccagctattyttcaatgattggaatagtttgctaaaaattaaaagtgaaatacgcaattgcaaataaatatgaaatgttttgctttctttaaatgtgcaccttttaaattttatctcttggatgtattaacacactaatatgagttggcttttcaaagtatttattgtctaaaacatggtttctcaaactttcatgataacaaagttttatgaaaattttttagatttttaaatgaaacg

SEQ ID NO: 720964 - DNA, 1771 bp, Homo sapiens
cggcctcatgatctttcttttactgctcatggaaagagttggattcacccaactgttttttgttccatgaccactcctagagcagaggaggaggaagggtattgaaggatggttccactaagacttaatgcagaagtagacagtgggtcctcaaaggaaatagagttattgtcacagaagagagaagagataccatgtgggcaaaaacaacagacatcttctacaggtggtaatgtagttaataatggaaatgaaaaaatcatttggattcaggagtcctcttcccctcacccttcacttgcagatggtgagttaatagaatgactgggtgctgtttgtatggttacactgcatatttcctataggattcaatggaaagtaaatactcctgagtgacatagagaagaaccatattatagtccccaactccttcagtgtagttaggaaaaacaaaagatacacccatgaaaaggaaaacaatacaaggcagcataagaaatattccaaatgaatattatgggcaataagttttataggattttaaagcagaaggaaaacacttaacaaggccagttttatagagaacataaacttggttaggaccttgaaagatgcatagaattctgaaaaaggtaagggaggatatttgtagggctctatagaaagctcatttaggcgagagaagaaggtgcatgaaagtgacatattaggagataaagtagattattgtcttatagtgaagttttcaatgctagctttgtttaaatgtcccaggtctggccaggtgcggtggctcacgcctgtaatcccagcactttgggaggctgaggcgggtggatcacctgaggtcagaagtttgagaccagcctggccaacatggcgaaacccggtatctactaaaaatataaaaattacctgggcatggtggcacatgcctgtaatcccagcctgtggtcaggaggctgaggcaggagaattgcttgaacctgggaggcagaggttgcagtgagccaagatcacaccattgcactccaatctgggcaacaagagcgaaattctgtctcaaaagtaaataaataaataaataaataaaaatttcccaggtctgaagcatacaagaagttgagcagtctttctttctctcaacacgcatattgaacaccttagcatctgctgtgtatcaagtgttaaaagcacaaaggacataatataaaagagtctctgcccttgtaaagcacattttattctgacaatttcaatgccatgtgcttagtatggtaggttatgatacagatacagatgtaagagagttcagtagggacttccattcccagccaacatggagtaactgggaatagatataccattctgcctgaaacaaccaaaaagctagatataacgtatgatacaacactttgtgagataccggacatcagacaatgaagggtagcaatctcagagatgggaaacaaatgctgtgaaccctatcactgctccggcttactgccttgaaagagtgtgcaggctgtgacagggaagggggaagccaggcagagcccagcagacttctgagttgaggagatggagttgagggtctaggagatcgaggtaactggagttcacaagacagagcacccagagaggagagagctacaaagagggagaactctgaagatatgcasggggagccccctggccctgcgcctaccaggcatccagtagagtgctaatcagggcatgaggaagctcttggaggcctcataaagaacca

SEQ ID NO: 720965 - DNA, 1787 bp, Homo sapiens
atatatgtatatacatgtgtgtacatatatacgtgtatatacgtacrtgtgtgtgtgtatatatatatatatatatatgatggaatactactctgccataaaaaaagaaagaaataatgtcttttgcagcaacttggatgaaaccggaggccattattctaagttaagtaactcaggaatggaaaaccaaatactacatattcacacttataagtgggagctaagctatcagtatgcaaaggcagacagagtggtataatggacatgggagactcagaagtggggaggttgagaggatggtgatggatgaaaaactaccgattagagtacaatgtctactactcaggtgacgggtacattaaaatcccagacctcgtgactatacaagtcattcatgtaaccaaaaaccacttgtactcctaaagctattagaataaaaaaaaaaggatgtaatcattatctcgacgcataaactaaaaaaagaaatttcctaataatcacttttaatatatatttttgtttataaactcaaataaaatatagattacatttgtgaactatgtgtgtgcattcaaagctataacaatgtctcctccccaactgcagagatgaggggtctgaagggcctgaagagcagctaaagcaagggctccttgaaaacagcaacaggccctccctctgccacagggaaatgccagcagtagcagtaggccatggaaccagcatgcaaggagtgggctgcttctattggtctacttttctactccaccaaatgtatctatatttcactgctttgaagatttttttaagccacaaaattgttttcatggatgcaaaaaaaaaaaaaaaaaaaaaaaccattgtaaaaaatcagagctaaaataacttcacatgcatatactttctcatatgcctattcatttaacaatttgaaagaaaaatacatacagctattcttcttgaaccctggaggcggaggttgcaatgagccaagattgcaccaccacaccgcagcctgggtgacagggcaagctccgtctcaaaaaaaaaaaaacaaaaaaacctagctattcctagctattctattattcaggcccaatcccaatgtatagttgcttgctttttaagttcagaattttatgagtatgcttcagttatgcagtgtgaccattataagattttaaatgtatttttataaagcccagatccagaaatatgacatgactttccagagaccactgtggaatcatatcaaaaaccaagcagtttcctcccaaattcagctgaggtctactccacttgcctgcataggtgttggccttgttcagaaggtcggtacatgcatgcatatcagcaaaagcccggattcctaagcagttgacagggtgaagctgggattccaaaaattcacaacaagtcttcttcacatcctgtaactgtaagagaccagctgctgggagaagtacctgcaacacacacatcaatattcttaggcacttgggtggaaaaacactgcctctttgaccacttctacataggacacaagatgttcagccatagtttattatctgcgtccatacccccatattccctagaaaacaaatataaaaattatttttaataacaatgatgactcttcacattccccataatttccatgtaatctttcaaaggcctcttctccttggtcagaagaatatgagatatcagatcttataagattaatggtttgtttcataagcataaacaaaatgttattttgacttctaaaaacacaaattcttggc

SEQ ID NO: 720966 - DNA, 654 bp, Homo sapiens
tcatttatgttctgcatgcttgagatcaactggtggtcagttggtctagaatgctttgtttctccccatagtctctcatcacttagcaagctggcctgagttcttacaaagaaagaaaatatggcgggccttgaaaawtgaaagcagatgagaacagagactagcattccaagactctgcaatactcagaacaaaggtcagactatgcatggaaagttagaagatataataaagaaaagagcctaactgaagcaaagggatatgtatcagtcatctactgccaaaataatgccacataggatactgccaaaacctcagtggcttatgagcacaggtatttattgactgtggtttgactgatcggggcttggcttgactgcatgattctgatccaaacaattatcatctgaaattggctctaggctgtggatgattttagattagctccatatttattcattctgggactaaggttaaaggagcatccagtaccagggtgagctcttctcatgggggagcactatagtttaaaatccaagccaaaccacatatcacatgcaaagtctctgcttgcatcacatctcttaattttcaattggccaagttaatcacatcaacagagcagggatatacactccacctaccctgagaaag

SEQ ID NO: 720967 - DNA, 658 bp, Homo sapiens
tctgtgaaatatttagaaaatgatgtagtgtttatctcgaaaaaaaatcaagtagtttcaaccattaaaaggccagccattctctaatttccacaactataactagaaattataaggaaaataaatgtctaaacttacagatatccatcaaattaaagtagaaattaaaatctcaaytacaaaccatttagaaattaacaaaaatgacattacatatcaaattatagaatgacaacaaaaatgcaaccagaggcagattcatcagagaagaaaactgatagattttcgttaatggattttgttgttgttgttgtatattccaataattttccactgtttgaaattaagctcaagccactgtaatatttcttaatgtcgcattccagagtaagtattaaaataccagagggaataatttgctgggcctagcatctactcttactgtctttactctcacatattttggcctgtttttccctgctctctacttccttgagccgccaactgcttggcactatatttgatctgacacacacctacggcccctttaaatgtaacagtttttgtaaacaccatctctgacttcaatcctcagtctctcacatgctatttcatagttaccccttggtccacacagctaatattacttgtaaaaggc

SEQ ID NO: 720968 - DNA, 658 bp, Homo sapiens
tctgtgaaatatttagaaaatgatgtagtgtttatctcgaaaaaaaatcaagtagtttcaaccattaaaaggccagccattctctaatttccacaactataactagaaattataaggaaaataaatgtctaaacttacagatatccatcaaattaaagtagaaattaaaatctcaattacaaaccatttagaaattaacaaaaatgacattacatatcaaattatagaatgacaacaaaaatgcaaccagaggcagattcatcagagaagaaaactgatagattttcgttaatggattttgttgttgttgttgtatattccaataattttccactgtttgaaattaagctcaagccactgtaatatttcttaatgtcgcattccagagtaagtattaaaataccagagggaataatttgctgggcctagcatctactcttactgtctttactctcacatattttgrcctgtttttccctgctctctacttccttgagccgccaactgcttggcactatatttgatctgacacacacctacggcccctttaaatgtaacagtttttgtaaacaccatctctgacttcaatcctcagtctctcacatgctatttcatagttaccccttggtccacacagctaatattacttgtaaaaggc

SEQ ID NO: 720969 - DNA, 575 bp, Homo sapiens
gtagtgatgaaaacgatgatgattatacattttttgtttaattcttggcttttttttttagtacaagctatatattacaagagtttttcttggaaacctacatttccccatactcagttatatgttgtattcttgcatttgtaaaaggaagtagttggagccacacacagtggctcatgtcctggagtttgagaccagcctgggcaatataataagaccccatttccacacacamaaaaaaagtttaattactagcctgggcaacatggcaaaacctcatctctaccaaaaaatacaaaatgtagccaggcatggtggtgcacatgtgtggtcccagctacttgggaggctgaggcaggaggatcacttgagcccgggaggttgaggtcgcagtgagctgtgatcacatctgggagtagccactgcaattcagcctgggcaacaaagtgagactcccctctctgaatttttaataaaaaggatttggaaacttctaaatacttggaaaatactgtaagttactaattaccaacataatttagctttacagggaaactgtttctaagcagttttta

SEQ ID NO: 720970 - DNA, 690 bp, Homo sapiens
tgcattttctgcracatccaacaccatgccttgtatacagtgatgctcattaaatgcttattaaataggtgagaacttcctggaatgttaaggttgatctttctaccagcatttggaattctacacattaaccacagaaatcaaacatgtcaacaaatacttccctcacttaataaatacataggtttcggccgggcgtggtggctcatgcctgtaatcccagcactttgggaggccgaggcaggcagatcatgaggtcaggagatcaagaccatcctggctaacacagtgaaacaccatctgtactaaaaatacaaaaaattaggcaggcgtggtggcgggcgcctgtagtcccagctacttgggaggctgaggcaggagaatggcgtgaacccaggaggcggagcttgcagtggtgagccgagatcgttccactgcactccagcctgggcaacagagtgagactccatctcaaaaaaataaatacatacgtacatacatacatacataggtttctccccacgctctccctcacagagtaagctccagctgcactagcctttctgctagttcttaagcacgccaaacttattcctgcctgaggtcaaggcaataaaagagtgatcgcagccgggcacagtggctcacacctgtaatcccagcactttgagaggccggagtgggcagatc

SEQ ID NO: 720971 - DNA, 690 bp, Homo sapiens
tgcattttctgcgacatccaacaccatgccttgtatacagtgatgctcattaaatgcttattaaataggtgagaacttcctggaatgttaaggttgatctttctaccagcatttggaattctacacattaaccacagaaatcaaacatgtcaacaaatacttccctcacttaataaatacataggtttcggccgggcgtggtggctcatgcctgtaatcccagcactttgggaggccgaggcaggcagatcatgaggtcaggagatcaagaccatcctggctaacacagtgaaacaccatctgtactaaaaatacaaaaaattaggcaggcgtggtggcgggcgcctgtagtcccagctacttgggaggctgaggcaggagaatggcgtgaacccaggaggcggagcttgcagtggtgagccgagatcgttccactgcactccagcctgggcracagagtgagactccatctcaaaaaaataaatacatacgtacatacatacatacataggtttctccccacgctctccctcacagagtaagctccagctgcactagcctttctgctagttcttaagcacgccaaacttattcctgcctgaggtcaaggcaataaaagagtgatcgcagccgggcacagtggctcacacctgtaatcccagcactttgagaggccggagtgggcagatc

SEQ ID NO: 720972 - DNA, 1809 bp, Homo sapiens
tgaacacaagtaactataagataacctctgaattatttattatggtcagtaattcactaaaaatatagagtctcttgaattaaaaattaggatatataggtttctcaattactgtgagtatgcttcagtattaaacatgtattatattttgtgtaggtatcaacttttaattcagaaaaattcaaggattttatccaatgagctatgatatatgcacaggtatctttcgcctgcaccgaatcattcaaggagaaaagagcaggaacaatttgtacaagttgtgcctgcacaaagatgtccagccaaaggggttagtagcttgtgaaattatgtggtgccacatccacaaagaaggaccacttttttctttttttaatcatttacaaaagatcacgtcttctgagaaagaaacgtgcctatcagcctagaacattcaaaagatttaaatgttgtttyggatttttttccttctaaatttaatgaggcaacataaggcctgcaaacaaattcaatgaaaaatagtattttggctgagttttttgtgtgaacactggagaattgagtatttaaaaactttaaaaatttttttgcaagtcattgttgtgtatgcaaggaattactgctgcacttatcttctatcaggccccttaagtatgccttttactaaataactaaaaataggtggtaaaatgtatgataaaatatatttttaactaaaacacgaagaaaataagaaagcaagaaaaccccagagtctaatatgaataaatgtgttagtgtagagaggcaaacaaaatgtaaacccatgttgaccctggaggtatgcaccagccctggtcgtcctgagattccattttgaccaacaaaatgcaggggtaaaggacagtacctactgcttgggcaatctaaagaaatctcctatgtaaatctgggaccaaatgaactatagaatgacctggatgggaagaacctgtgagtttcaattttgttgcttgatcatagggaaaaaaaatctgaaaatcataatcacatgccagtcctcaagcatttttgaagtctacattgacactttcaatgtgatttaaataacttcaagctgaaattttatagagtttcagtaatctacagtacgtggctgaaacaaatgagactctctctaatggtatgcaccttcaactcagataatatttcaagcaaaatgaattgcaagacaaaattaaaaagaagaattcacagggaagcaagacaagaaagagtgcaatcatagcccatatatttttagtgttaaaataatcagaatccaaatatcacgtgatatcagaatattacatgtttaatatgtttaaatatatttaaagaaataaaaataagtgaaaaataaacaggtattaaaacttagctagaggtctcaaaacagaattaaatagaacttccagaaatatagtattgaaattaaagatgcatatcatgggtagaacattatatttgacaccaaggaataaaataataatggactagtaagtagaattgacaaaattattcagaatgcaagggagataaataaagaaaagggatttttatgagacacataggctacaagatctatgatatacctgggtagatttttaaaaatcactaagcatttcttcaaactggtgataaaccttaatcttcatactcaggaaagccaatgacattgagtcagaaaaattagaagacattcacacttcaaataacattgcaggccaaagattataaaagcacctgagggagcaaagaaaactttctctatggagaaatgatgatttt

SEQ ID NO: 720973 - DNA, 1809 bp, Homo sapiens
tgaacacaagtaactataagataacctctgaattatttattatggtcagtaattcactaaaaatatagagtctcttgaattaaaaattaggatatataggtttctcaattactgtgagtatgcttcagtattaaacatgtattatattttgtgtaggtatcaacttttaattcagaaaaattcaaggattttatccaatgagctatgatatatgcacaggtatctttcgcctgcaccgaatcattcaaggagaaaagagcaggaacaatttgtacaagttgtgcctgcacaaagatgtccagccaaaggggttagtagcttgtgaaattatgtggtgccacatccacaaagaaggaccacttttttctttttttaatcatttacaaaagatcacgtcttctgagaaagaaacgtgcctatcagcctagaacattcaaaagatttaaatgttgtttcggatttttttccttctaaatttaatgaggcaacataaggcctgcaaacaaattcaatgaaaaatagtattttggctgagttttttgtgtgaacactggagaattgagtatttaaaaactttaaaaatttttttgcaagtcattgttgtgtatgcaaggaattactgctgcacttatcttctatcaggccccttaagtatgccttttactaaataactaaaaataggtggtaaaatgtatgataaaatatatttttaactaaaacacgaagaaaataagaaagcaagaaaaccccagagtctaatatgaataaatgtgttagtgtagagaggcaaacaaaatgtaaacccatgttgaccctggaggtatgcaccagccctggtsgtcctgagattccattttgaccaacaaaatgcaggggtaaaggacagtacctactgcttgggcaatctaaagaaatctcctatgtaaatctgggaccaaatgaactatagaatgacctggatgggaagaacctgtgagtttcaattttgttgcttgatcatagggaaaaaaaatctgaaaatcataatcacatgccagtcctcaagcatttttgaagtctacattgacactttcaatgtgatttaaataacttcaagctgaaattttatagagtttcagtaatctacagtacgtggctgaaacaaatgagactctctctaatggtatgcaccttcaactcagataatatttcaagcaaaatgaattgcaagacaaaattaaaaagaagaattcacagggaagcaagacaagaaagagtgcaatcatagcccatatatttttagtgttaaaataatcagaatccaaatatcacgtgatatcagaatattacatgtttaatatgtttaaatatatttaaagaaataaaaataagtgaaaaataaacaggtattaaaacttagctagaggtctcaaaacagaattaaatagaacttccagaaatatagtattgaaattaaagatgcatatcatgggtagaacattatatttgacaccaaggaataaaataataatggactagtaagtagaattgacaaaattattcagaatgcaagggagataaataaagaaaagggatttttatgagacacataggctacaagatctatgatatacctgggtagatttttaaaaatcactaagcatttcttcaaactggtgataaaccttaatcttcatactcaggaaagccaatgacattgagtcagaaaaattagaagacattcacacttcaaataacattgcaggccaaagattataaaagcacctgagggagcaaagaaaactttctctatggagaaatgatgatttt

SEQ ID NO: 720974 - DNA, 1809 bp, Homo sapiens
tgaacacaagtaactataagataacctctgaattatttattatggtcagtaattcactaaaaatatagagtctcttgaattaaaaattaggatatataggtttctcaattactgtgagtatgcttcagtattaaacatgtattatattttgtgtaggtatcaacttttaattcagaaaaattcaaggattttatccaatgagctatgatatatgcacaggtatctttcgcctgcaccgaatcattcaaggagaaaagagcaggaacaatttgtacaagttgtgcctgcacaaagatgtccagccaaaggggttagtagcttgtgaaattatgtggtgccacatccacaaagaaggaccacttttttctttttttaatcatttacaaaagatcacgtcttctgagaaagaaacgtgcctatcagcctagaacattcaaaagatttaaatgttgtttcggatttttttccttctaaatttaatgaggcaacataaggcctgcaaacaaattcaatgaaaaatagtattttggctgagttttttgtgtgaacactggagaattgagtatttaaaaactttaaaaatttttttgcaagtcattgttgtgtatgcaaggaattactgctgcacttatcttctatcaggccccttaagtatgccttttactaaataactaaaaataggtggtaaaatgtatgataaaatatatttttaactaaaacacgaagaaaataagaaagcaagaaaaccccagagtctaatatgaataaatgtgttagtgtagagaggcaaacaaaatgtaaacccatgttgaccctggaggtatgcaccagccctggtcstcctgagattccattttgaccaacaaaatgcaggggtaaaggacagtacctactgcttgggcaatctaaagaaatctcctatgtaaatctgggaccaaatgaactatagaatgacctggatgggaagaacctgtgagtttcaattttgttgcttgatcatagggaaaaaaaatctgaaaatcataatcacatgccagtcctcaagcatttttgaagtctacattgacactttcaatgtgatttaaataacttcaagctgaaattttatagagtttcagtaatctacagtacgtggctgaaacaaatgagactctctctaatggtatgcaccttcaactcagataatatttcaagcaaaatgaattgcaagacaaaattaaaaagaagaattcacagggaagcaagacaagaaagagtgcaatcatagcccatatatttttagtgttaaaataatcagaatccaaatatcacgtgatatcagaatattacatgtttaatatgtttaaatatatttaaagaaataaaaataagtgaaaaataaacaggtattaaaacttagctagaggtctcaaaacagaattaaatagaacttccagaaatatagtattgaaattaaagatgcatatcatgggtagaacattatatttgacaccaaggaataaaataataatggactagtaagtagaattgacaaaattattcagaatgcaagggagataaataaagaaaagggatttttatgagacacataggctacaagatctatgatatacctgggtagatttttaaaaatcactaagcatttcttcaaactggtgataaaccttaatcttcatactcaggaaagccaatgacattgagtcagaaaaattagaagacattcacacttcaaataacattgcaggccaaagattataaaagcacctgagggagcaaagaaaactttctctatggagaaatgatgatttt

SEQ ID NO: 720975 - DNA, 1418 bp, Homo sapiens
  misc_feature 981, 1028, 1029: n = A,T,C or G
tgcctattttctactggacaacaaccatagtttcaggataatatgctaataatgcccctcaatcccccaaaatatgttttgttaaaggagacaggatgatatactttttcttaagaggaaagtgtttaagaaacttatctaaaacaattactgaattgaaatatctcattccatgaattttttttaattagagtgatttttaaattattcttgcaatgactctctcaacagcctttctgatatccacatcccttctatggcttcacctgctcatagctggctgaaatcccttctcataggacttagaacttagtactacscccaccccactcccaccagctaacgggaagatactgatacaactgtaaagcacaaatccagcttccataagtgttttgtttggccaacatagtgttttgatgcttttaaaaaatggaaatcatccccaaaaatctcaatccccgaaaaaaatcaaaccctgtttggaagacgcagtctctggaattccagtgtttggtgaaggcacagaaatgattacggaggaagggtctttcctaccccatgcagaaaacatagcagttactgcatttactctttaatctctttttaaaattaaagataatgaccattttgttgtatatatggcatttatcttagaatagattacggaaagagtcatattacccaactctaaagcaaatatacaatcaaattatgagtattacagtataatggcccacctagccaaagaacaacaacagaaagttctcgtttgtgggttaagtaccctgttaagataaacccactggagacttaaagacaaggtatatttgcttaaattggtttttaaccatggaggtcggtacttagaaaacctgatgaaagcagaaggaagtagtccttaaggataggagctagtttctcatgcctaaattttcgtaactaccactctgaattttgtcactgtgaacctctatttangagtcaccttttccaagaaacctttcctgatgcctcccttcctcttnncacagtaaaagctggcagctgccttccctacctgctacatccttcaccccgctcagcaactgaaacactccctgtgctgctgatccagctcccctactgctagtaaaaattgctcaagggtattgtctctgtttccccaacacttacacagcaccaacaggaacatgggtactcaacctctctcctctacagtgaagcatcagcatggaatgttagttaaaaccaataatggtggagctgcccttggcctcgaatcctagctctgctccacttcttacctatgtgagtttgggcaaattattctgtctcagtttttgcagaagtaaaatggggaataaaaaagcacagactttcatggggttattgtgagatttaaataagttaataca

SEQ ID NO: 720976 - DNA, 1418 bp, Homo sapiens
  misc_feature 981, 1028, 1029: n = A,T,C or G
tgcctattttctactggacaacaaccatagtttcaggataatatgctaataatgcccctcaatcccccaaaatatgttttgttaaaggagacaggatgatatactttttcttaagaggaaagtgtttaagaaacttatctaaaacaattactgaattgaaatatctcattccatgaattttttttaattagagtgatttttaaattattcttgcaatgactctctcaacagcctttctgatatccacatcccttctatggcttcacctgctcatagctggctgaaatcccttctcataggacttagaacttagtactacccccaccccactcccaccagctaacgggaagatactgatacaactgtaaagcacaaatccagcttccataagtgttttgtttggccaacatagtgttttgatgcttttaaaaaatggaaatcatccccaaaaatctcaatccccgaaaaaaatcaaaccctgtttggaagacgcagtctctggaattccagtgtttggtgaaggcacagaaatgattacggaggaagggtctttcctaccccatgcagaaaacatagcagttactgcatttactctttaatctctttttaaaattaaagataatgaccattttgttgtatatatggcatttatcttagaatagattacggaaagagtcatattacccaactctaaagcaaatatacaatcaaattatgagtattacagtataatggcccacctagccaaagaacaacaacagaaagttctcgtttgtgggttaagtaccctgttaagataaacccactggagacttaaagacaaggtatatttgcttaaattggtttttaaccatggaggtcggtacttagaaaacctgatgaaagcagaaggaagtagtccttaaggataggagctagtttctcatgcctaaattttcgtaactaccactctgaattttgtcactgtgaacctctatttangagtcaccttttccaagaaacctttcctgatgcctcccttcctcttnncacagtaaaagctggcagctgccttccctacctgctacatccttcaccccgctcagcaactgaaacactccctgtgctgctgatccagctcccctactgctagtaaaaattgctcaagggtattgtctctgtttccccaacacttacacagcaccaacaggaacatgggtactcaacctctctcctctacagtgaagcatcagcatggaatgttagttaaaaccaatartggtggagctgcccttggcctcgaatcctagctctgctccacttcttacctatgtgagtttgggcaaattattctgtctcagtttttgcagaagtaaaatggggaataaaaaagcacagactttcatggggttattgtgagatttaaataagttaataca

SEQ ID NO: 720977 - DNA, 947 bp, Homo sapiens
cagaagttctctttctgagacacagtgctgtaggcaatttatttgccttctgtgaaccacattttccttatttgtaaaatgttctactgagtttataggatcatgatgaagatcaaatgatatatgtgaaagtgctttgtaagccctaaaacactgtatgcatgggaggtattacaatgattacactaagtggcaaagagagacaaagctctttacaacaaattgtgaactgtacagatctgtaatctccctcttttraaaaaaatatggcttaatctggaccatctgtaacaagatggttgttttgattcattaagggcttctggttctcccaactctggaaacccctcagtgtatgtgattgtatatcaaagctatttgaaagatcagtttcctgattattcatagagtcttagaaatctaggcttggaaaatctgcagaacatacacagcataactgctaggagtatgaatttagagaccaaaggcatctcatttgaaacctgacttcaccccttccttactggctttgggaccctgggcaaattaattaacttttcaaatcctcagttatctatgaaatgggtattaaagtatgtgcctcatgggggttataagggttaaatgatagtctttggcatagtgagtgttctcaatgaaaatacactttcatcttgttcatcccccataaggtattaggtgtcccccagtatccaaccatctttacaacttttgcttgaaaagtggccatcctgacttgtttttcacacttcactaccaatggaaacatcccattttcagacttcttggaaagatctagttagggattatattgtatttccagctatgggatagatttctttacacacctgggtggggggaatcaagaaatagcacccccacaccctctgcagtacattgtctgatcttgtctgcaatcaaattat

SEQ ID NO: 720978 - DNA, 591 bp, Homo sapiens
cttagtaataaaacaattttacacctagagcccccagtttaattttccttctttctatttttatacaaaacccttattttcccatcaggggaaaacagagcttagctacatttgttaaggtggtaggctggggtagatggtaagagyagagtcaagtcagtcaaatggatcttgatttaagtcctggtttccccacttgctagtgtggtgactaaccttggactgtgaacctgtttcttcatctgtagagtgggcattataccacaaaccttgaagaattactgagaggcttaactaacagatagtgcttcaagaacactagtgaaatatgtgcttataatataagaaaagaaagaacagatgatctactccataaatgccattgatgcaagaattttttggcagatttaaagttgaattagaaataatctctgccccacaactgttctttggttttatgactttggcttactctgaaagattaaaaaaagaaataagcacatagaatttatatttatttgccatagggatgatgttaaagatatcatctcctatgtttctcagtgagacctcaatgaaaacccaggaaaa

SEQ ID NO: 720979 - DNA, 591 bp, Homo sapiens
cttagtaataaaacaattttacacctagagcccccagtttaattttccttctttctatttttatacaaaacccttattttcccatcaggggaaaacagagcttagctacatttgttaaggtggtaggctggggtagatggtaagagcagagtcaagtcagtcaaatggatcttgatttaagtcctggtttccccacttgctagtgtggtgactaaccttggactgtgaacctgtttcttcatctgtagagtgggcattataccacaaaccttgaagaattactgagaggcttaactaacagatagtgcttcaagaacactagtkaaatatgtgcttataatataagaaaagaaagaacagatgatctactccataaatgccattgatgcaagaattttttggcagatttaaagttgaattagaaataatctctgccccacaactgttctttggttttatgactttggcttactctgaaagattaaaaaaagaaataagcacatagaatttatatttatttgccatagggatgatgttaaagatatcatctcctatgtttctcagtgagacctcaatgaaaacccaggaaaa

SEQ ID NO: 720980 - DNA, 1346 bp, Homo sapiens
gagaaaagaaaatgtaaattttcttggaatgataattttctttttcatatattgattactgaaagatttatttttaggatacaggtaataatccttatcattttgtgaaaacaatccttacaaataagataaaataataactgatgcctacatgactaaatcagtactgatatggattggctaactgatggaagctttcagagagaagtcagaaactaactaaactgacataacaacaacagcaaccgcaacttctcacctctaggactattatcatttatatccaccgaagtatataatggaatgtaaagcattcagatgaagctatactattcagtaacatgtatctaaatttcatctccagtattattaaaaacaaaaggatgtataaaaaaatagaatgcatactgaagagcatgatttaaaataggagtaaacagccatgaaaaagaatgaaatgatgcatttcctagcaacatggatggaattagaggtttttagcgtaagagaaataactcagaaacagtcaaataccacatgttctcacttataaatgggagctaaatactatgtacacatagatacagagagtgggataatagacattggatactcagaagatagagggtggtgaggaatgagagattacttaatgggtactatatattatttgcgcaatgaacacactaaaagctcagatttcaccgctatacaatatcttcacgtaaaaaaactgcgcttgtatccccgactctacaacactacaaaataaaataaaaaccccaccaaataggagtagagaaaagagatcataaagaatagtaaaaactagaatagtgtccgtgaggaaaagaagactagaaaatgcctcctccgctttataaaaggattgctatgaaaaatgtgcagatcaattgtcctgtgtatcttctagaaacaaaaggcttttaagcctgtagcctcattgacataaaaagtaattataatgacaaccaggctaccaagagagatatttgmatcgtcaacttaaaaatgtcaacatacgatgcaagctgcattcagctcaagactccatattaaaggaaaagatacttttctttatcctaaatacttgaggtttccagttctggaaaaattttttttctctctgtagtgaagctcttagagaagtaggcaagaactaccaccttggagttgtgaccacaactcagaaacaccagcaatctaccaggatttgggaaaactgtggcaaccagtttaaacatcactagtgtgactcacctactactttcagttgtcattatcagtatctacctaaacatcttgatattcctttcagttctaaa

SEQ ID NO: 720981 - DNA, 1346 bp, Homo sapiens
gagaaaagaaaatgtaaattttcttggaatgataattttctttttcatatattgattactgaaagatttatttttaggatacaggtaataatccttatcattttgtgaaaacaatccttacaaataagataaaataataactgatgcctacatgactaaatcagtactgatatggattggctaactgatggaagctttcagagagaagtcagaaactaactaaactgacataacaacaacagcaaccgcaacttctcacctctaggactattatcatttatatccaccgaagtatataatggaatgtaaagcattcagatgaagctatactattcagtaacatgtatctaaatttcatctccagtattattaaaaacaaaaggatgtataaaaaaatagaatgcatactgaagagcatgatttaaaataggagtaaacagccatgaaaaagaatgaaatgatgcatttcctagcaacatggatggaattagaggtttttagcgtaagagaaataactcagaaacagtcaaataccacatgttctcacttataaatgggagctaaatactatgtacacatagatacagagagtgggataatagacattggatactcagaagatagagggtggtgaggaatgagagattacttaatgggtactatatattatttgcgcaatgaacacactaaaagctcagatttcaccgctatacaatatcttcacgtaaaaaaactgcgcttgtatccccgactctacaacactacaaaataaaataaaaaccccaccaaataggagtagagaaaagagatcataaagaatagtaaaaactagaatagtgtccgtgaggaaaagaagactagaaaatgcctcctccgctttataaaaggattgctatgaaaaatgtgcagatcaattgtcctgtgtatcttctagaaacaaaaggcttttaagcctgtagcctcattgacataaaaagtaattataatgacaaccaggctaccaagagagatatttgcatcgtcawcttaaaaatgtcaacatacgatgcaagctgcattcagctcaagactccatattaaaggaaaagatacttttctttatcctaaatacttgaggtttccagttctggaaaaattttttttctctctgtagtgaagctcttagagaagtaggcaagaactaccaccttggagttgtgaccacaactcagaaacaccagcaatctaccaggatttgggaaaactgtggcaaccagtttaaacatcactagtgtgactcacctactactttcagttgtcattatcagtatctacctaaacatcttgatattcctttcagttctaaa

SEQ ID NO: 720982 - DNA, 1346 bp, Homo sapiens
gagaaaagaaaatgtaaattttcttggaatgataattttctttttcatatattgattactgaaagatttatttttaggatacaggtaataatccttatcattttgtgaaaacaatccttacaaataagataaaataataactgatgcctacatgactaaatcagtactgatatggattggctaactgatggaagctttcagagagaagtcagaaactaactaaactgacataacaacaacagcaaccgcaacttctcacctctaggactattatcatttatatccaccgaagtatataatggaatgtaaagcattcagatgaagctatactattcagtaacatgtatctaaatttcatctccagtattattaaaaacaaaaggatgtataaaaaaatagaatgcatactgaagagcatgatttaaaataggagtaaacagccatgaaaaagaatgaaatgatgcatttcctagcaacatggatggaattagaggtttttagcgtaagagaaataactcagaaacagtcaaataccacatgttctcacttataaatgggagctaaatactatgtacacatagatacagagagtgggataatagacattggatactcagaagatagagggtggtgaggaatgagagattacttaatgggtactatatattatttgcgcaatgaacacactaaaagctcagatttcaccgctatacaatatcttcacgtaaaaaaactgcgcttgtatccccgactctacaacactacaaaataaaataaaaaccccaccaaataggagtagagaaaagagatcataaagaatagtaaaaactagaatagtgtccgtgaggaaaagaagactagaaaatgcctcctccgctttataaaaggattgctatgaaaaatgtgcagatcaattgtcctgtgtatcttctagaaacaaaaggcttttaagcctgtagcctcattgacataaaaagtaattataatgacaaccaggctaccaagagagatatttgcatcgtcaacttaaaaatgtcaacatacgatgcaagctgcattcagctcaagactccatattaaaggaaaagatacttttctttatyctaaatacttgaggtttccagttctggaaaaattttttttctctctgtagtgaagctcttagagaagtaggcaagaactaccaccttggagttgtgaccacaactcagaaacaccagcaatctaccaggatttgggaaaactgtggcaaccagtttaaacatcactagtgtgactcacctactactttcagttgtcattatcagtatctacctaaacatcttgatattcctttcagttctaaa

SEQ ID NO: 720983 - DNA, 2227 bp, Homo sapiens
tacctttttcaattattcaatctgaaaaccaagaacagtatcttatatataatgtacacataataaacatgtctatgattgaattctatatattgaatcactacataataactgattctttgcacagtgatttgcatacacaataaggatataatgattatatttacctgcctagactttacagtaccaaacttgaggtatagatggcagtgctgggcacacactggttaaatgtgttgatgagaaccctagctcaagaaagccattgttccctttatctttctgcctggtcaaacaacttttgcaaaatctggccctgagctctccctggctttcatttagaggtaaaatcaaacactttgttcaagattttctaggataattttcatttttaaggtgaagatattgagacacattcgttctttcaagacaaagttattgacagacattcccagtgagaccaagccgactagcagggttgtacccatacaaatcctccttcctttatcctcctctccttaagcccactttcatccacagaccacagatacaaggactaagacgagggaaggaaagggctgataaatcacagaacaaatggtatacaatgaatggaaataaaatgctgatttcctaatgagaaacatatggttatgactacgtaataaacatcagaaaatgctctttcatggctcccaatagtcataaagtttctggaataaagaggaaggaaagatgcaatttaatcctataacctaaatgtctgaggatctacctttctcaatggggctgtcttgttaatgaactagaccaggtttctttgtgtagctttcacctgattctacgtaaggctttctgccaattgctaaacataggccgctgaaagatgaataaggagggaatcatcagctgttccaccaggtcagaagcatgatctttaactaaagggccagatggcttttataaattaagcacaaaaatctctcatttatgcctttttaaagtaaagaggttaggagttatgtcttatacttctttttaatttttaactctattatatcccttgcaccaatgattgagagttattcagttataataaattatatacttatctttagttaggctatcagactctgtttatacagtagtgacaggtgttaaggtccagagaaaaaatttagggttctggagcctagggtttgcctacacattgggctccttcttcattggttcacatatgctcctgtctacggcttattatttggtatgactctaaaactcattccttgtactcacataccatgtttactttacagaaaaaaatgttaggacttaatacacatgggccctatgaagatgaaaaagctgcttttaaatgtttgttgttgtttctatgaaaactaccacgctgttatgttctagttcacatataaagagttcattctgtttaaataagtggaacaactcacatttatattccacactcaggacccatatgcttggccttgtgctggtaactaggaatataagataacaagacaattcccttgctttcaaggaaatcacactttataaaactttgaattcttgaaatgggtttcagaggttccaaggtcaaattcaagaataagagtttaagaagaaaaagactatgagaaaggaagtgttgaccccatttgcatttaaatagcaggaatagtctcaatctactcattggggaaaaatgtatgttgcatatttttgagatattgcaacttgctctctctctttgccaccccaccctttgtcatgctctgtttttgtgttgaattggcaagaaaaatggctggagggctggaagaagttggacccttcttccttcttccttcttccttctttcttcttcttyttcttcttcttcttcttcttcttcttcttcttcttcttcttcttcttcttcttcttcctcctcttcctcttcttcctcttcctcttcctcttcctcttcttcttctttcttcgggggcattgggagcttaggaggtttgggtggtaaagaaagggttaaatcctggggatgtgggtaaagggtgcactggagctgccttggggaaaaatgtggtctcccactttccatggacactttgttcatagaaaggacaactgctaggaatgaacaaaaatgaacaattagattcattgtacaccttctagtacatttgaggctctgtgatcccagatgcttaca

SEQ ID NO: 720984 - DNA, 2227 bp, Homo sapiens
tacctttttcaattattcaatctgaaaaccaagaacagtatcttatatataatgtacacataataaacatgtctatgattgaattctatatattgaatcactacataataactgattctttgcacagtgatttgcatacacaataaggatataatgattatatttacctgcctagactttacagtaccaaacttgaggtatagatggcagtgctgggcacacactggttaaatgtgttgatgagaaccctagctcaagaaagccattgttccctttatctttctgcctggtcaaacaacttttgcaaaatctggccctgagctctccctggctttcatttagaggtaaaatcaaacactttgttcaagattttctaggataattttcatttttaaggtgaagatattgagacacattcgttctttcaagacaaagttattgacagacattcccagtgagaccaagccgactagcagggttgtacccatacaaatcctccttcctttatcctcctctccttaagcccactttcatccacagaccacagatacaaggactaagacgagggaaggaaagggctgataaatcacagaacaaatggtatacaatgaatggaaataaaatgctgatttcctaatgagaaacatatggttatgactacgtaataaacatcagaaaatgctctttcatggctcccaatagtcataaagtttctggaataaagaggaaggaaagatgcaatttaatcctataacctaaatgtctgaggatctacctttctcaatggggctgtcttgttaatgaactagaccaggtttctttgtgtagctttcacctgattctacgtaaggctttctgccaattgctaaacataggccgctgaaagatgaataaggagggaatcatcagctgttccaccaggtcagaagcatgatctttaactaaagggccagatggcttttataaattaagcacaaaaatctctcatttatgcctttttaaagtaaagaggttaggagttatgtcttatacttctttttaatttttaactctattatatcccttgcaccaatgattgagagttattcagttataataaattatatacttatctttagttaggctatcagactctgtttatacagtagtgacaggtgttaaggtccagagaaaaaatttagggttctggagcctagggtttgcctacacattgggctccttcttcattggttcacatatgctcctgtctacggcttattatttggtatgactctaaaactcattccttgtactcacataccatgtttactttacagaaaaaaatgttaggacttaatacacatgggccctatgaagatgaaaaagctgcttttaaatgtttgttgttgtttctatgaaaactaccacgctgttatgttctagttcacatataaagagttcattctgtttaaataagtggaacaactcacatttatattccacactcaggacccatatgcttggccttgtgctggtaactaggaatataagataacaagacaattcccttgctttcaaggaaatcacactttataaaactttgaattcttgaaatgggtttcagaggttccaaggtcaaattcaagaataagagtttaagaagaaaaagactatgagaaaggaagtgttgaccccatttgcatttaaatagcaggaatagtctcaatctactcattggggaaaaatgtatgttgcatatttttgagatattgcaacttgctctctctctttgccaccccaccctttgtcatgctctgtttttgtgttgaattggcaagaaaaatggctggagggctggaagaagttggacccttcttccttcttccttcttccttctttcttcttcttcytcttcttcttcttcttcttcttcttcttcttcttcttcttcttcttcttcttcttcctcctcttcctcttcttcctcttcctcttcctcttcctcttcttcttctttcttcgggggcattgggagcttaggaggtttgggtggtaaagaaagggttaaatcctggggatgtgggtaaagggtgcactggagctgccttggggaaaaatgtggtctcccactttccatggacactttgttcatagaaaggacaactgctaggaatgaacaaaaatgaacaattagattcattgtacaccttctagtacatttgaggctctgtgatcccagatgcttaca

SEQ ID NO: 720985 - DNA, 2227 bp, Homo sapiens
tacctttttcaattattcaatctgaaaaccaagaacagtatcttatatataatgtacacataataaacatgtctatgattgaattctatatattgaatcactacataataactgattctttgcacagtgatttgcatacacaataaggatataatgattatatttacctgcctagactttacagtaccaaacttgaggtatagatggcagtgctgggcacacactggttaaatgtgttgatgagaaccctagctcaagaaagccattgttccctttatctttctgcctggtcaaacaacttttgcaaaatctggccctgagctctccctggctttcatttagaggtaaaatcaaacactttgttcaagattttctaggataattttcatttttaaggtgaagatattgagacacattcgttctttcaagacaaagttattgacagacattcccagtgagaccaagccgactagcagggttgtacccatacaaatcctccttcctttatcctcctctccttaagcccactttcatccacagaccacagatacaaggactaagacgagggaaggaaagggctgataaatcacagaacaaatggtatacaatgaatggaaataaaatgctgatttcctaatgagaaacatatggttatgactacgtaataaacatcagaaaatgctctttcatggctcccaatagtcataaagtttctggaataaagaggaaggaaagatgcaatttaatcctataacctaaatgtctgaggatctacctttctcaatggggctgtcttgttaatgaactagaccaggtttctttgtgtagctttcacctgattctacgtaaggctttctgccaattgctaaacataggccgctgaaagatgaataaggagggaatcatcagctgttccaccaggtcagaagcatgatctttaactaaagggccagatggcttttataaattaagcacaaaaatctctcatttatgcctttttaaagtaaagaggttaggagttatgtcttatacttctttttaatttttaactctattatatcccttgcaccaatgattgagagttattcagttataataaattatatacttatctttagttaggctatcagactctgtttatacagtagtgacaggtgttaaggtccagagaaaaaatttagggttctggagcctagggtttgcctacacattgggctccttcttcattggttcacatatgctcctgtctacggcttattatttggtatgactctaaaactcattccttgtactcacataccatgtttactttacagaaaaaaatgttaggacttaatacacatgggccctatgaagatgaaaaagctgcttttaaatgtttgttgttgtttctatgaaaactaccacgctgttatgttctagttcacatataaagagttcattctgtttaaataagtggaacaactcacatttatattccacactcaggacccatatgcttggccttgtgctggtaactaggaatataagataacaagacaattcccttgctttcaaggaaatcacactttataaaactttgaattcttgaaatgggtttcagaggttccaaggtcaaattcaagaataagagtttaagaagaaaaagactatgagaaaggaagtgttgaccccatttgcatttaaatagcaggaatagtctcaatctactcattggggaaaaatgtatgttgcatatttttgagatattgcaacttgctctctctctttgccaccccaccctttgtcatgctctgtttttgtgttgaattggcaagaaaaatggctggagggctggaagaagttggacccttcttccttcttccttcttccttctttcttcttcttcttyttcttcttcttcttcttcttcttcttcttcttcttcttcttcttcttcttcttcctcctcttcctcttcttcctcttcctcttcctcttcctcttcttcttctttcttcgggggcattgggagcttaggaggtttgggtggtaaagaaagggttaaatcctggggatgtgggtaaagggtgcactggagctgccttggggaaaaatgtggtctcccactttccatggacactttgttcatagaaaggacaactgctaggaatgaacaaaaatgaacaattagattcattgtacaccttctagtacatttgaggctctgtgatcccagatgcttaca

SEQ ID NO: 720986 - DNA, 2227 bp, Homo sapiens
tacctttttcaattattcaatctgaaaaccaagaacagtatcttatatataatgtacacataataaacatgtctatgattgaattctatatattgaatcactacataataactgattctttgcacagtgatttgcatacacaataaggatataatgattatatttacctgcctagactttacagtaccaaacttgaggtatagatggcagtgctgggcacacactggttaaatgtgttgatgagaaccctagctcaagaaagccattgttccctttatctttctgcctggtcaaacaacttttgcaaaatctggccctgagctctccctggctttcatttagaggtaaaatcaaacactttgttcaagattttctaggataattttcatttttaaggtgaagatattgagacacattcgttctttcaagacaaagttattgacagacattcccagtgagaccaagccgactagcagggttgtacccatacaaatcctccttcctttatcctcctctccttaagcccactttcatccacagaccacagatacaaggactaagacgagggaaggaaagggctgataaatcacagaacaaatggtatacaatgaatggaaataaaatgctgatttcctaatgagaaacatatggttatgactacgtaataaacatcagaaaatgctctttcatggctcccaatagtcataaagtttctggaataaagaggaaggaaagatgcaatttaatcctataacctaaatgtctgaggatctacctttctcaatggggctgtcttgttaatgaactagaccaggtttctttgtgtagctttcacctgattctacgtaaggctttctgccaattgctaaacataggccgctgaaagatgaataaggagggaatcatcagctgttccaccaggtcagaagcatgatctttaactaaagggccagatggcttttataaattaagcacaaaaatctctcatttatgcctttttaaagtaaagaggttaggagttatgtcttatacttctttttaatttttaactctattatatcccttgcaccaatgattgagagttattcagttataataaattatatacttatctttagttaggctatcagactctgtttatacagtagtgacaggtgttaaggtccagagaaaaaatttagggttctggagcctagggtttgcctacacattgggctccttcttcattggttcacatatgctcctgtctacggcttattatttggtatgactctaaaactcattccttgtactcacataccatgtttactttacagaaaaaaatgttaggacttaatacacatgggccctatgaagatgaaaaagctgcttttaaatgtttgttgttgtttctatgaaaactaccacgctgttatgttctagttcacatataaagagttcattctgtttaaataagtggaacaactcacatttatattccacactcaggacccatatgcttggccttgtgctggtaactaggaatataagataacaagacaattcccttgctttcaaggaaatcacactttataaaactttgaattcttgaaatgggtttcagaggttccaaggtcaaattcaagaataagagtttaagaagaaaaagactatgagaaaggaagtgttgaccccatttgcatttaaatagcaggaatagtctcaatctactcattggggaaaaatgtatgttgcatatttttgagatattgcaacttgctctctctctttgccaccccaccctttgtcatgctctgtttttgtgttgaattggcaagaaaaatggctggagggctggaagaagttggacccttcttccttcttccttcttccttctttcttcttcttcttcytcttcttcttcttcttcttcttcttcttcttcttcttcttcttcttcttcttcctcctcttcctcttcttcctcttcctcttcctcttcctcttcttcttctttcttcgggggcattgggagcttaggaggtttgggtggtaaagaaagggttaaatcctggggatgtgggtaaagggtgcactggagctgccttggggaaaaatgtggtctcccactttccatggacactttgttcatagaaaggacaactgctaggaatgaacaaaaatgaacaattagattcattgtacaccttctagtacatttgaggctctgtgatcccagatgcttaca

SEQ ID NO: 720987 - DNA, 620 bp, Homo sapiens
ttaactaagtcttctcctcatcactgaaaaaccccaagcccatctatctatctttgcctataattgcccatgtttagagcaaaccctcagcaacctgtttactatattcatgagctcaaaggactgaccacttttaggtcagactaattttgtgttttaaaatgagactgtcctgctgggatatcaaaaaatgttagtgaagggaagaaggatagcagaaagatggcagaaataggaagccccaaccttcgttcttccacggacttaacagcaatatataaaccaaaatgcctccatgaagactctagaagccagttaagaagtctcagtacccaaatgagcacaaggccaagaacagctacattaagatgtataagaaaaagtcattttattctacctatgattgcccctcctccaaactggcacagtttggcatgattgagaaaaagtacccaattttcagcccctccaggtggaaacagaatagtrgaacatgcattcagtgttttggttttatggggagctgagtgagggagtaatttctgtcttctctgactcagggtgctgatggaaatgccatactttggatgcctgagtgctgctgaaaacctttgatatgg

SEQ ID NO: 720988 - DNA, 1252 bp, Homo sapiens
tgttttcctcctcacttccaaaatggttttacccaaggtaatggcagttttgaagcatgaataagacagaccaagtaaagtgcttagtactagatcgagacattacacagtactcaagaaatggtagctacttttattaccagcaggccgttagtttcacagaggaagaacagtttctacaggtggtgatctagtctccggttccacctttcactcttttctgtggccttgggcaaatcatttaatctgtctttgaagctatttcccacattcataaactacgtgggcaagtgaaaataattcaacccttttttcccaaatagaaaaatacttaagattttagcactgatccatcagagaagccacactggaaaacctaygcagaaactaaaacttggtaccattcactatcctcaagtttatagaattaaaaagtaacagacgtaataggtataaatactcagaaaacatgaacatgtctcatgtcaaataagaacagaaagttggtgtgtaaaaaatgtggattagctgtcaatatataaaacacagaatactgtttttaaaaagaattgtttatttaccgaacctggggcatattagatacaaccaattttaaatttacatcttttaaatcagttttgaagtgtttcacacacacaaaaaacttggcatgcaacagttgtcctaaggtgaaagtcacctcattaataaactgttgcaagtgttctcacccaaggtggaagtatggtttatcctgaacatgaaaacctgtaacaaatttaaattaattatataaaactcgttacttgtagttttgcccttgcaaagatccaaaaaaaaaaaaaaaagcacaagtaactaatatgtatcagtcacaacataatcctggatcatccccataccaaaaccggatgctcttttaattttaaacccatcatcagagaacaagagaaagtaatttcattttacacaaaacaagattcacatgtgccaaaaaagaaagacccaaaagaaacaaaaaccaaaaccctaatgctgacactgatggtcagtaccctgaacagtggcccaaaggccactgatcaaaaataaaatagtggctgtatatcaatgaaatgaaatccaagaagctttaaccctttggcatcagaaatccagatttttccaattatgtaaatgcttatttcttacatgccaagagtgggagaagtgaatgtgccaatgtggaaagaaaaaaagccaccactcactg

SEQ ID NO: 720989 - DNA, 1252 bp, Homo sapiens
tgttttcctcctcacttccaaaatggttttacccaaggtaatggcagttttgaagcatgaataagacagaccaagtaaagtgcttagtactagatcgagacattacacagtactcaagaaatggtagctacttttattaccagcaggccgttagtttcacagaggaagaacagtttctacaggtggtgatctagtctccggttccacctttcactcttttctgtggccttgggcaaatcatttaatctgtctttgaagctatttcccacattcataaactacgtgggcaagtgaaaataattcaacccttttttcccaaatagaaaaatacttaagattttagcactgatccatcagagaagccacactggaaaacctacgcagaaactaaaacttggtaccattcactatcctcaagtttatagaattaaaaagtaacagacgtaataggtataaatactcagaaaacatgaacatgtctcatgtcaaataagaacagaaagttggtgtgtaaaaaatgtggattagctgtcaatatataaaacacagaatactgtttttaaaaagaattgtttatttaccgaacctggggcatattagatacaaccaattttaaatttacatcttttaaatcagttttgaagtgtttcacacacacaaaaaacttggcatgcaacagttgtcctaaggtgaaagtcacctcattaataaactgttgcaagtgttctcacccaaggtggaagtatggtttatcctgaacatgaaaacctgtaacaaatttaaattaattatataaaactcgttacttgtagttttgcccttgcaaagatccaaaaaaaaaaaaaaaagcacaagtaactaatatgtatcagtcacaacataatcctggatcatccccataccaaaaccggatgctcttttaattttaaacccatcatcagagaacaagagaaagtaatttcattttacacaaaacaagattcacatgtgccaaaaaagaaakacccaaaagaaacaaaaaccaaaaccctaatgctgacactgatggtcagtaccctgaacagtggcccaaaggccactgatcaaaaataaaatagtggctgtatatcaatgaaatgaaatccaagaagctttaaccctttggcatcagaaatccagatttttccaattatgtaaatgcttatttcttacatgccaagagtgggagaagtgaatgtgccaatgtggaaagaaaaaaagccaccactcactg

SEQ ID NO: 720990 - DNA, 732 bp, Homo sapiens
ttattctaagtgtgctgggaagagattggaggctcttatcacaggcaaacgcttaccagtgagcagcccgggatggcatcccagacctgaatggcactggagcccctgaactgtcacttatccaataagcacttgtttagaaccttcatgcagggcctctgctggtgctgggaaaaggacaaatgggccgcaagattcgggccaggcggggctgtrggcggcatctgctctgctcagccctgcagcttcctgcccgctaaagcaggggtgcctcctgcagctcaccccaaggaaagctcagagtcaatacttctgagaaactccttagctccccacatgagcctcttcctcatgtttgatggaacggggacggacctggggtgggtgcccaacttcagaatgtgtggtgacctctctgcagaatcaagtatggcactaaaggccaggcacagtggctcacgcctgtaatcccagcactttgggaggccgaggcaggtggatcacgaggtcaggagatcgagaccatcctggcgaacatggtgaaaccccgtctctactaaaaatacaaaaaaattagccgggcgtggtggcgcgtgcctgtagtcccagctactcgggaggctgaggcaggagaatggcgtgaacctgggaggcggacgttgcagcaagccgagatcgcgccactgcactccagcctgggcgacacagggagactccgtctcaaaaaaaaaa

SEQ ID NO: 720991 - DNA, 1774 bp, Homo sapiens
ttgtctctacagaaacaattaaaaattagcctgatgtggtggcatgtacctgtggtcaaagctactcgggaggctgaggtaggaggatgacttgagcccgggaggtggaggctgcagtgagccgtgatcgtgccactgcactccagcctgggttacggagcgagaccccctctaaaaaggaaaaagaaaatagctttatgaattgaatcttttcaaaacacatggctttaaatcagcatcccaccagagctgagcacaagtgtgactctcttcaggttgaaaagcctctttatccatttaatcctctctggccctccttcccctccagcgtggatgcaactagagagacaaatcgcctaggaagactgatcaatcacagcaaatgtgggaactgccaaaccaaactgcacgacatcgacggcgtacctcacctcatcctcatcgcctcccgagacatcgcggctggggaggagctcctgtatgactatggggaccgcagcaaggcttccattgaagcccacccgtggctgaagcattaaccggtgggccccgtgccctccccgccccactttcccttcttcaaaggacaaagtgccctcaaagggaattgaattttttttttacacacttaatcttagcggattacttcagatgtttttaaaaagtatattaagatgccttttcactgtagtatttaaatatctgttacaggtttccaaggtggacttgaacagatggccttatattaccaaaacttttatattctagttgtttttgtactttttttgcatacaagccgaacgtttgtgcttcccgtgcatgcagtcaaagactcagcacaggttttagaggaaatagtcaaacatgaactaggaagccaggtgagtctcctttctccagtggaagagccgggaccttccccctgcacccccgacatccagggacggggtgtgaggaagacgctgcctcccaatggcctggacgggatgtttccaagctcttgttcccctaacgtctcaacaggcgctcactgaagtgtatgaatattttttaaaaaggtttttgcagtaagctagtcttcccctctgctttctcgaaagcttactgagcccygggccccaagcacgggccgggcatagatttcctcttccacaagctgccgcttttctgggcaccttgaagcatcagggcgtgaaatcaaactagatgtgggcagggagagggttgcttacctgccctgctggggcagggtttcctgaaactgggttaattctttatagaaatgtgaacactgaatttattttaaaaaataataataaaaatttaaaaaaattaaaaataaaaaaaaccacagaaaacaactttacatgtatataggtcttgaagtgagtgaagtggctgcttttttttttttttttttttgcttttttttgctttttgtagaagagattgagaatggtactctaatcaaaaataaagttttgtagtgggaccagaaattacttacctgacatccacccccattccccctcatcctgctggggttgaaagttccagacctgctgtcgaggccttgtgtttgtcagacacccagtgtcctcctgcaaggacgcaactgtgagctgaggtgtgagcctaggagcccaggacccctgaccccggccgctgctgccagcctcagaaaggcacccaggtgtgcaggggagcacacagggcccggcagcccccaggaatcaaggatagggctaaggttttcaccttaactgtgaaggca

SEQ ID NO: 720992 - DNA, 1774 bp, Homo sapiens
ttgtctctacagaaacaattaaaaattagcctgatgtggtggcatgtacctgtggtcaaagctactcgggaggctgaggtaggaggatgacttgagcccgggaggtggaggctgcagtgagccgtgatcgtgccactgcactccagcctgggttacggagcgagaccccctctaaaaaggaaaaagaaaatagctttatgaattgaatcttttcaaaacacatggctttaaatcagcatcccaccagagctgagcacaagtgtgactctcttcaggttgaaaagcctctttatccatttaatcctctctggccctccttcccctccagcgtggatgcaactagagagacaaatcgcctaggaagactgatcaatcacagcaaatgtgggaactgccaaaccaaactgcacgacatcgacggcgtacctcacctcatcctcatcgcctcccgagacatcgcggctggggaggagctcctgtatgactatggggaccgcagcaaggcttccattgaagcccacccgtggctgaagcattaaccggtgggccccgtgccctccccgccccactttcccttcttcaaaggacaaagtgccctcaaagggaattgaattttttttttacacacttaatcttagcggattacttcagatgtttttaaaaagtatattaagatgccttttcactgtagtatttaaatatctgttacaggtttccaaggtggacttgaacagatggccttatattaccaaaacttttatattctagttgtttttgtactttttttgcatacaagccgaacgtttgtgcttcccgtgcatgcagtcaaagactcagcacaggttttagaggaaatagtcaaacatgaactaggaagccaggtgagtctcctttctccagtggaagagccgggaccttccccctgcacccccgacatccagggacggggtgtgaggaagacgctgcctcccaatggcctggacgggatgtttccaagctcttgttcccctaacgtctcaacaggcgctcactgaagtgtatgaatattttttaaaaaggtttttgcagtaagctagtcttcccctctgctttctcgaaagcttactgagccccgggccccaagcacgggccgggcatagatttcctcttccacaagctgccgcttttctgggcaccttgaagcatcagggcgtgaaatcaaactagatgtgggcagggagagkgttgcttacctgccctgctggggcagggtttcctgaaactgggttaattctttatagaaatgtgaacactgaatttattttaaaaaataataataaaaatttaaaaaaattaaaaataaaaaaaaccacagaaaacaactttacatgtatataggtcttgaagtgagtgaagtggctgcttttttttttttttttttttgcttttttttgctttttgtagaagagattgagaatggtactctaatcaaaaataaagttttgtagtgggaccagaaattacttacctgacatccacccccattccccctcatcctgctggggttgaaagttccagacctgctgtcgaggccttgtgtttgtcagacacccagtgtcctcctgcaaggacgcaactgtgagctgaggtgtgagcctaggagcccaggacccctgaccccggccgctgctgccagcctcagaaaggcacccaggtgtgcaggggagcacacagggcccggcagcccccaggaatcaaggatagggctaaggttttcaccttaactgtgaaggca

SEQ ID NO: 720993 - DNA, 596 bp, Homo sapiens
cctattcacatccctgcagatggccaggaaaggagctaatagggtggttacaggggcaagatggtccaatccttgttttatcagactcctagtaaccacagcttgatgactgtcctgctataggacagactgcatttgcccaggtcctgccagctgtgcacccctccatggtgccacatggcaggtcagaagtgccaatgaggtggcatgaggctcctgccacaccacctttcctcaaagccttatgtcttcatcatggaaaccttgtttatccattaccaagccamgagagaggattactgagaagaaggcagccaaaaacagggcactccctttggaacccagcggggtttctccgatcccaagcacaccttagtagttagcacagtgtgaatgaagacaaccaaatgttcatctgtgaatgctaataatgaatggttacaactacaggatcagcttgttcttccttcagggacatggaggcagatatcatgttctccatttgcctaaaatgctcttccagctccaccaggtgtagaacagaaggaaatcaactgtgctggcattagcagaaacttaagactgataacaagagg

SEQ ID NO: 720994 - DNA, 1429 bp, Homo sapiens
aggaactcaactactgggaaaatgtagcattagctattatgactgtttcatctgggccgtaaaagtcactctgtagtttgataaagtgttttctacttaaaagactactcgaaggatattcccatgatggaccatcctggagtgaaaaatgagggcccccttctctcactcagccaaaaaattgggcgccactggccaggcatggtggctyatgcctgtaatcctagcactttgggaggctgaggcaggcagatcacttgagctcaggagtttaagaccagcctgggcaacatggggggaccccatctccacaaaaaatacaaaaattaaccaagcgtggtggtgcgtgcctacagttccagctacttaggaggctgaggcttgaggatcatttaagcctgggaggtcaaggcagtatgaagacatattcgtgccattgcactcgagcctgggtgactgtctcgaaaagaagactgggactcttgtctcaaaaaggaaaaaaaaataattgggggccaggacatggaagggttgggaggccagagagtcttgtggataggggttaagctgctttccacaacctggaaatctgcggggctggactgggcccctgggattagatcccatcatgtgtgctccaagagtgacttcttataataactgtgcaggccactctggcttctgttgcttctgtcacccttaaagcattaggtaaatacctggtgtcagctgtgctctgggtggttaaggaatcttcgttttaaaaggtacttctgattttatttttgttcaggtatggtgaggccaaccagatcaggagatagttgccattgaaaagacagtgttttacccatcactcccaggaggagggggaacatggggaagggccacctggccacatggggaagcgctaaggtcttaggtcaggagtcagaaggagtgagggtgaaaaagcatgggtgagagcctttattgtggtttttgttgggagaaatggtctaggcagagtaagcaggagaggcgtgcttaagattggctagtttgaataatttcatggggctctgaggcgtaggagctgtctggtatctggtcctggagggataagggcagaagaatattagttcaacttgtaagagctcaataaaggaggtagttggtgaatttgggttctggattgggtgatttgcatataaatggcagctcacaggggagggcattgctatctctaggaatcagctagccctgggaggggcagcgtctccagggtcagcaattttccagagccagagcatcaagaaagaatacagaaaataagatcatttcccacagaatatatgtatcaaaacatcacacactgtacaccataaaaacaaaggaaaagcagcacaggaagctataaggttgtgtaataagggtgcttgagagttaa

SEQ ID NO: 720995 - DNA, 1429 bp, Homo sapiens
aggaactcaactactgggaaaatgtagcattagctattatgactgtttcatctgggccgtaaaagtcactctgtagtttgataaagtgttttctacttaaaagactactcgaaggatattcccatgatggaccatcctggagtgaaaaatgagggcccccttctctcactcagccaaaaaattgggcgccactggccaggcatggtggctcatgcctgtaatcctagcactttgggaggctgaggcaggcagatcacttgagctcaggagtttaagaccagcctgggcaacatggggggaccccatctccacaaaaaatacaaawattaaccaagcgtggtggtgcgtgcctacagttccagctacttaggaggctgaggcttgaggatcatttaagcctgggaggtcaaggcagtatgaagacatattcgtgccattgcactcgagcctgggtgactgtctcgaaaagaagactgggactcttgtctcaaaaaggaaaaaaaaataattgggggccaggacatggaagggttgggaggccagagagtcttgtggataggggttaagctgctttccacaacctggaaatctgcggggctggactgggcccctgggattagatcccatcatgtgtgctccaagagtgacttcttataataactgtgcaggccactctggcttctgttgcttctgtcacccttaaagcattaggtaaatacctggtgtcagctgtgctctgggtggttaaggaatcttcgttttaaaaggtacttctgattttatttttgttcaggtatggtgaggccaaccagatcaggagatagttgccattgaaaagacagtgttttacccatcactcccaggaggagggggaacatggggaagggccacctggccacatggggaagcgctaaggtcttaggtcaggagtcagaaggagtgagggtgaaaaagcatgggtgagagcctttattgtggtttttgttgggagaaatggtctaggcagagtaagcaggagaggcgtgcttaagattggctagtttgaataatttcatggggctctgaggcgtaggagctgtctggtatctggtcctggagggataagggcagaagaatattagttcaacttgtaagagctcaataaaggaggtagttggtgaatttgggttctggattgggtgatttgcatataaatggcagctcacaggggagggcattgctatctctaggaatcagctagccctgggaggggcagcgtctccagggtcagcaattttccagagccagagcatcaagaaagaatacagaaaataagatcatttcccacagaatatatgtatcaaaacatcacacactgtacaccataaaaacaaaggaaaagcagcacaggaagctataaggttgtgtaataagggtgcttgagagttaa

SEQ ID NO: 720996 - DNA, 1429 bp, Homo sapiens
aggaactcaactactgggaaaatgtagcattagctattatgactgtttcatctgggccgtaaaagtcactctgtagtttgataaagtgttttctacttaaaagactactcgaaggatattcccatgatggaccatcctggagtgaaaaatgagggcccccttctctcactcagccaaaaaattgggcgccactggccaggcatggtggctcatgcctgtaatcctagcactttgggaggctgaggcaggcagatcacttgagctcaggagtttaagaccagcctgggcaacatggggggaccccatctccacaaaaaatacaaaaattaaccaagcgtggtggtgcgtgcctacagttccagctacttaggaggctgaggcttgaggatcatttaagcctgggaggtcaaggcagtatgaagacatattcgtgccaytgcactcgagcctgggtgactgtctcgaaaagaagactgggactcttgtctcaaaaaggaaaaaaaaataattgggggccaggacatggaagggttgggaggccagagagtcttgtggataggggttaagctgctttccacaacctggaaatctgcggggctggactgggcccctgggattagatcccatcatgtgtgctccaagagtgacttcttataataactgtgcaggccactctggcttctgttgcttctgtcacccttaaagcattaggtaaatacctggtgtcagctgtgctctgggtggttaaggaatcttcgttttaaaaggtacttctgattttatttttgttcaggtatggtgaggccaaccagatcaggagatagttgccattgaaaagacagtgttttacccatcactcccaggaggagggggaacatggggaagggccacctggccacatggggaagcgctaaggtcttaggtcaggagtcagaaggagtgagggtgaaaaagcatgggtgagagcctttattgtggtttttgttgggagaaatggtctaggcagagtaagcaggagaggcgtgcttaagattggctagtttgaataatttcatggggctctgaggcgtaggagctgtctggtatctggtcctggagggataagggcagaagaatattagttcaacttgtaagagctcaataaaggaggtagttggtgaatttgggttctggattgggtgatttgcatataaatggcagctcacaggggagggcattgctatctctaggaatcagctagccctgggaggggcagcgtctccagggtcagcaattttccagagccagagcatcaagaaagaatacagaaaataagatcatttcccacagaatatatgtatcaaaacatcacacactgtacaccataaaaacaaaggaaaagcagcacaggaagctataaggttgtgtaataagggtgcttgagagttaa

SEQ ID NO: 720997 - DNA, 590 bp, Homo sapiens
  misc_feature 264: n = A,T,C or G
tcttggaccacagctcaacytcacaggtgaagccacttcctgtgaggtggtggagcaaaaataccagaggagcctgaatcctggaggactgtggagtttgttgtttcaggcctggactcttgaactctgaacacctcttatatgagagacaaacttccaccttgcataaaccactattatttcagttacaagtaaccaaatacattcctaattggttagactcagtttcctgtaataataacaacacgtaactcggggggcggnggggggctttgaaaatatgaaatgaaataaagtaaataaaaaattgtaactaatgtaaataacttgcttaataaattatattttcctttcacagatgagaattcatttaaatgacctatctaatcctgctgagttttttagacacactctatttatctcactgtgtatctctgatgatacttaagcattaatcacatctttatttactttagtggttaaaaacaaattataaacactgcatgacgttttcacaaaagataccacctaattgcaagcaaagataactatgaactctctggcaggatgaggaaaaaaaaaacaaattt

SEQ ID NO: 720998 - DNA, 2042 bp, Homo sapiens
tctaattttcaagcacaaagtatggcaaagccaaaaacggctctcagggcaaggcttcctgggctcaattcatgaccatgggctttgggaccaggggaagctaaagatcatcatcacttctgcaaaacagcggacctcgaagacgggaaacaacaaggccagaataggagcgagaagagatgaacttccctctcgaagtggttctctgagccccccggtaagagaaataatgaaggaggaagcgagagaggattcgtggtgtgtttagtaaaacaaggaagggctacagatacgctggaacaaagcctcagagcttgctttccaagtagcagtccagatacacaaatgggtcagctctgactgtgtaggcatcaccccttaggaaacctgaccacagaatgcccttgcaaagaaacggagacaaaaatagagtccttccatcctgcagtggcctccttcttctctttgtgtgtcagtgattttcaatcagtagattgcgagagccatggcaacttgaggaatttacattttaaattttaaaaagtgggcacgtagaggcgaaagtggtatttgggatacagaacagaagaatgggttcctcattcccacaaggttaccaagcagtagggtggggcagagtggatggaaactcccaaattgcaattgacatgggaaggtttgaaaactcacatccgggtgacgccatgtgcttgtccctgaaaatgtgttaactctggggatgtcatcatcccatgaggccaatcacagatcattcctcccactctccttttgctttgccccaaaccatatgttccctcatgacacacctacgcttccccaccctgaccccctgccatctcctcccaccaaaagcatgttctaaatattagctttttttttccccacaagagaaaagcattgcactagtttctctacatcattttatgaaacccttacagaaatcctaaaagataggcattcttatccctattttcagaagaagaaactttaatactaatctgatcacatgcataatgagaggtgaggctgggattcagactgagattgccctgcctccaaaacctctgacttttaaatcatagcctgctttcttggttccctgtatatctgagcatcctctcatttggatgatgccaagactggtttcatcctagttagcattaatatggtgcacagacctttccagcacgggacaggtcactttaccttgtacctgaatatttctcacctccagaccttggaaaaaatgaagtagcagtggcgggacactttcttccattttgacctctgtatttcttcacttattcagctagcatttaaagaaagcctgctatgcgcctgacactgttctaggctctagaaacaaaggaagtaaagccctgccctcctagaacttgcattctactattggagacaaatgactatatgatgtaggcaatgtcagctaatgatggaaagcaaagcaagttgaaggagcagaaagggatgaaagtgtgctgggtagggttgtcaatggtagcctctctgaggaggaacaytggggcagagccctctatggagtaagtgagtgaaccatggagaggtctaggaatcagcaggagccaacccctggtgggaacagattggacatggcagaaaaccagcagcacagctcatgtggccagagtcagtgagggtggcaggtggcagccacagatgggggaggggagggggacagagactggatcacttaaggccccctgggctaggaaaggagttaagaatttatgccaggaaaatattaaaaacatatcagtgccttttttttttgttctgagatgtgcccaacatcatcaattatttgtaatacacagaattcactcctgacaaggaaatgggtagaacatatgagaataagtagtttaatccacaaaacacagccgggatgatggatttcaaattgttgccagctcttcaggcagaatgggtaagaaataaagagagaatgtatgtaagatcacagtccagcagcacacttttca

SEQ ID NO: 720999 - DNA, 2042 bp, Homo sapiens
tctaattttcaagcacaaagtatggcaaagccaaaaacggctctcagggcaaggcttcctgggctcaattcatgaccatgggctttgggaccaggggaagctaaagatcatcatcacttctgcaaaacagcggacctcgaagacgggaaacaacaaggccagaataggagcgagaagagatgaacttccctctcgaagtggttctctgagccccccggtaagagaaataatgaaggaggaagcgagagaggattcgtggtgtgtttagtaaaacaaggaagggctacagatacgctggaacaaagcctcagagcttgctttccaagtagcagtccagatacacaaatgggtcagctctgactgtgtaggcatcaccccttaggaaacctgaccacagaatgcccttgcaaagaaacggagacaaaaatagagtccttccatcctgcagtggcctccttcttctctttgtgtgtcagtgattttcaatcagtagattgcgagagccatggcaacttgaggaatttacattttaaattttaaaaagtgggcacgtagaggcgaaagtggtatttgggatacagaacagaagaatgggttcctcattcccacaaggttaccaagcagtagggtggggcagagtggatggaaactcccaaattgcaattgacatgggaaggtttgaaaactcacatccgggtgacgccatgtgcttgtccctgaaaatgtgttaactctggggatgtcatcatcccatgaggccaatcacagatcattcctcccactctccttttgctttgccccaaaccatatgttccctcatgacacacctacgcttccccaccctgaccccctgccatctcctcccaccaaaagcatgttctaaatattagctttttttttccccacaagagaaaagcattgcactagtttctctacatcattttatgaaacccttacagaaatcctaaaagataggcattcttatccctattttcagaagaagaaactttaatactaatctgatcacatgcataatgagaggtgaggctgggattcagactgagattgccctgcctccaaaacctctgacttttaaatcatagcctgctttcttggttccctgtatatctgagcatcctctcatttggatgatgccaagactggtttcatcctagttagcattaatatggtgcacagacctttccagcacgggacaggtcactttaccttgtacctgaatatttctcacctccagaccttggaaaaaatgaagtagcagtggcgggacactttcttccattttgacctctgtatttcttcacttattcagctagcatttaaagaaagcctgctatgcgcctgacactgttctaggctctagaaacaaaggaagtaaagccctgccctcctagaacttgcattctactattggagacaaatgactatatgatgtaggcaatgtcagctaatgatggaaagcaaagcaagttgaaggagcagaaagggatgaaagtgtgctgggtagggttgtcaatggtagcctctctgaggaggaacactggggcagagccctctatggagtaagtgagtgaaccatggagaggtctaggaatcagcaggagccaacccctggtgggaacagattggacatggcagaaaaccagcagsacagctcatgtggccagagtcagtgagggtggcaggtggcagccacagatgggggaggggagggggacagagactggatcacttaaggccccctgggctaggaaaggagttaagaatttatgccaggaaaatattaaaaacatatcagtgccttttttttttgttctgagatgtgcccaacatcatcaattatttgtaatacacagaattcactcctgacaaggaaatgggtagaacatatgagaataagtagtttaatccacaaaacacagccgggatgatggatttcaaattgttgccagctcttcaggcagaatgggtaagaaataaagagagaatgtatgtaagatcacagtccagcagcacacttttca

SEQ ID NO: 721000 - DNA, 3705 bp, Homo sapiens
gtgtgagccatcgcacccagccttcttttctctatttcaaacatttgtcctgcaaggatgcaagtggctcacttcctccctgcctttttgtctctgctcaaacatcagtttatcagaaaaaactcccctagttactctatatagaattgcacttcctttattctctatcctcttactcagccttacttttcttcatattgattatcacccagtatattaaaactctgcttattgtttactctcaaaagaatgtaaactttttgagggcaaagacttgatctattttgttcactgctgttttcccagtgcctgaaacgttaccagacacaaagtatgtgctcaataaaatgtattttgatgaggattcatactttggtttcttctgtgtgaaatggagataatatgactctctttcacactgggacttatctgttacaatgttagattgtacttcagactgcctgccaggcccttgggccatcttcaataagtcagctcagggaaggctggtgtccactattgacctaagcaagccaatgacagcctacacctgaagcagagagcagaaatgttgagattatcgactgccccttggctttggtaagaggaataaaaaatggctatgttgttttagaaaatatcaccttgaaagctccatgatgatgtaccaatttgctctgattgtctcataaagcaccattttccttccccatatattatggagcagatggctctcttctcaaaggaagctgtgccattttaaaacttttcttcccatgcaggatgagccactggctaaaatggtgagatcaccacccatccagccatgctattataacccaggacactcatgtaggattgaggcctggaaagttaactgcatgattcccaggtgttagggctacttaccaagaatgcctgcttaactttgaaaggaaggtttccctgggaacatacatcctggtgaacaggatcaggtgttgcttaatagatattatgtagatacagagtaaatgtcaggcttacatagaggagttggctgctgaggcaaatttgttcttcagccttggccagcaacccagaatttaagggaggagtcaaggccggaagccacgtgcattgaggatctaggaaaccacccacagagtcatccttcttccagactcagcctcctcagacaaaaaatcccactctgttcccaggccggagagcctcctgggctggaattgctcaagcctcagctcacagatgagtcactgtattcatttgctccacaggtaggcgtgtagtttggccccatatgcaacagacaggccaagttaacagcaactcggggaatttcaaaattgatttttatggcaaaaagaacacatgaccattgtgatagaaaatattggaacatacaggcaagcaccataaattttaaaaagagctgataatccccaaacgcagagattaaacatcattaataatttcttgtctcaccttccaggcttttgtctatccacctgggagtacatatagtgtaaaacaaattggattattctaacaatgttgttttacggtccttctctatatactatcctacggtggacattttcccaggtcattgattattctgttctagtgattttttaatggccatacaaccttccaaaataaaaatgtaccatagtttgttgtacaatgctttacagttgaacatttagataattttcagtttttcgttactaaagttaacactatgatgagcatgattgaacatacatatttgtgtacgcctctgattcctgactaagaataaattcattcaaatgaaatcatgcaaccaaaacatatgagtattttcaaggcttaaaaaaggttttacttacttatactcctacacttgcggcatgaaacaggccctttcccaaaggtggcttttaggtaaggctgctttggtggcccagactagggtccccctgcctctgatagagctaaactgtgccgcaggaagctgccccagggcagctgtgtgcagaaggctgtttttgccccttggggccttccggctgcattttctcatctctacagccgggccagctgaagcatgtggaggtcaggtgatgtgtgtggggtcatgcagccagtggtgactcagccaaacccactccagctcctgaaccttgctcagatcacaaggctgagagcactcgctttccctgcagcccacagtttccaaataattaaaagaggctccttgtgcttgagtttgtagatattaagtttttggaatgagtggttcagccccatgaccttgttaattggtgacactaaatgctgtataatcctgccttcctttttctttctggaaacaatcagaataatttgttgagcttccctgcactgtataatttgcaatgaagctttgtgatgagtctattcaggtgcccatctgagactcagattcaaagacataactgctgagctgaatcaaaacaacaaytctggtacatctgattcattatgactcatgcatcaaactcaagctgcctattaaggtactagaacactctcaccaacataagaaaacccctgatgacaaagattggccaactcttggggattattgtctccttcatccataattcagtaagccaaattaaattcaggtgaccaatagttaagtcaacctaacaagactgtctcttctcaggtggctgggccagcatgggggatgactgcagctattccacagggagtctttgcttccagtggtttactatccctgtattactctctggaatggagcctgtgagctcaaggtcctctgtggacatcatactttgttctgattcttagccatacacagtgggagttgaatcccagatgtcctcttatggcccagcaccatttgcacagggttaagagaaaatggaagagcatcaacccatcccctcagctgggaaatgactcctgactcttttgccaggagaatatatcagttacatcctcttttgggcattcagagatgagcctaatatgtaaaaattaaagtaaacaggctgaagagacacctacttgtagtatagctgctgtattatttatctgcatatataaatgcacaggcacgtaacctagctgattctaaactgcgtaggtgagtgtttgcagaactaggggctaggaagttttctcagtacctatttgcatgaggctgtgtttcaggaaggcttttggttgttagctgaaggatgatgatggaatttaatgaggagtccttgggacagagactgaaatggcgggatggcctggtatttggttcctatcaggatattgagggtgatttgagctaggaggaataagggatgacagccatgtcctgggcttcggcactgctctgacactctgaaggtcagcagagttgaaagccttgcaggtgagctgttggcatggatgccggcgatgctcgtgataggttctgccagtcatggcaggactgaggctccttcagaaggtgttgtgagtagaggatgctgaggagggagagggggagaaagagaaagaataaggcaaattccacatgtgattatatctaatagtctgacttatgagttcctgtgggagaacttagaggaagtccagaaatacttggggaggccttacaggggtctgcagggcaggttaggctagagcaggaaactcagttgtaaatgctaatgc

SEQ ID NO: 721001 - DNA, 1194 bp, Homo sapiens
caaggcctttaattgtcaacatgacttttattaaaaaaataccacggagtttggcaaaatgcaaacatttgacagaacttgatgagtacgtgggtgtccattagattattattttgaccttttgtattggcttgaaatatttcactgacattaaaaaaaagggggtagatgcagaacagacaagaattagtatgattggtggaaacagggtaaaggaaagggggggatttcaaaatgacagatttcaaatctgagttgactggagaatagcagtgcctttaagagtttcaactgctagaagaaaawcaggaatgagactgagggaggcaataccacttttggatgcatgatatttaaaattatgactgaacctcatctagaaatgcccccaaaccaactgaaaatgctcattctgacatcatcagtagttttcggggaaaaaaagtcacaggatatagtttaagagcttctccctgtttttttccccaaaacacgtttagaccacaaaatcagaagctgaaaaagctgtccctggaaatgcaatattaatgaagggacctgccatttgactcatagttgatacctgattgccttataaaaaaacaatggataaaaattctttgcaactgaaggtggacagccctgaaggaggagcaactggagggctatgcccttctgggtccatggagcaggattatcttgggccagcgcaaaattggcctgcacaaatagtacaggacgccatcaactgtttttgggtttaatttctgcctgttcttcccctccccatctccaaatgatgagtggggccaccagagtccagacaaaccttttgtactcggctatctgaacttggtcctcaggggctgtacttcagcagtctgactcttagcagtagggcattaagtcagggtggaatataaactcttctgcgagagtcaagagtcctgaattcttgtcctggttctgtcaaaaatcatctgataagcttggatacatttcttaacaactttgagtattattaaggatttgctcttgaaaaaactctgaactctccggcaggtattagaaatagattgcatcgttgtgcctttgttgtgggatttatagtagttgcttggaaaagtgtattgaaaacaattgagaaatgttgtttggctccagtggaaaagtggctgtgattgatcagcactg

SEQ ID NO: 721002 - DNA, 1194 bp, Homo sapiens
caaggcctttaattgtcaacatgacttttattaaaaaaataccacggagtttggcaaaatgcaaacatttgacagaacttgatgagtacgtgggtgtccattagattattattttgaccttttgtattggcttgaaatatttcactgacattaaaaaaaagggggtagatgcagaacagacaagaattagtatgattggtggaaacagggtaaaggaaagggggggatttcaaaatgacagatttcaaatctgagttgactggagaatagcagtgcctttaagagtttcaactgctagaagaaaatcaggaatgagactgagggaggcaataccacttttggrtgcatgatatttaaaattatgactgaacctcatctagaaatgcccccaaaccaactgaaaatgctcattctgacatcatcagtagttttcggggaaaaaaagtcacaggatatagtttaagagcttctccctgtttttttccccaaaacacgtttagaccacaaaatcagaagctgaaaaagctgtccctggaaatgcaatattaatgaagggacctgccatttgactcatagttgatacctgattgccttataaaaaaacaatggataaaaattctttgcaactgaaggtggacagccctgaaggaggagcaactggagggctatgcccttctgggtccatggagcaggattatcttgggccagcgcaaaattggcctgcacaaatagtacaggacgccatcaactgtttttgggtttaatttctgcctgttcttcccctccccatctccaaatgatgagtggggccaccagagtccagacaaaccttttgtactcggctatctgaacttggtcctcaggggctgtacttcagcagtctgactcttagcagtagggcattaagtcagggtggaatataaactcttctgcgagagtcaagagtcctgaattcttgtcctggttctgtcaaaaatcatctgataagcttggatacatttcttaacaactttgagtattattaaggatttgctcttgaaaaaactctgaactctccggcaggtattagaaatagattgcatcgttgtgcctttgttgtgggatttatagtagttgcttggaaaagtgtattgaaaacaattgagaaatgttgtttggctccagtggaaaagtggctgtgattgatcagcactg

SEQ ID NO: 721003 - DNA, 1194 bp, Homo sapiens
caaggcctttaattgtcaacatgacttttattaaaaaaataccacggagtttggcaaaatgcaaacatttgacagaacttgatgagtacgtgggtgtccattagattattattttgaccttttgtattggcttgaaatatttcactgacattaaaaaaaagggggtagatgcagaacagacaagaattagtatgattggtggaaacagggtaaaggaaagggggggatttcaaaatgacagatttcaaatctgagttgactggagaatagcagtgcctttaagagtttcaactgctagaagaaaatcaggaatgagactgagggaggcaataccacttttggatgcatgatatttaaaattatgactgaacctcatctagaaatgcccccaaaccmactgaaaatgctcattctgacatcatcagtagttttcggggaaaaaaagtcacaggatatagtttaagagcttctccctgtttttttccccaaaacacgtttagaccacaaaatcagaagctgaaaaagctgtccctggaaatgcaatattaatgaagggacctgccatttgactcatagttgatacctgattgccttataaaaaaacaatggataaaaattctttgcaactgaaggtggacagccctgaaggaggagcaactggagggctatgcccttctgggtccatggagcaggattatcttgggccagcgcaaaattggcctgcacaaatagtacaggacgccatcaactgtttttgggtttaatttctgcctgttcttcccctccccatctccaaatgatgagtggggccaccagagtccagacaaaccttttgtactcggctatctgaacttggtcctcaggggctgtacttcagcagtctgactcttagcagtagggcattaagtcagggtggaatataaactcttctgcgagagtcaagagtcctgaattcttgtcctggttctgtcaaaaatcatctgataagcttggatacatttcttaacaactttgagtattattaaggatttgctcttgaaaaaactctgaactctccggcaggtattagaaatagattgcatcgttgtgcctttgttgtgggatttatagtagttgcttggaaaagtgtattgaaaacaattgagaaatgttgtttggctccagtggaaaagtggctgtgattgatcagcactg

SEQ ID NO: 721004 - DNA, 1194 bp, Homo sapiens
caaggcctttaattgtcaacatgacttttattaaaaaaataccacggagtttggcaaaatgcaaacatttgacagaacttgatgagtacgtgggtgtccattagattattattttgaccttttgtattggcttgaaatatttcactgacattaaaaaaaagggggtagatgcagaacagacaagaattagtatgattggtggaaacagggtaaaggaaagggggggatttcaaaatgacagatttcaaatctgagttgactggagaatagcagtgcctttaagagtttcaactgctagaagaaaatcaggaatgagactgagggaggcaataccacttttggatgcatgatatttaaaattatgactgaacctcatctagaaatgcccccaaaccaactgaaaatgctcattctgacatcatcagtagttttcggggaaaaaaagtcacaggatatagtttaagagcttctccctgtttttttccccaaaacacgtttagaccacaaaatcagaagctgaaaaagctgtccctggaaatgcaatattaatgaagggacctgccatttgactcatagttgataccygattgccttataaaaaaacaatggataaaaattctttgcaactgaaggtggacagccctgaaggaggagcaactggagggctatgcccttctgggtccatggagcaggattatcttgggccagcgcaaaattggcctgcacaaatagtacaggacgccatcaactgtttttgggtttaatttctgcctgttcttcccctccccatctccaaatgatgagtggggccaccagagtccagacaaaccttttgtactcggctatctgaacttggtcctcaggggctgtacttcagcagtctgactcttagcagtagggcattaagtcagggtggaatataaactcttctgcgagagtcaagagtcctgaattcttgtcctggttctgtcaaaaatcatctgataagcttggatacatttcttaacaactttgagtattattaaggatttgctcttgaaaaaactctgaactctccggcaggtattagaaatagattgcatcgttgtgcctttgttgtgggatttatagtagttgcttggaaaagtgtattgaaaacaattgagaaatgttgtttggctccagtggaaaagtggctgtgattgatcagcactg

SEQ ID NO: 721005 - DNA, 604 bp, Homo sapiens
actagccagacgtggtggcgcatgcctgtaatcccagctactcgggaggctgaggcaggagaatcgcttgaacccaggaggcggaggttgcagtgaaccgagattgagccactgcactcctgcctgggcaacagagtgagactccatctcggaaaaaaaaaaaaaaaagcacataaaccaacaaaatgacacgtacacacattaatggcattgaaggggggggaagggagtggtaaatgagggtatgaagagagaggtgagactgcaaaagtgagaaagggccgattattycagctttgtaggccccaaggagttgagacttcatcaggagggtactgggaagccactggaagcttggctccagctgcccagacacctccgcctgcaggctcccaggtacacactcaatgcatgcggaaggacagggcctttatcttcccccaacctgctttcctcctgttgttcttgcaggaaaggtaaagtggagcagacccctgccattctacatgcacatctgtggctgaagaggggctctcaccatcaactccaccgcagatgccatccaagaaggccaggaggtcacccccacccccaacctggagga

SEQ ID NO: 721006 - DNA, 604 bp, Homo sapiens
actagccagacgtggtggcgcatgcctgtaatcccagctactcgggaggctgaggcaggagaatcgcttgaacccaggaggcggaggttgcagtgaaccgagattgagccactgcactcctgcctgggcaacagagtgagactccatctcggaaaaaaaaaaaaaaaagcacataaaccaacaaaatgacacgtacacacattaatggcattgaaggggggggaagggagtggtaaatgagggtatgaagagagaggtgagactgcaaaagtgagaaagggccgattatttcagctttgtaggccccaaggagttgagacttcatcaggagggtactgggaagccactggaagcttggctccagctgcccagacacctccgcctgcaggcycccaggtacacactcaatgcatgcggaaggacagggcctttatcttcccccaacctgctttcctcctgttgttcttgcaggaaaggtaaagtggagcagacccctgccattctacatgcacatctgtggctgaagaggggctctcaccatcaactccaccgcagatgccatccaagaaggccaggaggtcacccccacccccaacctggagga

SEQ ID NO: 721007 - DNA, 662 bp, Homo sapiens
ttctactgatatgatgaattatattaattgattttcatatgtycaaaccaaccttgccgtcctgggataaatcccacttggtcattgtgtataattctttttataggtcactgtattcaatttgcttgtattttttggagtgcatgtttcagattgagtataaatttatatgaaccctagagaaggcagtcctgaaaaatataaacgacaagagcatttgctctttgacctggcttttccacctctagtatttgtcttacaggtgtgtctgcttgcatagcattatttgtaagaacaaaatactcacttaatgtcctcaatagattcttggaaactgcaactttgaatgaaatgatgtataacaaaaacaattttatcataggctaactcatacaagcaagagttaaattcctatggcatgctggtcacaaaaacatcaccgaagttctaaataaaaaccaaaacacttctaatattaaacatagaaataaatgtgagccctacatgcattttaaacagattaataaaaatgagtaagatgattttttatccacttattccaattcagggttgtgagtggcctgaggttatgcggcagctcagggtgccaggtggaaaccaatcttgaacaggacgccatcctatcacagggtacactcacg

SEQ ID NO: 721008 - DNA, 662 bp, Homo sapiens
ttctactgatatgatgaattatattaattgattttcatatgttcaaaccaaccttgccgtcctgggataaatcccacttggtcattgtrtataattctttttataggtcactgtattcaatttgcttgtattttttggagtgcatgtttcagattgagtataaatttatatgaaccctagagaaggcagtcctgaaaaatataaacgacaagagcatttgctctttgacctggcttttccacctctagtatttgtcttacaggtgtgtctgcttgcatagcattatttgtaagaacaaaatactcacttaatgtcctcaatagattcttggaaactgcaactttgaatgaaatgatgtataacaaaaacaattttatcataggctaactcatacaagcaagagttaaattcctatggcatgctggtcacaaaaacatcaccgaagttctaaataaaaaccaaaacacttctaatattaaacatagaaataaatgtgagccctacatgcattttaaacagattaataaaaatgagtaagatgattttttatccacttattccaattcagggttgtgagtggcctgaggttatgcggcagctcagggtgccaggtggaaaccaatcttgaacaggacgccatcctatcacagggtacactcacg

SEQ ID NO: 721009 - DNA, 662 bp, Homo sapiens
ttctactgatatgatgaattatattaattgattttcatatgttcaaaccaaccttgccgtcctgggataaatcccacttggtcattgtgtayaattctttttataggtcactgtattcaatttgcttgtattttttggagtgcatgtttcagattgagtataaatttatatgaaccctagagaaggcagtcctgaaaaatataaacgacaagagcatttgctctttgacctggcttttccacctctagtatttgtcttacaggtgtgtctgcttgcatagcattatttgtaagaacaaaatactcacttaatgtcctcaatagattcttggaaactgcaactttgaatgaaatgatgtataacaaaaacaattttatcataggctaactcatacaagcaagagttaaattcctatggcatgctggtcacaaaaacatcaccgaagttctaaataaaaaccaaaacacttctaatattaaacatagaaataaatgtgagccctacatgcattttaaacagattaataaaaatgagtaagatgattttttatccacttattccaattcagggttgtgagtggcctgaggttatgcggcagctcagggtgccaggtggaaaccaatcttgaacaggacgccatcctatcacagggtacactcacg

SEQ ID NO: 721010 - DNA, 1263 bp, Homo sapiens
accaaagaccaatttgaaataatgaggtctgaccagagaatgctgggaaaacaacagaagcaaacatgttaacttagaatccagcaatcactgacagaattgaaaatattttctaggaaaagccagaaagtgatctataaatgcagacattgagagtgaatagccctttccaaaagagctaccggcccagatattaaggcaaactccagatgtacagatgggaagaacgtggaccattaagtgagcccctatctttctctttcttctacgtcaggactcccatctagacaaaaagagtctttcacagtatttgtcaactcttgtattcgatatttacacagaccttcataatataaaagaaaaacctaatattttcaaagtatttggtgggaagatgctactcaaaaattagtgaatataatacttaaagtcaatcawggactcctccatagtcaataaacaaaacagaatttgttgctgatggggaagcggtgaagagggaaagatatccttataagtcattcatagttttactatatgcagttaaaactcctaaagttaatggaaaatgactaagcctttatgactcattggaaaaacaaaagccaaaaaagtccaggggagactcccctggtatttggtcactgaggagctgtatcaggactggaaatgctcatcaggcaagatgaaaaatttggtgataaattagcctaggtacctctgatacaagtttctaaaaagatgaaatgatacttcattcacacaaatatctgtaataagttttaaacaggaccaataatataagctaaaaaaaaaacgtaaggaaacattttaaggtggttaaatctgttggatactcatgaacttctgaaagccccacagacccttactcagagctggcatacggcatactcttactttacataagatttctacctacatttgattttgaaagtccccagaaatttaccggagtgtaatttttttttcttcttaaaaaaagaggctgggtgcagtggctaatgcttgtaatcccagcactttgggaggccgagatgggcggatcacgaggtcaggagtttgagaccagccgggccaacacagtgaaaccctgtctctactaaaaatacaaaaattagctgggcatagtggcgggcaactgtaatcccagctactcgggaggctgaggcaggagaatcgctcgagcctgggcgtcagagctagacaccgtcttaaaaaaaaaagagagagagaaagaaaaat

SEQ ID NO: 721011 - DNA, 1263 bp, Homo sapiens
accaaagaccaatttgaaataatgaggtctgaccagagaatgctgggaaaacaacagaagcaaacatgttaacttagaatccagcaatcactgacagaattgaaaatattttctaggaaaagccagaaagtgatctataaatgcagacattgagagtgaatagccctttccaaaagagctaccggcccagatattaaggcaaactccagatgtacagatgggaagaacgtggaccattaagtgagcccctatctttctctttcttctacgtcaggactcccatctagacaaaaagagtctttcacagtatttgtcaactcttgtattcgatatttacacagaccttcataatataaaagaaaaacctaatattttcaaagtatttggtgggaagatgctactcaaaaattagtgaatataatacttaaagtcaatcatggactcctccatagtcaataaacaaaacagaatttgttgctgatggggaagcggtgaagagggaaagatatccttataagtcattcatagttttactatatgcagttaaaactcctaaagttaatggaaaatgactaagcctttatgactcattggaaaaacaaaagccaaaaaagtccaggggagactcccckggtatttggtcactgaggagctgtatcaggactggaaatgctcatcaggcaagatgaaaaatttggtgataaattagcctaggtacctctgatacaagtttctaaaaagatgaaatgatacttcattcacacaaatatctgtaataagttttaaacaggaccaataatataagctaaaaaaaaaacgtaaggaaacattttaaggtggttaaatctgttggatactcatgaacttctgaaagccccacagacccttactcagagctggcatacggcatactcttactttacataagatttctacctacatttgattttgaaagtccccagaaatttaccggagtgtaatttttttttcttcttaaaaaaagaggctgggtgcagtggctaatgcttgtaatcccagcactttgggaggccgagatgggcggatcacgaggtcaggagtttgagaccagccgggccaacacagtgaaaccctgtctctactaaaaatacaaaaattagctgggcatagtggcgggcaactgtaatcccagctactcgggaggctgaggcaggagaatcgctcgagcctgggcgtcagagctagacaccgtcttaaaaaaaaaagagagagagaaagaaaaat

SEQ ID NO: 721012 - DNA, 1263 bp, Homo sapiens
accaaagaccaatttgaaataatgaggtctgaccagagaatgctgggaaaacaacagaagcaaacatgttaacttagaatccagcaatcactgacagaattgaaaatattttctaggaaaagccagaaagtgatctataaatgcagacattgagagtgaatagccctttccaaaagagctaccggcccagatattaaggcaaactccagatgtacagatgggaagaacgtggaccattaagtgagcccctatctttctctttcttctacgtcaggactcccatctagacaaaaagagtctttcacagtatttgtcaactcttgtattcgatatttacacagaccttcataatataaaagaaaaacctaatattttcaaagtatttggtgggaagatgctactcaaaaattagtgaatataatacttaaagtcaatcatggactcctccatagtcaataaacaaaacagaatttgttgctgatggggaagcggtgaagagggaaagatatccttataagtcattcatagttttactatatgcagttaaaactcctaaagttaatggaaaatgactaagcctttatgactcattggaaaaacaaaagccaaaaaagtccaggggagactcccctggtatttggtcactgaggagctgtatcaggactggaaatgctcatcaggcaagatgaaaaatttggtgataaattagcctaggtacctctgatacaagtttctaaaaagatgaaatgatacttcattcacacaaatatctgtaataagttttaaacaggaccaataatataagctaaaaaaaaaacrtaaggaaacattttaaggtggttaaatctgttggatactcatgaacttctgaaagccccacagacccttactcagagctggcatacggcatactcttactttacataagatttctacctacatttgattttgaaagtccccagaaatttaccggagtgtaatttttttttcttcttaaaaaaagaggctgggtgcagtggctaatgcttgtaatcccagcactttgggaggccgagatgggcggatcacgaggtcaggagtttgagaccagccgggccaacacagtgaaaccctgtctctactaaaaatacaaaaattagctgggcatagtggcgggcaactgtaatcccagctactcgggaggctgaggcaggagaatcgctcgagcctgggcgtcagagctagacaccgtcttaaaaaaaaaagagagagagaaagaaaaat

SEQ ID NO: 721013 - DNA, 626 bp, Homo sapiens
catggtaaaaccctgtctctactaaatatgcaaaaattagctgggcatggtggcacaggcctgtaatcccagctactcgggaggctgaggcaggagaatcacttgaactcaggaagcaaaggttgcagtgagccaagatcgcaccactgcactccagcctgggcaacagagcaagactccttctcaaaaaacaaacaaatgaaaaaccaacattgttttctactcttctgccataattactcattcagagtmagtagctgttttctaatggtaatgttatttactcattggggtttccttacgtggcataccttaagctatgtggtatgccacataaacagacacacacatatacacacacacacacgctctcacctcttagaaagtgtcttactacatgtatcaaaaaaattgctaccagtaattcagatcagtgttttccagtcagtaaccttaataacagattccctattaacattcaacaacaaaggagattgaaatattatcttgtccttctgcattttgaatttacacaactgtttgctgattaataactatgctaaaggaaagtttttaaagaaaatcttattttgtgaaagctgagtttactttgacttatcgcttaa

SEQ ID NO: 721014 - DNA, 673 bp, Homo sapiens
tttttttattttttagtagagagggagtttcaccatgttgggcaggtggtctcgaactcctgacctcaagagatgcgcccacctcggcctcccaaagtgctggggctatcgccttatttttaaaaaaaggctctctctctctctctctgtccctctctctctctctctctctctctctctctctctctctctctctctctctctmtatatatatatatatatatatatatatatatatatatataaactttaaatacccctttaaaagttaagaacaagcactgagtaaatttccacttctacattaacacctcttcaatttatgaatggccacaacagcactagctattcatggttccaagaattcggtgttactataatagctctgtgcacaaaatagtgaggcctcaatcaatgtgttttctaaaaacatgttgctttattaagaagtttgttctcaaaaatcttcagtaatcatttcaagcaaaactatgtgtacttatatattatggaaataactctggacatggagtctatttactggctcataaaagacatattcacatggaaagtaaagtttcttaacctctcagtttcaacatatttgtgtgcaaaatgaagctaataatatctcctgcacaggactgttggaaagattaaatgaaactataca

SEQ ID NO: 721015 - DNA, 673 bp, Homo sapiens
tttttttattttttagtagagagggagtttcaccatgttgggcaggtggtctcgaactcctgacctcaagagatgcgcccacctcggcctcccaaagtgctggggctatcgccttatttttaaaaaaaggctctctctctctctctctgtccctctctctctctctctctctctctctctctctctctctctctctctctctctatmtatatatatatatatatatatatatatatatatatataaactttaaatacccctttaaaagttaagaacaagcactgagtaaatttccacttctacattaacacctcttcaatttatgaatggccacaacagcactagctattcatggttccaagaattcggtgttactataatagctctgtgcacaaaatagtgaggcctcaatcaatgtgttttctaaaaacatgttgctttattaagaagtttgttctcaaaaatcttcagtaatcatttcaagcaaaactatgtgtacttatatattatggaaataactctggacatggagtctatttactggctcataaaagacatattcacatggaaagtaaagtttcttaacctctcagtttcaacatatttgtgtgcaaaatgaagctaataatatctcctgcacaggactgttggaaagattaaatgaaactataca

SEQ ID NO: 721016 - DNA, 956 bp, Homo sapiens
tgtttagtagagatggggcttctccatattggtcaggctggtctcaaactcccaacttcaggtgatccgcccrcctaggcctcccaaagtgctgggattacaggcgtgagccaccgcaccctgccaacttacacttttctaagctactccctatataccacttttgctacaaaaaaagtaaattaacacaataaaatagtttaactctggccctgtagtgtgctacacataaaaactcacatacacctctaaatctctttccaagatgctattggagagtatttctgtacaattggcatgtacctgattggaatgttctggagctttgattaggcttccccttgccccttttgtttatacaacgtctacagtataggagtagctgcatcttagggtaggtgaggtctcctagaaaactgaactgaagtagttgttttgaaggctgaagaaattctgaaagacctatagcgtacattctcatcctaatattccttctgttctgattgagaataaggatcatgattattttcattattcatctgctcctcttgcttagtcctttcctgaagtcttaatcctctccttgagacatcccagttggttgccatggaaatgattattttgccacaaacacagaattatgacctacagtaaagaataagcagcagaagccaatgaactcttggaaaataactcagtcttgctgacactaaaagaagactaacactattaaaactggaagcaaagttgtccaaagtttttcatgaggcaataagttatcatgaatttttctcaaataattattagatcagttgttgaagaatttatggtttgaacatatttatgggcactaatacctttacaagttaaagtccttccaaaattttgaacctaaaggttcaaagcaactaatgattgatattagtaataatcatttaattgtttctgacctgtca

SEQ ID NO: 721017 - DNA, 1492 bp, Homo sapiens
gcatattggatcttatttatttgtcttccatattaattttaatttatctttaatttttctttccaatgatttcgaattatttttctctcgttcattttactcggtgttctcaagtctaacttccataattaagtctgtatttttggtgacatccattaaaagatgtctgcttctaaagtggattttatttctgaattaatcatatttatttcttttatttccttgctaaattctgctagcttacttttattgtccttctattggcttgtcttttcttctttgagccattctgtcttgttctaaatatttcttcaaaaaggctttatttaaaatttttttcaatatcattgaaaattatttgaggaaataatatatttcttctataattgttacatttaatttgtgtgcctcttttgtataattttttaatttttttcttgtagtatctctatatgttgtttttattccagcttctttctgatatttttctcatctttaaatggggccattgtttcgggggtagctagctatttgctaaacaatagtctgaaaaagggctggggaagtaagttggggcagaagatagctttattatggttctgctgtttcaattcttttcccaaagtttctgctaggggacagatttttgctcacttctttcacagatgtgccctttcagtttgcttatcttgcaatggagcaatgtgttggaattcrtatttattagttttactttagcaattttgaacagcaactgttacccaccatctctccttgccatactgccagcctagtagtttgaaagatggtgtgtctgcctccttcatcatttggccccacattgcctgtcactctacaatttgctgtttcaaataaaaaaatccctggtcaggcaccttagggctgtgtctctttcctttgtagaattccatgctctgcctgaggtctgttaaggtatgcatctattatgctcaattgaatccaaatctcactgtattcctcacagtttttggtttggtattgtagtagctaatataatttaaaatggaatttccttgtttttatttttttcttattgttattttcagccaatttcagagaagagaatagacgtagaagcatctttactttgcaatctgtaactgtaagtctgtaggccagttgctgtcagaatggtaacaaacattgctgggttcactcccaacagtttctgataaagcagttctctgggagggtcctagaatttgcatttctacaagttcccaggtaatgatgaggttgtttgactatgggtcatactttgagaaccccagctttaggttatttatataatagcagcaccatctctaggcttacctagtaagagatagatttgaatcacaagtcataaatgtcagatggaattttactgagttcttaatcactatgtgttttgtaagactgctgtgtatagactttcttaaaggtcagtgaaaatgtctagggctattga

SEQ ID NO: 721018 - DNA, 1492 bp, Homo sapiens
gcatattggatcttatttatttgtcttccatattaattttaatttatctttaatttttctttccaatgatttcgaattatttttctctcgttcattttactcggtgttctcaagtctaacttccataattaagtctgtatttttggtgacatccattaaaagatgtctgcttctaaagtggattttatttctgaattaatcatatttatttcttttatttccttgctaaattctgctagcttacttttattgtccttctattggcttgtcttttcttctttgagccattctgtcttgttctaaatatttcttcaaaaaggctttatttaaaatttttttcaatatcattgaaaattatttgaggaaataatatatttcttctataattgttacatttaatttgtgtgcctcttttgtataattttttaatttttttcttgtagtatctctatatgttgtttttattccagcttctttctgatatttttctcatctttaaatggggccattgtttcgggggtagctagctatttgctaaacaatagtctgaaaaagggctggggaagtaagttggggcagaagatagctttattatggttctgctgtttcaattcttttcccaaagtttctgctaggggacagatttttgctcacttctttcacagatgtgccctttcagtttgcttatcttgcaatggagcaatgtgttggaattcgtatttattagttttactttagcaattttgaacagcaactgttacccaccatctctccttgccatactgccagcctagtagtttgaaagatggtgtgtctgcctccttcatcatttggccccacattgcctgtcactctacaatttgctgtttcaaataaaaaaatccctggtcaggcaccttagggctgtgtctctttcctttgtagaattccatgctctgcctgaggtctgttaaggtatgcatctattatgctcaattgaatccaaatctcactgtattcctcacagtttttggtttggtattgtagtagctaatataatttaaaatggaatttccttgtttttatttttttcttattgttattttcagccaatttcagagaagagaatagacgtagaagcatctttactttgcaatctgtaactgtaagtctgtaggccagttgctgtcagaatggtaacaaacattgctgggttcactcccaacagtttctgataaagcagttctctggragggtcctagaatttgcatttctacaagttcccaggtaatgatgaggttgtttgactatgggtcatactttgagaaccccagctttaggttatttatataatagcagcaccatctctaggcttacctagtaagagatagatttgaatcacaagtcataaatgtcagatggaattttactgagttcttaatcactatgtgttttgtaagactgctgtgtatagactttcttaaaggtcagtgaaaatgtctagggctattga

SEQ ID NO: 721019 - DNA, 1492 bp, Homo sapiens
gcatattggatcttatttatttgtcttccatattaattttaatttatctttaatttttctttccaatgatttcgaattatttttctctcgttcattttactcggtgttctcaagtctaacttccataattaagtctgtatttttggtgacatccattaaaagatgtctgcttctaaagtggattttatttctgaattaatcatatttatttcttttatttccttgctaaattctgctagcttacttttattgtccttctattggcttgtcttttcttctttgagccattctgtcttgttctaaatatttcttcaaaaaggctttatttaaaatttttttcaatatcattgaaaattatttgaggaaataatatatttcttctataattgttacatttaatttgtgtgcctcttttgtataattttttaatttttttcttgtagtatctctatatgttgtttttattccagcttctttctgatatttttctcatctttaaatggggccattgtttcgggggtagctagctatttgctaaacaatagtctgaaaaagggctggggaagtaagttggggcagaagatagctttattatggttctgctgtttcaattcttttcccaaagtttctgctaggggacagatttttgctcacttctttcacagatgtgccctttcagtttgcttatcttgcaatggagcaatgtgttggaattcgtatttattagttttactttagcaattttgaacagcaactgttacccaccatctctccttgccatactgccagcctagtagtttgaaagatggtgtgtctgcctccttcatcatttggccccacattgcctgtcactctacaatttgctgtttcaaataaaaaaatccctggtcaggcaccttagggctgtgtctctttcctttgtagaattccatgctctgcctgaggtctgttaaggtatgcatctattatgctcaattgaatccaaatctcactgtattcctcacagtttttggtttggtattgtagtagctaatataatttaaaatggaatttccttgtttttatttttttcttattgttattttcagccaatttcagagaagagaatagacgtagaagcatctttactttgcaatctgtaactgtaagtctgtaggccagttgctgtcagaatggtaacaaacattgctgggttcactcccaacagtttctgataaagcagttctctgggagggtcctagaatttgcatttctacaagttcccaggtaatgatgaggttgtttgactatgggtcatactttgagaaccccagctttaggttatttatataatagcagcmccatctctaggcttacctagtaagagatagatttgaatcacaagtcataaatgtcagatggaattttactgagttcttaatcactatgtgttttgtaagactgctgtgtatagactttcttaaaggtcagtgaaaatgtctagggctattga

SEQ ID NO: 721020 - DNA, 1888 bp, Homo sapiens
  misc_feature 624: n = A,T,C or G
ctgttgctcttgcttgcggtttctcatgtggttgcagtcagacgatgactatttcctcatctgcaggctgctgttataatctggaggcctgtgtgagatattgggagggctgaacctccctccttctccatgtagtctcaggatttctctataatgacatcttaatgacgtctctttgtgatagccagaccagagaagaatactttttttcttttttcttttttttctttctgggatggcgtcttgctgtgttgcccacactggagtgcaatgacatgatctcggctcactgcaacctccacctccagggctcaagtgattctcctgcctcagcctcctgagtagctggaattacaggcatgcgccaccatgcctggctaatttttgtatttttagtagagacagggtttcactatgttggccaggctggtctcgaactcctgacctcaggtgatcctcccacctcggcctccctaattgttgggattacaggcgtgagccactgcacccagcccgaattttttatttaatcacattttattatttttatctcttacatgaaggtttctccaaagggctttttggagtgctactaaatagtattagtcactcaggaaagtattnttgtgtcatggggaacttctggaagtgttattagcccagggctagttctgaaagtcaaactctgcctggcagaagtaggtgaatgacagcgatcagaggacattgatttttgccagctcttacatgagtcataaatgtgatgatatttgtggatgcatttggcaaatacatatatgttgattgttattatgtttttcatcaaacttaccttatgttttaaaatttgctttcagaggtgggtattaatataccatgagccaatgaggatgagttacatgctgcaaatgttgtcccttagcacccatcccaagccaagtgatgttgacagggatgaggagttccatagggaaacagtccatgcacttgggtcacttaaggtactaagattagccatctgtctcttctaatggggaaagcaatgttggaatagagggcaagcacatatggccagggtcggacttctcagmccacatttgctgagggaacagatgaagcaacaaagttgggaagtaacagactgggccattaggtgcccagtagtgatgctggtgagtgcttgactcagtgtgtaatgttttatttgatgcctacataatggtgactcttgttccctcattttaatctcttcaggttgataggacatgggcaaatactaaaaggctggttgtctttatatacgtttatctagaggtagtcacttacaaatcacccatttttttcagtttgtaagataaattttacaagttgttaaaactgacattgcctttcccacagattgtcaaagaacagttatggttacattaaagttccgaatttcctgacctccttgagagataaaggaactgtaaataaattacaccgaatttctcttaaaagccttatcttaggggattagtaacaatatcacatttttcagaagcctcagggcaataaaatctccttagtgtaattgaaatctaagtacttatctactagagaattatatatttcaacagcttttaaaaaattatgttccactcttaaaagaaatctgaattttaaaatttacattaaatctttttattctaaggcaaagacaaaaggcaaaaactacatacagtttaatttgatctcataatttttttgcaaattagattttttaagaaaaattatgaattataattgaatcatctagcttttcctattatataagtgatattttaatctatatgtaataggggaaaactaagaagaagggaatacttaccataggtagatacttttt

SEQ ID NO: 721021 - DNA, 329 bp, Homo sapiens
attttgtcatgtttaccttcaatatatatttttaaaaacacagacagaactgtgtgtggtggtaggcacctgtaatcccagcactttgggaggccaaggaaggaggattccttgaggccaagagttggagaccagcatgggaaacatagcaagaccccgtctccacataaaaattttaaaaattagctgggcatgatggcacatgcctgtagacctggctaatcaggaggctgaggcaggtggattgcttgagcctagaagtttgaggttgcattggggtatgatcgtgccactgcactcsagcctgagcaacagagcaagactctgtc

SEQ ID NO: 721022 - DNA, 1694 bp, Homo sapiens
  misc_feature 130, 226: n = A,T,C or G
aaaattagccaggcatggtggcacacgcctgtaatcctagctactcaggaggatgaggaaggagaattgcttgaacccgggaggtggaggttgcagagagttgagatcacrccactgcactccagcctgngtgaaagagtgagactccaactcagaaaagaaaaaaaaaaaaaaggaaagagagattgatcttgatcctgtgagcagtgaaaaactattgaatggntccttttattattattattattatactttaaagtttagggtacacttgcacaatgtgcaggttagttacatatgtatacatgtgccatgctggtgagctcgccccattaactcgtcatttagcattaggtatatctcctaaagctatccctcccccctgcccccaccccacaacagtccccagagtatgatgttccccttcctgtgtccatgtgttcaatccatgaaatgacatgattaaaatgtttgcttaagaatattagtttgtcagtatattttttgatagagaaaattaataagagattgcaggagggagatgacacttgaaacttcactttcccgggtgtgaggaaaaattttgagaatatagctgataattgtgacactgacggagctttgcaagcttcctaattgggagaccaagtgttattcttatttctatcccttgcaaccaatacaatggcttgcatttcactcgtgctctgtagtagtcactaggtgactaaatgaggtacataaaaaaggacagatgcacagactttgaaaaggaagacttagttaagagtcgactggctgcctctggaaggttgtcaagtagaaaatgcttctattgctagaaataaaggaaataggaacaggatccaatttgggaaaatggtaagtctacaaatccatattttacggtgtatcttttttccaaaagggacaaaccaaaagcaattcattctcataatgtccataagcctgataaacaattcataatattacccgtccttctcacctttaatggctggaggaaagttgcccgatgaatgagagaatcactcagtcacaaaaccgggaaggactatcctaagaacagaagtctaaaccccttctggcaggattatccaaggctaagaacacacagtctctataattgcactaagaagcaaatcctgtctttgaataagggcatcatgacaatctggatgtaatattcgctcttcaacttttcatctaggttgaaggaggtgaaactaattgcctgtcatctaggtacacagcaatagtgaaaggaaataaaaaccatgctgctcttaatagaatcctcaggttggttgtttccaaagaatgcttacttgggtaaataagtgaaatgtggcacaaatggttagatgacaccaaaatgaaggggctccagtgaagcctagtgatatgtgtagttcaccttggggttaagtgaatagtaattgccctccacacaattttaattaaggatatttttaagggcatagagatgttgacattcacacatactctacctggggtccacagaggttgtgtgccagctgtgaaccatatgtagcccacacagactgcctgccagaactcctttcccccacaaatgcacccacaggtcaccctcctgtcattgagactggactgtgtaatgcctgaggaaagcgccatggttatcattcaaacac

SEQ ID NO: 721023 - DNA, 1694 bp, Homo sapiens
  misc_feature 130, 226: n = A,T,C or G
aaaattagccaggcatggtggcacacgcctgtaatcctagctactcaggaggatgaggaaggagaattgcttgaacccgggaggtggaggttgcagagagttgagatcacaccactgcactccagcctgngtgaaagagtgagactccaactcagaaaagaaaaaaaaaaaaaaggaaagagagattgatcttgatcctgtgagcagtgaaaaactattgaatggntccttttattattattattattatactttaaagtttagggtacacttgcacaatgtgcaggttagttacatatgtatacatgtgccatgctggtgagctcgccccattaactcgtcatttagcattaggtatatctcctaaagctatccctcccccctgcccccaccccacaacagtccccagagtatgatgttccccttcctgtgtccatgtgttcaatccatgaaatgacatgattaaaatgtttgcttaagaatattagtttgtcagtatattttttgatagagaaaattaataagagattgcaggagggagatgacacttgaaacttcactttcccgggtgtgaggaaaaattttgagaatatagctgataattgtgacactgacggagctttgcaagcttcctaattgggagaccaagtgttattcttatttctatcccttgcaaccaatacaatggcttgcatttcactcgtgctctgtagtagtcactaggtgactaaatgaggtacataaaaaaggacagatgcacagactttgaaaaggaagacttagttaagagtcgactggctgcctctggaaggttgtcaagtagaaaatgcttctattgctagaaataaaggaaataggaacaggatccaatttgggaaaatggtaagtctacaaatccatattttacggtgtatcttttttccaaaagggacaaaccaaaagcaattcattctcataatgtccataagcctgataaacaattcataatattacccgtccttctcacctttaatggctggaggaaagttgccygatgaatgagagaatcactcagtcacaaaaccgggaaggactatcctaagaacagaagtctaaaccccttctggcaggattatccaaggctaagaacacacagtctctataattgcactaagaagcaaatcctgtctttgaataagggcatcatgacaatctggatgtaatattcgctcttcaacttttcatctaggttgaaggaggtgaaactaattgcctgtcatctaggtacacagcaatagtgaaaggaaataaaaaccatgctgctcttaatagaatcctcaggttggttgtttccaaagaatgcttacttgggtaaataagtgaaatgtggcacaaatggttagatgacaccaaaatgaaggggctccagtgaagcctagtgatatgtgtagttcaccttggggttaagtgaatagtaattgccctccacacaattttaattaaggatatttttaagggcatagagatgttgacattcacacatactctacctggggtccacagaggttgtgtgccagctgtgaaccatatgtagcccacacagactgcctgccagaactcctttcccccacaaatgcacccacaggtcaccctcctgtcattgagactggactgtgtaatgcctgaggaaagcgccatggttatcattcaaacac

SEQ ID NO: 721024 - DNA, 631 bp, Homo sapiens
ggcacacaggaaatcctgcactgaatcaaacagattttgtattaccagatctaggctgactcactgtgtggtcaggaccttgggtcaatcacttcacctggtgactcactccctacctgtaaggtgtggaggacagctggagtcactgtggcacctgtgtgtttagcagtgtgtttgcttgttcctgcttttatgtctctggctggtctaagatggaatgataaaaaaataacggaatgcactttgtaaacgagagcatcctagacacatgtaaagattggaaaattagaaagctgtctctactgtagttacttctcagatatgaccaaccattattaagaattcattggctaatagkgctacattttctcatgatcattcttctgttttagaagtgggcaactgcagttttaagaataaatgtgtaaatgtgtgttttcatgagagacaataaagctgttttcattaagaatgaaatatgcaacttgcaaacacttttacttttcttgaattgggtccttcagcagaagcagtttgcccagccctgacatggaaagtttactttgctcatcaacctgaaggagaccgaaagctatgagaggcggctcctgaaaagaatctagactccgga

SEQ ID NO: 721025 - DNA, 560 bp, Homo sapiens
aatccctaaggggttccaacatcagtacatagacatttgatctcaggaacattaacagatacttaaaaagagtcttctgcgtgccaggcactgtactgcctattaagataaaaagatgaatgaagcagggagctgacatcctagtcaatatagcagccacaaaagcaaagatgaagcaaagtactaaagggcccctctgcctgggagagcagggcacaggggagaggctggtcaggtcctccctggggcttwgggaactcggagtggttaacagaggagccagcattttagagaaaacgttctaaatcagtatgcctcagccttttctaacttgcaaactcctttcatagtaatagggaatggtacagactctctggaagttattttaaatataaaaatattttatttagatcagtatattactaaaaattgtttgggatctgaactatatatatttttaaattgtgttcagaggaatacaacttaaggccctgagaaacagcatcttcagacaacttgtagaattaccgtttttatgataattctcacttgtatttctc

SEQ ID NO: 721026 - DNA, 604 bp, Homo sapiens
ggatatctaagatgatttaattctaattttcactactgtaggcagtgtggtggaatagtggtaaagctaactacttgaccttgcattagtttttttcatctataaaatgggctaacaacctgtttctttttgttcactatgttattgtaaaagtcagatgagatgacatggaaaaattttctaaaaagcataaagcacacaaataatgcaagacattatgatttttttttaaaatagaaatcttcagaggcaatcttctgaaaggatggaaatgcagcatccagtatcagtcttggaaaaggtcagtatttatcttccccctgaaccttttgcacatgagaygtgttatttcttttgaacataaccaatatgtaaggcatcccataataagctaatattctgtcactttacagtttttagcaaggttttcaatgcaataaaaaaccgaacttccaacaactctaaccgcaacagatcatcaaaatccccacattccttttatccacttacattctattactctgggaaatacatctcttagtccctggaaataaaaattcctcacattaagatgcaaccagtgcattctggtctattccttcat

SEQ ID NO: 721027 - DNA, 898 bp, Homo sapiens
tgctagattgtatggctggggaaagacaatataaatcagatttggcatcgttaatccaagctccagtattaatgtcacctaaagaattgttctctatgttgctcttggtcaagagaggtgcaaagaatgcatttaatgttgaaattgtgtagtaaaggggcagctccaggaatgtagtggtctgaggttagcaactagaggaaaaagaagactcacaacctggctagtagctgtggactaagatgagcattgctgccctttctttttatatgggccattgagagttaagtaagccagagatatcatcgagttaatataaaactggaccctaggccacttgggctgggctcaatgaagacttccactttctagaaaactctgagatttctgccctgtcagcgtgcccaacctttcctcagaggatactttgctgtcttttctcacaagtatttcttaytttttaatctgcgtaaaatctataaggtacacttagacctgtgtatatgcatttgctgaagtgttcccaccactacgaccactaaaatacagtcctttcttaccttttttacctttttttttttgagacggagtcttgctctgtcgcccagattgcagactaatgcagtggcacaacctcagctgatggcacactccacctctgaggttcaagcaattctcctgcctcagtctcccaagtagctgcaactacaggcatgcatcaccatgcccagataatttttgtatttttagtagagatggggttttaccacgttggccaggctggcctcgaactgctgacctgaagtgatccactcgcttcggcctcccaaagtgctaggattacaggtgtgagctaccgtgtccagcccctaccttaattctattcatcctgaattca

SEQ ID NO: 721028 - DNA, 800 bp, Homo sapiens
tctattctgtattccagtagaaataataactcagtaggaataggagtatgtagttttttttaataaacatataacagaatggtagaattagttttgaaagccatactctgaaggaacaacaatgagaatacttgctgggaattcgcctctttaagaaatagcagaggactgccaaattaacaaaatgcccctggtctgtatcatttatacatggtacagatatatattgtggacctactgtgttccaaacccaaagattgaagaagtaaattctcacttcctgtctttgacatattcagaatttggaaatatttcggaagctagaagtcaatactcacaatctaactcttagaatgaatgatccttggtcttttaacaaaggacatctgactaataaaatagtcttagagttgtaggagaaatgtgtcattctggacaacaaagaccttctgtctctttcgcaatggactgtttgcgtaaaataccagcgtacttagtgaattagacatctacaacactgtgtaaacattcctttccagtcattgcttcctggtcagtcatagagaccactttgaagtgcctttattttgaacactaggaaagaactacaggagagccacagccctctgaagtagtaatttttgtaaatttgcgaataatgatgttacatcacgtcactgggacatcaaacctgtctaatgtgyactactactcccacactactactgctaaggcaacaaccatttactaggcttattggccgtgtgccaagtgctgtgtttatttcttattttcatagg

SEQ ID NO: 721029 - DNA, 1418 bp, Homo sapiens
ccctaaataaattacaatgataacatcacagatcactgatcacagatcaccataacagatataatgataattaaaaaagtttgaaatattgagaaaattaccaaaatgtgtgtgacacagagacatgaagtgagcacatgttgttggtaaaattatgccaatagacttgctcgatatatggttgccacaaactttcaatttgaaaaaaacacaataactgtaaagtgcaataaagtgaagtgtaataaaacaagatatgcctgtatttatttttaaagccccagtgtttgctacataaatatatattcatattagatatctaaaaagaacctatgaacaaatgtttcaatttactatttctgattgaggttttttaactggtaaatattttgtttagttatttcctacctcttatagtaaaaatatttcccatatttgtgaaataagatttttggcctttttccccaaagtgcctcaattctatgtggttctatgtaagaatctacaactttccaagatcctaaatgtacaacatcatctgaaaatgcagtcaacatttgctagaccatatgctttgaataaattagtttttgcaatatattagctagctggatactgaagtgtgttggtagtgatatgcaaggatttttctgaacatggcctgtagctgaagcatgttacaggtacatagttcagtcagcagcatttaaagtaactaaatcagccttgtaaacaagcatctgtcctttggcccagagcatctgattaaaagtgtttgaaaaattacaaatatttaaggagtaggtggtttgtatttgcttgattacaatatttaacaattgaattggttatgatctcagataagtcacctttctatgtctttttccacagactcagactaacactttattaaagttaggaccattagtctaacattaggggaatctctgtgaaggggacatgtatgaggggaaattctttttttaaaatgatagaaagtctattattaggtcattgagtcaaaagatgtaacttggcacctaggaaaaaataatatatttcatatatttattatcattagctatatttttgtgaagtatattactggctcattatttcaatgagcaaaagctggtttttaccagctagtaatctgatcaaatttttagggcgattatatcagatttatttaatcagcaagagtaaaataattggatggactaagatctcacacggtcttttgaaatcctgttacctaatacttttttttttttttttcacaatttgctcattcaattgaaacatgcctttaaaaccagcataaatctgtagctacataagtgtcagttccactgaatgatcaaaagcctaggaattgttcacattatacgtgtcttgactktattaaaattcttgat

SEQ ID NO: 721030 - DNA, 1641 bp, Homo sapiens
cctgcctgaacctttgcatattaagacatttctgtcccaaactgcaataaatgactctataatcaaattacactcaggttttacaaagtttatatatgtacatccccaggaaaaatgtgttgaagttggaaaactcagctaagatatttatgatgaaagtatgttttatttcatcatttatattgcgtgacattataagcatagtgaaacagggagttcacagtggagccccttccataaaagaaacttagcttcagagaacttttctttatgcttgttagattagccaggtttactgagaaccattaagaatcccaaatttgagagggtacaagcatcaatttagtcacatgtagtgtgagcattagtttaattttcagtgagagacattattagtcattgggattattttttcctacatcataaattttaatgtcactagtggaagaaagctttgccatcaaatgatctcttacataagaataagtgggcttaacgttggttaatttgtcatagttttaatcatagcataggttttacataaaactgaaaaatatgatttggctcattcttcttcaaaacagtgaacatactatcaatcaaattgctgatatatgtgagttaatacaaaataatctattttcagtgcaaaataaataagaataaaagtggatccagtcccaatgctgtaaatggccaatcttaaatcaaacatcatttcaagacaatattatattttggaaaggactaactgatgctaaaataaaataatattaaattttatatattatttatgaaaaatataattctacttcctaccttttctaaaaggcaatgcttattgtaactattcattataatgatttattagtagtatttataaacaattataataagtttatacctagaattcctgcaattctatagtctgctttttcatagtagtagaaatcattgttgacctgggtctaaaattgagtttttaattgtaaattcagtaataggggctttctttatgtctgttctatttgtaattatgattcctagtatatgtctgtctttgtgccaatttccccttataaggaattatagaatagaactacggaggactttttttttttaatacratggctgtgatgagagcttactgataaagaaattttttctagatgtttaaaaataaacctgtagaaaaaaataagtattgtgatctacaggaattcaacttggttaaggttaatattcataaggcaaagttttagtactagatgttccttatgacctcccattgactcctgaagattaagtcattttaaagggcaattaatttcctgacaggtttaatttttaccatttagaaaaaaaaaatctgcacctggttttcatttttctatactttataacctctatgcaaaatgggagccagacagagatgattaaacctggccctaaattattatattttttccccaacaggaatcaattcatttacagctttccagtttttccagcctgcaagaggaggataaatctaggaaagatgactctgaaagagaaaaagaaaaggataaaaacaaagataaaacctctgaaaaacccaagatcagaatgttatcaaaaggtgaatgtgaaaatatttcc

SEQ ID NO: 721031 - DNA, 1488 bp, Homo sapiens
aggcgctgtgtacttgtcagttgccctgctaataccttctgaaaagctgtctataacaacatttattttgtttacaaaaggaaaagacaagcagcaaagaaaacaaaacattagtgtcacattaatgtatcactttagagtttgccatgctctttcaaaaagagtattttgttttctagttagagacaacaaaaggcacatatgattgttttaatttcactgtggagaaagtatggcctggtcgggttacagtactttctcaaggtcttagctagcagaggaagtaataataacaggaatttaaataatactaattaactcttctgagacagccaagtgaagaataaatgaagggaatctgcaatgtttaatagctctagacatggtttgtgtgttttaaataactttgtctattaaaacaagtgaaagtatttctgttattgatttacatttggctctcaatccgtaaactcgtctgatggctttaatagaagagatgtaagtaattatctaatgtgttaggaaaagataaatggaaaaaaatttctggcttccttttcctatgtacatattgacttttacaatgagaactatttcatctctgcctacaaattgaaccccaccccagaagacaagaggaataattaaacagaacaacaacaacaacaacaaaaacctgtcaatactactactctgaatttgagaattttgaggaatttggatatttgggaggcatgcctaaaatacataattattttgttttgagtaaatagatttattattatttgaatttatgctctagatgtttttatttgcactttagaaagagtgtatattaattataaaatactattttgttcataactctgtttagaaaatatgtcatcccatttctgtcattaactaagggatcagactcccgatcagggattacaagaaattgaaaaaggcctaatatcctagtaatacactcaaactataagtgtgtgagtatcattaaaataactaataaatgactattgctttcaaataacatttttataatgcatatgtgctaagtttatttagaaatcattttgtaaggaaggtgattttattattatcctggttttatagaagagaaaactgagatacagaacgtaaaatgattatcactttcatacaacttgtaagtagaaaattcaagactactcccgtttttctgatcccaattcttgtttccccaaagagattttacaaaatgtagtatcaccttttgttcattgtgctatttagaccacttaatttgcataccacccctcttctaaacaaaattcttggcagtcaaataactgcttggaatgtagttagagcataccctggtttatagtactgcaagttgaaaatacctgaggatatrtatatatttttaataccaattctgacatcccatctctagaaactctgatttaatttacttgtattgtcttgattgctggcatttttaaa

SEQ ID NO: 721032 - DNA, 1567 bp, Homo sapiens
  misc_feature 1467, 1468, 1469, 1470, 1471, 1472, 1473, 1474, 1475, 1476,1477, 1478, 1479, 1480, 1481, 1482, 1483, 1484, 1485, 1486,1487, 1488, 1489, 1490, 1491, 1492, 1493, 1494, 1495, 1496,1497, 1498, 1499, 1500, 1501, 1502, 1503, 1504, 1505: n = A,T,C or G
  misc_feature 1506, 1507, 1508, 1509, 1510, 1511, 1512, 1513, 1514, 1515,1516, 1517, 1518, 1519, 1520, 1521, 1522, 1523, 1524, 1525,1526, 1527, 1528, 1529, 1530, 1531, 1532, 1533, 1534, 1535,1536, 1537, 1538, 1539, 1540, 1541, 1542, 1543, 1544: n = A,T,C or G
  misc_feature 1545, 1546, 1547, 1548, 1549, 1550, 1551, 1552, 1553, 1554,1555, 1556, 1557, 1558, 1559, 1560, 1561, 1562, 1563, 1564,1565, 1566: n = A,T,C or G
cccagctactcgggaggctgaggcaggagaatggcgtgaacctgggaggtggagcttgcagtgagcctagatagtgccactgcactccagcctgggcgaaagagcgagactctgtctcaaaaaaaaaaaaaaaaagaatgagttcatgtcctttgcaggaacattgttgaagctggaaaccatcatcctcagcaaactaacacaggaacagaaaaccaaataccgcatgttctcatttacaagtggaagtacaacaatgagaacacgtggacacagggaggggaacatcacacatggcggcatgtcagggggtgggagcaaggggagggacagcattaggacaaatatctaatgcatgcagggcttaaaacctagatgatgggttgatgggtgcagcaaaacatcatggctcatgtatacctatgtaacaaatgtttacattcagcacatgtatcccagaacttaaagtaaaatttaaaaaaatgaaaagaaaaaaatgaagttaccttgatgaatagcaagcttctcctttattgaactctcagtagcatattataaatcctctcggaagagaatttttagttaaatgtgtgcattaaaatacttttgttaagaagacaaaagaattatctatacaaagtgtattttgttatatgactcaggacccagaggtatccaatgagtaaattggagataaagataaacatagcataagaggagaaacatactgtaaacagaaagtaaatacatcttcctctcatctagtggatgagagaagaatgccagaaaggaagcacagcctctgcaggagctacagactgacatctcataacagattctccttagaaaaattaaaatggttggtgtggtaagaaagtcaccaggtttaaagtcattaaaattctgggtctgagcaggtgtattaaactctagagtctcatwgtattcatttgtacaattttgcatttaatatccacctcagggcattattggaaaaaataaaagagataatttatatttggaaaaacattacaggcctcaaatgcattgttttagatttttgtgaattgttagtttaaatcataagcttaaagtacttaaagtgaaattttccatgaataattgattgatccaatattttttgagattgcaaaactctggaatgctattaaagaaaattggaagttgtttgcatgtcatttacctaaaattttaaattaaaatcacatttattttacgtcttcactatgaaattcaattaagactctttttgttaactaaagacggatatatattcatttgttttaaagttatcatccaagaactgttgagttcaaaattatataagacttacaatttacttggtagatgaatgtgtttatccccttaaaatggcaaacctatgttatagcagattataaaaataacggctcattatgaatgtaacattcttattataactaatgnnnnnnnnnnnnnnnnnnnnnnnnnnnnnnnnnnnnnnnnnnnnnnnnnnnnnnnnnnnnnnnnnnnnnnnnnnnnnnnnnnnnnnnnnnnnnnnnnnnna

SEQ ID NO: 721033 - DNA, 1567 bp, Homo sapiens
  misc_feature 1467, 1468, 1469, 1470, 1471, 1472, 1473, 1474, 1475, 1476,1477, 1478, 1479, 1480, 1481, 1482, 1483, 1484, 1485, 1486,1487, 1488, 1489, 1490, 1491, 1492, 1493, 1494, 1495, 1496,1497, 1498, 1499, 1500, 1501, 1502, 1503, 1504, 1505: n = A,T,C or G
  misc_feature 1506, 1507, 1508, 1509, 1510, 1511, 1512, 1513, 1514, 1515,1516, 1517, 1518, 1519, 1520, 1521, 1522, 1523, 1524, 1525,1526, 1527, 1528, 1529, 1530, 1531, 1532, 1533, 1534, 1535,1536, 1537, 1538, 1539, 1540, 1541, 1542, 1543, 1544: n = A,T,C or G
  misc_feature 1545, 1546, 1547, 1548, 1549, 1550, 1551, 1552, 1553, 1554,1555, 1556, 1557, 1558, 1559, 1560, 1561, 1562, 1563, 1564,1565, 1566: n = A,T,C or G
cccagctactcgggaggctgaggcaggagaatggcgtgaacctgggaggtggagcttgcagtgagcctagatagtgccactgcactccagcctgggcgaaagagcgagactctgtctcaaaaaaaaaaaaaaaaagaatgagttcatgtcctttgcaggaacattgttgaagctggaaaccatcatcctcagcaaactaacacaggaacagaaaaccaaataccgcatgttctcatttacaagtggaagtacaacaatgagaacacgtggacacagggaggggaacatcacacatggcggcatgtcagggggtgggagcaaggggagggacagcattaggacaaatatctaatgcatgcagggcttaaaacctagatgatgggttgatgggtgcagcaaaacatcatggctcatgtatacctatgtaacaaatgtttacattcagcacatgtatcccagaacttaaagtaaaatttaaaaaaatgaaaagaaaaaaatgaagttaccttgatgaatagcaagcttctcctttattgaactctcagtagcatattataaatcctctcggaagagaatttttagttaaatgtgtgcattaaaatacttttgttaagaagacaaaagaattatctatacaaagtgtattttgttatatgactcaggacccagaggtatccaatgagtaaattggagataaagataaacatagcataagaggagaaacatactgtaaacagaaagtaaatacatcttcctctcatctagtggatgagagaagaatgccagaaaggaagcacagcctctgcaggagctacagactgacatctcataacagattctccttagaaaaattaaaatggttggtgtggtaagaaagtcaccaggtttaaagtcattaaaattctgggtctgagcaggtgtattaaactctagagtctcattgtattcatttgtacaattttgcatttaatatccacctcagggcattattggaaaaaataaaagagataatttatatttrgaaaaacattacaggcctcaaatgcattgttttagatttttgtgaattgttagtttaaatcataagcttaaagtacttaaagtgaaattttccatgaataattgattgatccaatattttttgagattgcaaaactctggaatgctattaaagaaaattggaagttgtttgcatgtcatttacctaaaattttaaattaaaatcacatttattttacgtcttcactatgaaattcaattaagactctttttgttaactaaagacggatatatattcatttgttttaaagttatcatccaagaactgttgagttcaaaattatataagacttacaatttacttggtagatgaatgtgtttatccccttaaaatggcaaacctatgttatagcagattataaaaataacggctcattatgaatgtaacattcttattataactaatgnnnnnnnnnnnnnnnnnnnnnnnnnnnnnnnnnnnnnnnnnnnnnnnnnnnnnnnnnnnnnnnnnnnnnnnnnnnnnnnnnnnnnnnnnnnnnnnnnnnna

SEQ ID NO: 721034 - DNA, 604 bp, Homo sapiens
caggttcaagctattctcctgtctaggcctcccgagtagttgagattacaggcatctgccaccatgctcagcttatttttgtatttttagtagacacggggtttcaccatattggtcaggctggtcttcaactcctgaccgcatgatccacctgcctcggcctcccaaagtgctgggattataggtgtgagccactgctcacagcccagtagcatttttcgtagcagtttgtatagctcagaggtaaggaaacagaatcattttcagggggatgcaagatccacccagtgctaaaaacctcatataccacaggaacattattttttctaacaattcaaaaagcatagcttccagggtctttataaggggaatgcctaattaccatactcattgccattggagaagcataacgctgtggcttctcttagttattgttttcccagtaaaaaggcagtttgtcaatcatagatttttaggccatagcagtgttattttccaaawcccatcattgaaacacctacagttaaaaaaaaaaaaagaaaaactttaagtttattgaatttgttacaagaaggatacacctaagaatcagtggaatgtctca

SEQ ID NO: 721035 - DNA, 1650 bp, Homo sapiens
  misc_feature 9: n = A,T,C or G
gataagttntattgataatttaaaaaattcttttacacgttcgatgtatatttagtattactgagaggatttgtaaacacattattgggaaatgatgttactaaatataatatcactatgtagaatatgtctcacatggtttcctgtaaagttcatagtgaagcgtaatatacatacagaataatacacatataaaggtatagaacttgaatatttctacctctcaaagtgatttttagcttttattaaaactagaggtaactctatgcttgaaggtaggcagaagtatttggcaccaagagacagagaggattcaaatgtgtttaatttgctttgaattgttttgtatttgttactctgcacaactattttttactcaaataacaataagcaatgttagattttacctcactgatataagacctctctttctcagatttttccttctccttytcctccacttcctcttccttttcccttagtctacatgtttaatcttccacctttataggagagaacatagactgatgttaaggtacaaattaaatatggagagtcaataggtaaaactcattccaaggaggacaaatttgggtttgaaaatttcaatttcttagtccagcctatgttttcaatcacaatcacattgatcgtggagtgtgcatatgtatttgcacttgtgtgtttgtgtgtgtatgtacatgtgtgtgcacacatgcacttgtgtctttccattatgaaaggaaatgctggtgctctgggatacatagtactaaacaccagtttgttttctgccctctctactcacatcagagtagaacatgagtttgtaaaaccaaatcctcctcgtaaggagtaggaagaagtatccttttcctatgccaggtatgtttaagaccacagataatattcattagtacatatgtgcatcaataaacataattagtacaatttgtcagagaattctcaaaagcagactaaaagagcaaagccctgtgacatgaacttataggactcatgtcattttttacatcctttacatggagtctgtatattactagaggagtttttcccactgtaaattttaaatcaattcaaattagggtaaagattctggaaacttctgcagtatatgtttctataattcaaaagatattatttgccagctcagttttctcggttttcaaaaattgtgacggaaatgactaccatttaggatgcttatgtttttttctaggtatgattttatgatggtgatttgttttctgagatgcagatgaaaatatacaaaatatgcatggcttaaatgactaaattgttgtggagataaacgtaatatttgttatatttaataatgtttcctccatgattattattaaaacagatatattaaaaactgctaaaatttcaagcagacaagagagtaaaaaacacattcagtcagggaccactgaactattctaaaaagcaaaggcaaaatgaaaggtactagtcaatatatgggaaataggagcaaattattttcctaaactttccaaggattgagaaaaaaaagatccaattccttcaataatggaaataaagacctgattccttcaataatcctcatctagattttaaaaatataaacttgataggagatatattaag

SEQ ID NO: 721036 - DNA, 1650 bp, Homo sapiens
  misc_feature 9: n = A,T,C or G
gataagttntattgataatttaaaaaattcttttacacgttcgatgtatatttagtattactgagaggatttgtaaacacattattgggaaatgatgttactaaatataatatcactatgtagaatatgtctcacatggtttcctgtaaagttcatagtgaagcgtaatatacatacagaataatacacatataaaggtatagaacttgaatatttctacctctcaaagtgatttttagcttttattaaaactagaggtaactctatgcttgaaggtaggcagaagtatttggcaccaagagacagagaggattcaaatgtgtttaatttgctttgaattgttttgtatttgttactctgcacaactattttttactcaaataacaataagcaatgttagattttacctcactgatataagacctctctttctcagatttttccttctccttttcctccacttcctcttccttttcccttagtctacatgtttaatcttccacctttataggagagaacatagactgatgttaaggtacaaattaaatatggagagtcaataggtaaaactcattccaaggaggacaaatttgggtttgaaaatttcaatttcttagtccagcctatgttttcaatcacaatcacattgatcgtggagtgtgcatatgtatttgcacttgtgtgtttgtgtgtgtatgtacatgtgtgtgcacacatgcacttgtgtctttccattatgaaaggaaatgctggtgctctgggatacatagtactaaacaccagtttgttttctgccctctctactcacatcagagtagaacatgagtttgtaaaaccaaatcctcctcgtaaggagtaggaagaagtatccttttcctatgccaggtatgtttaagaccacagataatattcattagtacatatgtgcatcaataaacataattagtacaatttgtcagagaattctcaaaagcagactaaaagagcaaagccctgtgacatgaacttataggactcatgtcattttttacatcctttacatggagtctgtatattactagaggagtttttcccactgtaaattttaaatcaattcaaattagggtaaagattctggaaacttctgcagtatatgtttctataattcaaaagatattatttgccagctcagttttctcggttttcaaaaattgtgacggaaatgactaccatttaggatgcttatgtttttttctaggtatgattttatgatggtgatttgttttctgagatgcagatgaaaatatacaaaatatgcatggcttaaatgactaaattgttgtrgagataaacgtaatatttgttatatttaataatgtttcctccatgattattattaaaacagatatattaaaaactgctaaaatttcaagcagacaagagagtaaaaaacacattcagtcagggaccactgaactattctaaaaagcaaaggcaaaatgaaaggtactagtcaatatatgggaaataggagcaaattattttcctaaactttccaaggattgagaaaaaaaagatccaattccttcaataatggaaataaagacctgattccttcaataatcctcatctagattttaaaaatataaacttgataggagatatattaag

SEQ ID NO: 721037 - DNA, 1650 bp, Homo sapiens
  misc_feature 9: n = A,T,C or G
gataagttntattgataatttaaaaaattcttttacacgttcgatgtatatttagtattactgagaggatttgtaaacacattattgggaaatgatgttactaaatataatatcactatgtagaatatgtctcacatggtttcctgtaaagttcatagtgaagcgtaatatacatacagaataatacacatataaaggtatagaacttgaatatttctacctctcaaagtgatttttagcttttattaaaactagaggtaactctatgcttgaaggtaggcagaagtatttggcaccaagagacagagaggattcaaatgtgtttaatttgctttgaattgttttgtatttgttactctgcacaactattttttactcaaataacaataagcaatgttagattttacctcactgatataagacctctctttctcagatttttccttctccttttcctccacttcctcttccttttcccttagtctacatgtttaatcttccacctttataggagagaacatagactgatgttaaggtacaaattaaatatggagagtcaataggtaaaactcattccaaggaggacaaatttgggtttgaaaatttcaatttcttagtccagcctatgttttcaatcacaatcacattgatcgtggagtgtgcatatgtatttgcacttgtgtgtttgtgtgtgtatgtacatgtgtgtgcacacatgcacttgtgtctttccattatgaaaggaaatgctggtgctctgggatacatagtactaaacaccagtttgttttctgccctctctactcacatcagagtagaacatgagtttgtaaaaccaaatcctcctcgtaaggagtaggaagaagtatccttttcctatgccaggtatgtttaagaccacagataatattcattagtacatatgtgcatcaataaacataattagtacaatttgtcagagaattctcaaaagcagactaaaagagcaaagccctgtgacatgaacttataggactcatgtcattttttacatcctttacatggagtctgtatattactagaggagtttttcccactgtaaattttaaatcaattcaaattagggtaaagattctggaaacttctgcagtatatgtttctataattcaaaagatattatttgccagctcagttttctcggttttcaaaaattgtgacggaaatgactaccatttaggatgcttatgtttttttctaggtatgattttatgatggtgatttgttttctgagatgcagatgaaaatatacaaaatatgcatggcttaaatgactaaattgttgtggagataaacgtaatatttgttatatttaataatgtttcctccatgattattattaaaacagatatattaaaaactgctaaaatttcaagcagacaagagagtaaaaaacacattcagtcagggaccactgaactattctaaaaagcaaaggcaaaatgaaaggtactagtcaatatatgggaaataggagcaaattattttcctaaactttccaaggattgagaaaaaaaagatccaattccttcaataatggaaataaagacctgattccttcaataatcctcatctagattttaaaaatataaacttgataggagatayattaag

SEQ ID NO: 721038 - DNA, 802 bp, Homo sapiens
accacctgtgaatgaatttcaaaaatatccatggatgttaatgcttaataattagtttcttatttgcaaattctccctacacttcctcttttccctctgtttcttaaatactagtgtcttcttaaagtctaatatggattttcactcactccatggcatcctccaccctgatgacaaaaggcttattactttatttcatcctgctgctcagaataattcaatgcttcttcatcaccttcatattaagatgcaagctccttggtgtatcacacaaaatcattcacaatctcagcctatttttgaaacttctccagcatcatctcttcctgccactctcctcytacctgtgttgcagagacacaggagaagccagatcccaagaatactgttttttcttttttaaatttttttttattatactgtaagttttgggatacatgtgcagaatgtgcagttttgtcacacaggtatacatgtgacatggtggtttgctgcccccatcaacctgtcatctacttcaggtatttctcctaatgctattcttcccccagccccccgccccatgacaggccccagtgtgtgatgttcccctcccggtgtccatgtgttctcattgttcaacttctgcttatgagtgagaatatgtggtgtttgcttttctgttcttgtgaagaatactttttgattcctgccttcatgcccttgcacatgcttttctctctgctttgaaagttttctttttcattttctgggtaactgcaatatatccttgaagggctaaactgacagatgccttccctaa

SEQ ID NO: 721039 - DNA, 658 bp, Homo sapiens
caaaataaaaagtaatataaatatgtgttaacaaagaaataaaattcttaaaataaatatccttatagatcagtgtaatgaatattggtaattcttaatgattattaactaaagcctcttatgaattatttagtacaaagagcaggtaaactgttggcataattctattaattttgagaaatttcatgaagttctccataattttatgttaatctaactatatctaaacacatgcatttttttwaattattattatactgtaagttttagggtacatgtgcacaatgtgcaggttagttacatatgtatacatatgccatgctggtgtgctgcacccattaattcatcacttagcattaggtatatctcctaatgctatccctccgccctacccccaccccacaaccatcccaagagtgtgatgttccccttcctgtgtccatgtgttctcattgttcaattcccacctatgagtgagaacatgcggtgtttggttttttttccttgcgatagtttactgagaatgatgatttccaatttcatccatgttcctacaaacgagatgaactcatcattttttatggctgcatagtattccatggtgtatatgtgccacattttcttaatccagtctatcattgttggacatttgggttgg

SEQ ID NO: 721040 - DNA, 954 bp, Homo sapiens
aataacgacttttaaaggatataagtaaggaaaaagccagaaagaataggcttcaagtaatgatggtaagcaaagaaactagtaaacatgtgggtcaatataaagaaggattgttattattatttttttgagagagggtcttgctctgtcacccagcctggagtgcagtggcgctatcctggctcaccacaacctctgcctcccaggttccagtgattctccttcctcagcctcccaagtagctgtgatttccatgtgataagaggcgtgtgccatcacgccaggctaattcttgtctttttagtagagacccggttttaccatgttggccaggctggtcttgaactcctgacttcaagtgatttgcccacttcagcctcccaaagtgttgggattataggcgtgagccaccatgcccggcctaagaagcatttcttacacagaacagtaatgataatggttattaattttggtaataatatcaagatataataaaattccaaacatctctaacacttaataagaagatgagtaatttttawtagaagaaggttagaattattgatttcaattttagttcctgtttaatcaagtatatatgttagcaatttcaacataatcacttaaaaacagaaactgatcatataatatctaaataactagagaataacaaggattaaagataacttagttaatcttatagaaggcaggaaaagataaaaaatcattttaaagagaaatctgaaaaagagagagagagggagagagaaagagaagatagatataaatccaaatatttcagcaatcaaaagaatgtcatatgagcaaaattctccagttaaaggagcaaggccataaattgggtggtaagtattcaataaaattgtctttataagggaacataaacataaatatcatggcataaaatgacttaaagtaaaaggatgagaaaaa

SEQ ID NO: 721041 - DNA, 665 bp, Homo sapiens
gagagaaagaaagaaagaaagagacagagaacttattatagtgaagccttatttatctttgtatcatgaggggctagctcaggacctggcatgaatggagcttataaagtgtatattaaaataaataggccacttatgacatgggttaagtcattcatattccaaatttaatgtaagaggttcgttctagcataaatatatatcttaggctttacaataaagtaaaatattgttacttttatacatatgatataggtttaattttgagagcacgcacaatatttatttaaaaatgctccttaaataaatttaaaaatatatttctacatgaatataatgtaacattaccaattttattgagtctctgtttttttcttataaaaagaacttacaatgataatacataagtaaaactgtaataattatacctactagacacataaaagctttgaattgaagaaaaattttacaataatctgtgtcaggttatgatttaaatttagaattactgtattctaaattctcaaacagagatcatcaatattttttagttatggtactgaattcaatagaactttaaatgtacatcatgtatgtgagctgacatagaggaatcatgattaagtaaatcaaaatagtattaatgttcaatgacatgtgktaga

SEQ ID NO: 721042 - DNA, 3019 bp, Homo sapiens
gtagaggttttggcctggttgtggcttgtgctatgggatgctccagcatctctgctttctgtcttgagaaaactcagtgactagcttcatcagtgatcctttgccctgcagaagtcaatcctgtcctaacctctagtgtgatctgttttaaggaactggaagaacgctactggtctgtagaagctgctgtccagtattgtgcacgttttggactccagagacagagaatgtagtagtagakaatttgcaaactaactctgactctagtaattcatatcaagactttatgagcagaaagttggtatacttgctttctacagcaccccaccccctctggtaaatttttttatgaaaagtgagactcatttctacttctacattgggtgatttacttaaatgaacctttccttcaaattgttgcactgaattcattacattaaattcaacagtttattgcacctctagtatttgcaatatgtcatggaggcagatcttggtttagagtacaatttttaatacaatttagcaagaaagacacatacttaaatttaattctgatacaaattaacactaaagttgaagcattagaattccaggctgagctggccgggcgtggtggctcacgcctgtaatcccagcactttgggaagccgaggccattggatcacaaggtcaggagatcgagaccatcctggctaacatggtgaaaccctgtctctactaaaaatacaaaaaattagctgagcatggtggcgggcacctgtagtcccagctactggggaggctgaggcaggagaatggcgtgaacctgggaggcggagcttgcagtgagctgagagatagcaccagtgcactccagcctgggcgacagagcgagactccatctcaaaaaaaaaaaaaaaaaaaaaaaaatccaggctgaactatggaattcactttgaataggtgtggaattagattgagagttttacatttttctgaaacagaaatacagtttgaccagtatttatggaccaagtactttgttgtcattgtcgatgtgcatggataaggacagcatactttatacctgcttttcctttctcttctagtgtcttgtatgcattatgcacgtgaccattcctactctttaagtgtagattcctaaaaatcagaaaatcagaagagactgtctttactaattccttctacatttcatggccagactgtacctcatttggggcgcctgtcctatgaatgggagcagcaactccctacagatattatggcaaaagacaacaggtttatttatggtagtggagctgctttctgctttttcccctgaataaacagagcttgaccctggtcctcctcagagaagtggagaaggcaattttacataacaaatttcagttagttgtgcaaatggagaagacttgctgtgatttgcctgaatccagagaagatgtgcaaagtctcagtgtttgcaccaatttcaatttaagctgctgattatctgtatgtttttataacatttagaaaaaatgaattattttaattaccaagccataggaatgcaactctgcaagctttatttaaatccacagtgcagccgtggcaatcatttctgaaataactcttctagtcttgttgcatttatttttgtattgagatttattttttattaagttcatcaaagtcacttcatagatagatgccatatatataatatatatatagcatacatttgccaccatatatatatatgagacaccatatatatatatatggtggcaaatgtatgattgaaacctttctagttgttttaaaggagtctcatttgttggccaggcacctacaaatggtggctcatgcctgtaatcccagcacttcgggagaccaaggcaggtagatcacctgaggtcagaagttcaagaccagcctggccaacatggtaaaacctcatctctactaataatacaaaaattagctgggcatggtggcgcatgcctgtaatcccagcgactccagaggctgaggcaggaaaatcactgaacccgggaggcggaggttgcagtgagccgagatcacaccattgcactccagcctgggcaacaagagcgaaactccatctcaaaaaaataaacaaataaataaaataaaaattaaaaaagagtctcatttgtcatattttgatgtgaaattcagaaatcagtacaacattatgagtcaggctgatttctttttccttgtacttttcctttttcctttcctttccttttctctcttgtcctatcctgtcttgttctatcctttcctttccccttcctcctttcctttcttcctcccttcctcacccacttatttcttctttttttttttgtttgtttgtgtttgtttttattgatgatggaagtgatcatgaatggtgagtgaaccactgaatcatcttttgcttcctatggggatctatctttcagaagtcaaacagataaattatcatcttgaaaagaaagttatttgttatttaggatttttttctctcttctcatcaattagcttttttttaaaatttgacttaaattcttcaagtatgaaacagcagaaaaaaaaagagaggcaatattctcttatagctccttgggaccatgcatggagttccatcactaagtggtgatatttctttttaactttatttcagtcatctagtttatttcagcatcatcttgtcaatgtccagatcatcagcatgtggcatgtgctgaactgagttgcttgctgcttctgcatatgtctggtaggaaacccaattttccgcatttatgcctattacccagcattctttctctcttttatttcactggaaggtaattaaaattgcttttgtcaaccagtcttcatgggactttggagttttgcataaggatctggtgttcactatgagggattctgggagctctttctttttgacaaatctaaattctagccctggcacccttttctcgataccagacatgtggataaaagtagatgtatgaga

SEQ ID NO: 721043 - DNA, 3019 bp, Homo sapiens
gtagaggttttggcctggttgtggcttgtgctatgggatgctccagcatctctgctttctgtcttgagaaaactcagtgactagcttcatcagtgatcctttgccctgcagaagtcaatcctgtcctaacctctagtgtgatctgttttaaggaactggaagaacgctactggtctgtagaagctgctgtccagtattgtgcacgttttggactccagagacagagaatgtagtagtagagaatttgcaaactaactctgactctagtaattcatatcaagactttatgagcagaaagttggtatacttgctttctacagcaccccaccccctctggyaaatttttttatgaaaagtgagactcatttctacttctacattgggtgatttacttaaatgaacctttccttcaaattgttgcactgaattcattacattaaattcaacagtttattgcacctctagtatttgcaatatgtcatggaggcagatcttggtttagagtacaatttttaatacaatttagcaagaaagacacatacttaaatttaattctgatacaaattaacactaaagttgaagcattagaattccaggctgagctggccgggcgtggtggctcacgcctgtaatcccagcactttgggaagccgaggccattggatcacaaggtcaggagatcgagaccatcctggctaacatggtgaaaccctgtctctactaaaaatacaaaaaattagctgagcatggtggcgggcacctgtagtcccagctactggggaggctgaggcaggagaatggcgtgaacctgggaggcggagcttgcagtgagctgagagatagcaccagtgcactccagcctgggcgacagagcgagactccatctcaaaaaaaaaaaaaaaaaaaaaaaaatccaggctgaactatggaattcactttgaataggtgtggaattagattgagagttttacatttttctgaaacagaaatacagtttgaccagtatttatggaccaagtactttgttgtcattgtcgatgtgcatggataaggacagcatactttatacctgcttttcctttctcttctagtgtcttgtatgcattatgcacgtgaccattcctactctttaagtgtagattcctaaaaatcagaaaatcagaagagactgtctttactaattccttctacatttcatggccagactgtacctcatttggggcgcctgtcctatgaatgggagcagcaactccctacagatattatggcaaaagacaacaggtttatttatggtagtggagctgctttctgctttttcccctgaataaacagagcttgaccctggtcctcctcagagaagtggagaaggcaattttacataacaaatttcagttagttgtgcaaatggagaagacttgctgtgatttgcctgaatccagagaagatgtgcaaagtctcagtgtttgcaccaatttcaatttaagctgctgattatctgtatgtttttataacatttagaaaaaatgaattattttaattaccaagccataggaatgcaactctgcaagctttatttaaatccacagtgcagccgtggcaatcatttctgaaataactcttctagtcttgttgcatttatttttgtattgagatttattttttattaagttcatcaaagtcacttcatagatagatgccatatatataatatatatatagcatacatttgccaccatatatatatatgagacaccatatatatatatatggtggcaaatgtatgattgaaacctttctagttgttttaaaggagtctcatttgttggccaggcacctacaaatggtggctcatgcctgtaatcccagcacttcgggagaccaaggcaggtagatcacctgaggtcagaagttcaagaccagcctggccaacatggtaaaacctcatctctactaataatacaaaaattagctgggcatggtggcgcatgcctgtaatcccagcgactccagaggctgaggcaggaaaatcactgaacccgggaggcggaggttgcagtgagccgagatcacaccattgcactccagcctgggcaacaagagcgaaactccatctcaaaaaaataaacaaataaataaaataaaaattaaaaaagagtctcatttgtcatattttgatgtgaaattcagaaatcagtacaacattatgagtcaggctgatttctttttccttgtacttttcctttttcctttcctttccttttctctcttgtcctatcctgtcttgttctatcctttcctttccccttcctcctttcctttcttcctcccttcctcacccacttatttcttctttttttttttgtttgtttgtgtttgtttttattgatgatggaagtgatcatgaatggtgagtgaaccactgaatcatcttttgcttcctatggggatctatctttcagaagtcaaacagataaattatcatcttgaaaagaaagttatttgttatttaggatttttttctctcttctcatcaattagcttttttttaaaatttgacttaaattcttcaagtatgaaacagcagaaaaaaaaagagaggcaatattctcttatagctccttgggaccatgcatggagttccatcactaagtggtgatatttctttttaactttatttcagtcatctagtttatttcagcatcatcttgtcaatgtccagatcatcagcatgtggcatgtgctgaactgagttgcttgctgcttctgcatatgtctggtaggaaacccaattttccgcatttatgcctattacccagcattctttctctcttttatttcactggaaggtaattaaaattgcttttgtcaaccagtcttcatgggactttggagttttgcataaggatctggtgttcactatgagggattctgggagctctttctttttgacaaatctaaattctagccctggcacccttttctcgataccagacatgtggataaaagtagatgtatgaga

SEQ ID NO: 721044 - DNA, 3019 bp, Homo sapiens
gtagaggttttggcctggttgtggcttgtgctatgggatgctccagcatctctgctttctgtcttgagaaaactcagtgactagcttcatcagtgatcctttgccctgcagaagtcaatcctgtcctaacctctagtgtgatctgttttaaggaactggaagaacgctactggtctgtagaagctgctgtccagtattgtgcacgttttggactccagagacagagaatgtagtagtagagaatttgcaaactaactctgactctagtaattcatatcaagactttatgagcagaaagttggtatacttgctttctacagcaccccaccccctctggtaaatttttttatgaaaagtgagactcatttctacttctacattgggtgatttacttaaatgaacctttccttcaaattgttgcactgaattcattacattaaattcaacagtttattgcacctctagtatttgcaatatgtcatggaggcagatcttggtttagagtacaatttttaatacaatttagcaagaaagacacawacttaaatttaattctgatacaaattaacactaaagttgaagcattagaattccaggctgagctggccgggcgtggtggctcacgcctgtaatcccagcactttgggaagccgaggccattggatcacaaggtcaggagatcgagaccatcctggctaacatggtgaaaccctgtctctactaaaaatacaaaaaattagctgagcatggtggcgggcacctgtagtcccagctactggggaggctgaggcaggagaatggcgtgaacctgggaggcggagcttgcagtgagctgagagatagcaccagtgcactccagcctgggcgacagagcgagactccatctcaaaaaaaaaaaaaaaaaaaaaaaaatccaggctgaactatggaattcactttgaataggtgtggaattagattgagagttttacatttttctgaaacagaaatacagtttgaccagtatttatggaccaagtactttgttgtcattgtcgatgtgcatggataaggacagcatactttatacctgcttttcctttctcttctagtgtcttgtatgcattatgcacgtgaccattcctactctttaagtgtagattcctaaaaatcagaaaatcagaagagactgtctttactaattccttctacatttcatggccagactgtacctcatttggggcgcctgtcctatgaatgggagcagcaactccctacagatattatggcaaaagacaacaggtttatttatggtagtggagctgctttctgctttttcccctgaataaacagagcttgaccctggtcctcctcagagaagtggagaaggcaattttacataacaaatttcagttagttgtgcaaatggagaagacttgctgtgatttgcctgaatccagagaagatgtgcaaagtctcagtgtttgcaccaatttcaatttaagctgctgattatctgtatgtttttataacatttagaaaaaatgaattattttaattaccaagccataggaatgcaactctgcaagctttatttaaatccacagtgcagccgtggcaatcatttctgaaataactcttctagtcttgttgcatttatttttgtattgagatttattttttattaagttcatcaaagtcacttcatagatagatgccatatatataatatatatatagcatacatttgccaccatatatatatatgagacaccatatatatatatatggtggcaaatgtatgattgaaacctttctagttgttttaaaggagtctcatttgttggccaggcacctacaaatggtggctcatgcctgtaatcccagcacttcgggagaccaaggcaggtagatcacctgaggtcagaagttcaagaccagcctggccaacatggtaaaacctcatctctactaataatacaaaaattagctgggcatggtggcgcatgcctgtaatcccagcgactccagaggctgaggcaggaaaatcactgaacccgggaggcggaggttgcagtgagccgagatcacaccattgcactccagcctgggcaacaagagcgaaactccatctcaaaaaaataaacaaataaataaaataaaaattaaaaaagagtctcatttgtcatattttgatgtgaaattcagaaatcagtacaacattatgagtcaggctgatttctttttccttgtacttttcctttttcctttcctttccttttctctcttgtcctatcctgtcttgttctatcctttcctttccccttcctcctttcctttcttcctcccttcctcacccacttatttcttctttttttttttgtttgtttgtgtttgtttttattgatgatggaagtgatcatgaatggtgagtgaaccactgaatcatcttttgcttcctatggggatctatctttcagaagtcaaacagataaattatcatcttgaaaagaaagttatttgttatttaggatttttttctctcttctcatcaattagcttttttttaaaatttgacttaaattcttcaagtatgaaacagcagaaaaaaaaagagaggcaatattctcttatagctccttgggaccatgcatggagttccatcactaagtggtgatatttctttttaactttatttcagtcatctagtttatttcagcatcatcttgtcaatgtccagatcatcagcatgtggcatgtgctgaactgagttgcttgctgcttctgcatatgtctggtaggaaacccaattttccgcatttatgcctattacccagcattctttctctcttttatttcactggaaggtaattaaaattgcttttgtcaaccagtcttcatgggactttggagttttgcataaggatctggtgttcactatgagggattctgggagctctttctttttgacaaatctaaattctagccctggcacccttttctcgataccagacatgtggataaaagtagatgtatgaga

SEQ ID NO: 721045 - DNA, 621 bp, Homo sapiens
tccttttctgccagaggggaaagtaaccatagtctctcttctgtgacagtctcatcacttcctattgtttagctgatttaggttgcttatgtttgcaagctctctgctgggttttaaaaaactatgcttatctggkctgctttggttgctaatgtaagaataatggtcactattagaatcagaagtctgatataataatatttttctgcatctgacaattacaaatttacaaatacttctgctgagaaaattacatttttttccaaaattaatgcaatatatccacagatgtaagccacagatcataagccactgaaacaagttctgagaacctaaaacagagtgattacaaattatctagacacattgtaataaaactaatgaaaaataacaaaaaatcaaaaacataaaagcaccagatgagataaagacatattcccttgaaaggaacttaaataagactaacatctgtcttctcactagcaataatggaagtcagaagttgatggaaatatatgcttaaaattctgaaagaaaataactgccaagccagaatagtatatttttttaacagaaggtaaaatatttgcatttccagacaagcaaaacagagagaatcaa

SEQ ID NO: 721046 - DNA, 1761 bp, Homo sapiens
gacatgttagcccaaaaatatggcaccttgacattggagactatagcagaagcaggaaggtcattctcaccttcccctcaaatttggtcctaaaatccaggaaggatttttctgaccttcccttgaagtgggtcataagaccctcattctagagtggcttccatattcccagaagaaagcaaaatcctatctctgaagaaacaggatacagaggagaatctgaaccaactggccctgctaagttctccccagtttatttccattagatcacactccatttttccaatcacactccatgctgcctcttcatcaaacctagcatataaactcaacttgacatgactaccagaaatagctggaaagagaaagaaagaatacgacaattacaattgcaagtaatatgacaatatgaggtcttcaatgaacagacaggatagtctcaaactcctcagtaagttttatattttattactttcatgaacatgaatgaacaacacataacacagcacagtgccttgcacaaacattcaagaggtgcctagacagactaacaggacctttcaatgcattcaattccaacatttgttaattgcccctaagcatagtaactgaaaggaatagtaagataataaatgagttctcaccacagagagcttgcaatgcattcactcactcactctacacatatttatttacatccttacatgttgaaggtaatgggaaccaaacatgaatgagtcaagaatcatgcattgaagaaactcacagtatttcagaagaatttaggacacatatacacaagcaattagaatagaaaatagaaaaagtatttcctaagaacacagaggaaacagtgtttgagagattaaagatgggtacatggaaaaattgattatcattcttcagcctgcacagtgagatatacattttgtatacgttatatgcttcaaatgtttttaaataaatataatacatgggtagaatttataaaygtagagataagaaaaaaagctggttggtaattataaacagacaaacagcataagcacaacaatctgacagtcaactccaaaatatggaattacttggcccttttttagcactcttttctttgcctctcctatgtccacaccagaactgcaatttctagattgcagtacaatggtgaatggggatcataatcttcctgctagctgaccttcattttttgaatcctgcttccttttccaagtccattgatgaggtgaatgaagtccaagaatggctacgttttcagaatttacatgggtattttaagaaaacctcattccaaaacccaaatatgtccctgctttatctttatgagactacatatttcaacaggacacagtgttcatgaagtcattctattattaaatacatgtgttctatgttatgctgaaattgataacccactacatcacctcccaaagaaggttgtgtaaacttgtcacaaaaaagagaattatttctgtaatttttccattgagaaaaccaaggctgagaaaggttgtataacttatcatattggtaataaatagaataaagattcaaaaaaaaaaagaggttctaaaactgcactgcatatttggatgcaattttggtttacggttttaattcaggaaacaatatcaagacaataggaaggatgtttaaaacctacccacatatacttacttatttgtcactttgtttgtttctaggcactaactctgcttccttacaacatttcaagtacctccc

SEQ ID NO: 721047 - DNA, 540 bp, Homo sapiens
cacaaatggtgtattttaagactttttcacttgtcattatgtttttgagatctagctgcattcgtggatatagtttactcctcctaagtgctgaatactatttgtgcaatactttattgctgtatatgtctctctaagagggtgagttgttctggggcagagatgggatgttgtttgtgtttataccctcagtttgtagatatacaaactgagttatatctcagtyaggttgttgttaggttgatctcgggaaggaatatggggtattgagtctcttcttggggacattagggaataaattaggtttggggaggacatgtgcaacggatttgcattctgcgaaataggaggaagcatcattttcagagaagggggattaggatttgagaagtgtgtcatggatttataatcctttgcttaatcagggggagattatcccaaatagatactatttctgcaagagtcagacatacactgtagtctctcttcatttgggctttatgaatgattagaactagaaaacaccaactagcttctaaa

SEQ ID NO: 721048 - DNA, 2323 bp, Homo sapiens
attgtgtatgccactgtaattccttcaggtaagtctggaactggacctgaagaatttttcaattcctcttctgaaacctcagataccagctcaataccccactcggtatattcatggattatctcttcctcttcttgtataacctcatttgggcagtgctgctacctttttcttatattctttctgcaatttctgtcatcacactgaggatttggcttcatggacgtagcaggaaaaaaatcctgcattgcattgtatccaaggtaaaactaacagtaccaaattttaacagaaactttaacatgctgtgtactaagatcccagcaaccacttccacagtggtaggaagaccagcagcacaaacaccaaagcgtgctaaaagtgcacactttggcatctaacaaccctgaggtgttagtttgattgccgcttagtagctgtgagaccttgagaagttatttagacacaaaaggcttcgtttccctacctgtacaggtacctatacctcataaccctcacagggtcatgaggatttaataaaacaatttatgaaaagtagttaagtacagtacgtggggcataaaaaaaagtttcaaaaattaggccgggcacagtagctcatgcctgtaatcccagcactttgggagggaggccaaggcgggcggaattgtggcatgcacctgtaatcctagctcctcaggaggctgaggcaggagtatcgcttgaatccgggaggtggaggttgcagtgacccaagatcacgccactgcactccagcctggtgacgacagagcgagactccgtcttaaaaaaaaaaaaaaaagattcaaaaattattaactgatattacaattagaacytcccatctatttgaacttgggtatattatcctctagaccctagtttctccttctctctgaaactagaaatactaatacataattgtaaaaataaaacatttttaagtgaatgtttttcttctaaggaatgtatttttaaaaactgatggtccaaagaaggtcctcgtttgaactctaacacttataagcattcaggagacaagaaaatgcataataatatcccaacaaaaatggcatctcttaaacagagaaagaaaaaaactcaagaattccggggattaagtccgctttgttcactattttaaaccttgttactttgtaagttacttaaacaaatgaatatcgtatgtggcagactgcctagttacctaacaactaatcttcccttcttcctcattgacagaccctatttctgggtagtggcaatttgttttaccccagatgatgaattataattggtatatgccagtataattggtataagccctttccccttttccattgtttggtcaggcatctgtgtgaaacttgctttatattattttgaccagtaatagaaagggcctgagagcttctagggtctttccttaatgagtaagaagaacaaggagaaagccctttctcgaatgctctctctctactctatatattactatgatgatacgctcttttaggagctgtcttgctaccatgaaaggaaaaacagaagagcttcagagacctggcaatctaacactgacactgctgagccagagagccaaccctgggattgcctgcctcaagacttatttagtaataaatgttcttgtgttttcgatcactgttagttgtattgttatggccaagcaaatgctcttaaaaaatattaagcatgaagtcaaaatataattctatccagtgaaagataatcttacctggaaattttgccaagtttatcactagtctataacttatctctgcatctgtaaattgaaactacacgtttgtggcactttttctcaattaggctatcagaataggactcataatcttcagattaactccatttaacaagcttgacattttatgttttgcataccaacttgtccaagacacacaacaaactatgaagataggtggcattactagcttcattttaaatgaggaaacaaaataatttaagttatgtgacctaaatagtccatttatttacgtttttaaactaatttctgacaattttgttggcccttaaatactcaaataaatgaaggaactgggatttacaaccagatcatctagcatacagtctttagcatgagatcagaaagagcaggaaaacattggtttaaagttgttggggaaggcataaagaagtaaagctttaaatgtctatagaaggatattacaagattaggaaagaaaagttagtcactctaacatatcacaaaaagtttgggcctactaagaaaatgcttaatttatgc

SEQ ID NO: 721049 - DNA, 561 bp, Homo sapiens
tttctgcttcattgttctattggttcaggggtcagcagactgacacacaagacaaatctggcctactgccttgtttttgtaaatacagatttattggaacatagccccacctatttgtttacatactgttyttgttttgattatgcaagggctgagttgaatagttggcacagagactaaagagctcacaaagcctgcaatatttactgtggcctttacagaaaaggtttgccaacccctgaattagtctcttttctaataccagacttttttttaaataaaaatatgaatatgggctgagcccagtggctcgtgcctgtaatcccagcactttgggaggccaaggtagatggattgcttgagcccaggagtttgagaccagcctgggcaacatggcaaaaccctgtctctacaaaaaatacaaaaattacccaggcgtagtagcatgtgcctgtagtcgcagctacttgggaggctgaggtgggaggattgtttcagcccgggaggttgaggctgcagtgaaccgggatcacgccagtacactccagcctgaatgacaga

SEQ ID NO: 721050 - DNA, 2373 bp, Homo sapiens
agacggtcttcaggagtttttcatgatacctttaacaccagtaccattcctcttcccttgttcctgttgaagtccagctagtactttaaaattgtgctcaaattcatcttaaaataatcatttccagaattttccactgaaattaatctttctcatctcattctaactttacatttttaaattatttttattacataactaacacatgtatctctgattttttttgatacaactttaagaaacatttaaataggccggatgcggtggctcacgcctgtaatcccagcactttgggaggccaaggcgggaggatcatgaggttaggagattgagaccatcctagctaacacggtgaaaccccgtctctactaaaaatacaaaaaaattagccgggcgtggtggtgggcacctgtagtcccagctactcgggaggctgaggcaggagaatagcctgaacctgggaggcagagcttgcagtgataatgccactgcactccagcctgggtgacagagcaagactcggtctcaaaaaaaaaaaaacacatttaaatatgttacatggactgtaccatctttacctaaaataaaattaaaggtttttccaaccccactggaaacaaggaaaaaaaataaaggtttatgcaactctataatgctcatggggtttatctgatttcaggccagatctaggtgttcaaacagtgtcattactagtcttttatatcccttacatgcttatagagtataataatgtttttttaaactacagattgtgacccattagtgggtaataaaatcaagttagttacaagcaacattttttttctttctttctttctttcttttcttttttttttttttgtttgctggatcttgctctgttgcccaattagagctaactgctgtatctgattcctgggctcaagcagccctcccacctcagcctcttgagtaactgggactacaggtgtgtgccactgtgccccactaacttaatttttttgttgttgttgttaagatggggtctcagtttgttgctcaggctcgtcttgaactcttggcttcaagtgatcctctcagcttgaccccctaaggtgtgtggattacaggcatgagccaccatgcccagccataaggaacatttttaaagattaaatagaatagaaaatgacagagttcatgacaagtaagtagtaagagtgaatatggtctcatgacacatttcttttataatatactgaattatcatataagccatatatattattgtgggttatagtgagaattgtgtaaaaaccatagcatagagttttttgtatgtgctagatgcatagttgttaaattgaatagaatgatgttttaactggatttattatacttaatatacaaaattttagggatgaatgtatcatgcaaagataatctgcatgggtttgttaataacatttgtaagaacaaattaaaacacatcccacatctttgcctagaaaaattatagcaatgtatcatgataattttcaaaatgttttcaaataatgaataaaatccactatgacagtgtattctgtaatagataaatttaacactgcagatttgtgcattgcttaaaartctacattttggtataaatatagaaataattatataattttgtaggtatattaatagaaataaagtacccaaataccaaattttatatagcaaaaaaagcctgaactgtgatttatctctctcctcttgtttagttttatttgcattcttcgtatttgacattaggattaacatttctttttcaaagacatttttcagggaaaaatagtctgtatatacccctcaataattactaaaatagaattaaagacgtaactggaggaggaatgaaacactctagtagtcaaatctcctgtaacttgccagtgtttctttaggggagccttcatcatatattcattcatctcaagagtcagaggtcttggttatcatcaaaggttgccttttgaacatttatacaatattagcaaaaatcattaaaaaatgtcgacaaagctaattttagataccaaaaaaggaaattttattatatataattgtttttcaaagtaacttttaaccctgatagcttttaaattgccaagtaaagaacataatttataatgctatatggttctagaaagctgtggcaaataactttcatttctaacctacttactacaatagtttatgaaaaaatttgcaattatagcaagtagactttttgtgtgtttcagaaaaaggcacataatttaatgaatggtagatattattatgtgattagatctttttttctttaagaaaagctcattaaatacaaagctgcttagttatatcaacatt

SEQ ID NO: 721051 - DNA, 2373 bp, Homo sapiens
agacggtcttcaggagtttttcatgatacctttaacaccagtaccattcctcttcccttgttcctgttgaagtccagctagtactttaaaattgtgctcaaattcatcttaaaataatcatttccagaattttccactgaaattaatctttctcatctcattctaactttacatttttaaattatttttattacataactaacacatgtatctctgattttttttgatacaactttaagaaacatttaaataggccggatgcggtggctcacgcctgtaatcccagcactttgggaggccaaggcgggaggatcatgaggttaggagattgagaccatcctagctaacacggtgaaaccccgtctctactaaaaatacaaaaaaattagccgggcgtggtggtgggcacctgtagtcccagctactcgggaggctgaggcaggagaatagcctgaacctgggaggcagagcttgcagtgataatgccactgcactccagcctgggtgacagagcaagactcggtctcaaaaaaaaaaaaacacatttaaatatgttacatggactgtaccatctttacctaaaataaaattaaaggtttttccaaccccactggaaacaaggaaaaaaaataaaggtttatgcaactctataatgctcatggggtttatctgatttcaggccagatctaggtgttcaaacagtgtcattactagtcttttatatcccttacatgcttatagagtataataatgtttttttaaactacagattgtgacccattagtgggtaataaaatcaagttagttacaagcaacattttttttctttctttctttctttcttttcttttttttttttttgtttgctggatcttgctctgttgcccaattagagctaactgctgtatctgattcctgggctcaagcagccctcccacctcagcctcttgagtaactgggactacaggtgtgtgccactgtgccccactaacttaatttttttgttgttgttgttaagatggggtctcagtttgttgctcaggctcgtcttgaactcttggcttcaagtgatcctctcagcttgaccccctaaggtgtgtggattacaggcatgagccaccatgcccagccataaggaacatttttaaagattaaatagaatagaaaatgacagagttcatgacaagtaagtagtaagagtgaatatggtctcatgacacatttcttttataatatactgaattatcatataagccatatatattattgtgggttatagtgagaattgtgtaaaaaccatagcatagagttttttgtatgtgctagatgcatagttgttaaattgaatagaatgatgttttaactggatttattatacttaatatacaaaattttagggatgaatgtatcatgcaaagataatctgcatgggtttgttaayaacatttgtaagaacaaattaaaacacatcccacatctttgcctagaaaaattatagcaatgtatcatgataattttcaaaatgttttcaaataatgaataaaatccactatgacagtgtattctgtaatagataaatttaacactgcagatttgtgcattgcttaaaagtctacattttggtataaatatagaaataattatataattttgtaggtatattaatagaaataaagtacccaaataccaaattttatatagcaaaaaaagcctgaactgtgatttatctctctcctcttgtttagttttatttgcattcttcgtatttgacattaggattaacatttctttttcaaagacatttttcagggaaaaatagtctgtatatacccctcaataattactaaaatagaattaaagacgtaactggaggaggaatgaaacactctagtagtcaaatctcctgtaacttgccagtgtttctttaggggagccttcatcatatattcattcatctcaagagtcagaggtcttggttatcatcaaaggttgccttttgaacatttatacaatattagcaaaaatcattaaaaaatgtcgacaaagctaattttagataccaaaaaaggaaattttattatatataattgtttttcaaagtaacttttaaccctgatagcttttaaattgccaagtaaagaacataatttataatgctatatggttctagaaagctgtggcaaataactttcatttctaacctacttactacaatagtttatgaaaaaatttgcaattatagcaagtagactttttgtgtgtttcagaaaaaggcacataatttaatgaatggtagatattattatgtgattagatctttttttctttaagaaaagctcattaaatacaaagctgcttagttatatcaacatt

SEQ ID NO: 721052 - DNA, 2373 bp, Homo sapiens
agacggtcttcaggagtttttcatgatacctttaacaccagtaccattcctcttcccttgttcctgttgaagtccagctagtactttaaaattgtgctcaaattcatcttaaaataatcatttccagaattttccactgaaattaatctttctcatctcattctaactttacatttttaaattatttttattacataactaacacatgtatctctgattttttttgatacaactttaagaaacatttaaataggccggatgcggtggctcacgcctgtaatcccagcactttgggaggccaaggcgggaggatcatgaggttaggagattgagaccatcctagctaacacggtgaaaccccgtctctactaaaaatacaaaaaaattagccgggcgtggtggtgggcacctgtagtcccagctactcgggaggctgaggcaggagaatagcctgaacctgggaggcagagcttgcagtgataatgccactgcactccagcctgggtgacagagcaagactcggtctcaaaaaaaaaaaaacacatttaaatatgttacatggactgtaccatctttacctaaaataaaattaaaggtttttccaaccccactggaaacaaggaaaaaaaataaaggtttatgcaactctataatgctcatggggtttatctgatttcaggccagatctaggtgttcaaacagtgtcattactagtcttttatatcccttacatgcttatagagtataataatgtttttttaaactacagattgtgacccattagtgggtaataaaatcaagttagttacaagcaacattttttttctttctttctttctttcttttcttttttttttttttgtttgctggatcttgctctgttgcccaattagagctaactgctgtatctgattcctgggctcaagcagccctcccacctcagcctcttgagtaactgggactacaggtgtgtgccactgtgccccactaacttaatttttttgttgttgttgttaagatggggtctcagtttgttgctcaggctcgtcttgaactcttggcttcaagtgatcctctcagcttgaccccctaaggtgtgtggattacaggcatgagccaccatgcccagccataaggaacatttttaaagattaaatagaatagaaaatgacagagttcatgacaagtaagtagtaagagtgaatatggtctcatgacacatttcttttataatatactgaattatcatataagccatatatattattgtgggttatagtgagaattgtgtaaaaaccatagcatagagttttttgtatgtgctagatgcatagttgttaaattgaatagaatgatgttttaactggatttattatacttaatatacaaaattttagggatgaatgtatcatgcaaagataatctgcatgggtttgttaataacatttgtaagarcaaattaaaacacatcccacatctttgcctagaaaaattatagcaatgtatcatgataattttcaaaatgttttcaaataatgaataaaatccactatgacagtgtattctgtaatagataaatttaacactgcagatttgtgcattgcttaaaagtctacattttggtataaatatagaaataattatataattttgtaggtatattaatagaaataaagtacccaaataccaaattttatatagcaaaaaaagcctgaactgtgatttatctctctcctcttgtttagttttatttgcattcttcgtatttgacattaggattaacatttctttttcaaagacatttttcagggaaaaatagtctgtatatacccctcaataattactaaaatagaattaaagacgtaactggaggaggaatgaaacactctagtagtcaaatctcctgtaacttgccagtgtttctttaggggagccttcatcatatattcattcatctcaagagtcagaggtcttggttatcatcaaaggttgccttttgaacatttatacaatattagcaaaaatcattaaaaaatgtcgacaaagctaattttagataccaaaaaaggaaattttattatatataattgtttttcaaagtaacttttaaccctgatagcttttaaattgccaagtaaagaacataatttataatgctatatggttctagaaagctgtggcaaataactttcatttctaacctacttactacaatagtttatgaaaaaatttgcaattatagcaagtagactttttgtgtgtttcagaaaaaggcacataatttaatgaatggtagatattattatgtgattagatctttttttctttaagaaaagctcattaaatacaaagctgcttagttatatcaacatt

SEQ ID NO: 721053 - DNA, 2373 bp, Homo sapiens
agacggtcttcaggagtttttcatgatacctttaacaccagtaccattcctcttcccttgttcctgttgaagtccagctagtactttaaaattgtgctcaaattcatcttaaaataatcatttccagaattttccactgaaattaatctttctcatctcattctaactttacatttttaaattatttttattacataactaacacatgtatctctgattttttttgatacaactttaagaaacatttaaataggccggatgcggtggctcacgcctgtaatcccagcactttgggaggccaaggcgggaggatcatgaggttaggagattgagaccatcctagctaacacggtgaaaccccgtctctactaaaaatacaaaaaaattagccgggcgtggtggtgggcacctgtagtcccagctactcgggaggctgaggcaggagaatagcctgaacctgggaggcagagcttgcagtgataatgccactgcactccagcctgggtgacagagcaagactcggtctcaaaaaaaaaaaaacacatttaaatatgttacatggactgtaccatctttacctaaaataaaattaaaggtttttccaaccccactggaaacaaggaaaaaaaataaaggtttatgcaactctataatgctcatggggtttatctgatttcaggccagatctaggtgttcaaacagtgtcattactagtcttttatatcccttacatgcttatagagtataataatgtttttttaaactacagattgtgacccattagtgggtaataaaatcaagttagttacaagcaacattttttttctttctttctttctttcttttcttttttttttttttgtttgctggatcttgctctgttgcccaattagagctaactgctgtatctgattcctgggctcaagcagccctcccacctcagcctcttgagtaactgggactacaggtgtgtgccactgtgccccactaacttaatttttttgttgttgttgttaagatggggtctcagtttgttgctcaggctcgtcttgaactcttggcttcaagtgatcctctcagcttgaccccctaaggtgtgtggattacaggcatgagccaccatgcccagccataaggaacatttttaaagattaaatagaatagaaaatgacagagttcatgacaagtaagtagtaagagtgaatatggtctcatgacacatttcttttataatatactgaattatcatataagccatatatattattgtgggttatagtgagaattgtgtaaaaaccatagcatagagttttttgtatgtgctagatgcatagttgttaaattgaatagaatgatgttttaactggatttattatacttaatatacaaaattttagggatgaatgtatcatgcaaagataatctgcatgggtttgttaataacatttgtaagaacaaattaaaacacatcccacatctttgcctagaaaaattatagcaatgtatcatgataattttcaaaatgttttcaaataatgaataaaatccactatgacrgtgtattctgtaatagataaatttaacactgcagatttgtgcattgcttaaaagtctacattttggtataaatatagaaataattatataattttgtaggtatattaatagaaataaagtacccaaataccaaattttatatagcaaaaaaagcctgaactgtgatttatctctctcctcttgtttagttttatttgcattcttcgtatttgacattaggattaacatttctttttcaaagacatttttcagggaaaaatagtctgtatatacccctcaataattactaaaatagaattaaagacgtaactggaggaggaatgaaacactctagtagtcaaatctcctgtaacttgccagtgtttctttaggggagccttcatcatatattcattcatctcaagagtcagaggtcttggttatcatcaaaggttgccttttgaacatttatacaatattagcaaaaatcattaaaaaatgtcgacaaagctaattttagataccaaaaaaggaaattttattatatataattgtttttcaaagtaacttttaaccctgatagcttttaaattgccaagtaaagaacataatttataatgctatatggttctagaaagctgtggcaaataactttcatttctaacctacttactacaatagtttatgaaaaaatttgcaattatagcaagtagactttttgtgtgtttcagaaaaaggcacataatttaatgaatggtagatattattatgtgattagatctttttttctttaagaaaagctcattaaatacaaagctgcttagttatatcaacatt

SEQ ID NO: 721054 - DNA, 649 bp, Homo sapiens
ttttcaaggctcctcatttacaacacagactccttatgtgtagggttttatcctgccagctctcagggtatttctcttggggyaagacttggcacagaagggagccatgtagttattctttgctgtatgtaagtaataacaatccgttctattctggaaatctgtgtgtatattcagaaaaatagtaataaatatagatagtaagaacttaaagataatattgtaatgatgttaattctccctaaattgacctataaattcagtgcatttttttccccctgagatagggtcttgctctgttgatcaggctggagtgcagtgacatgatcatggctcactgcagcctcaatctaccaggctcaagtgaacctcctgcctcagcatcctgagcagctgggatgacaggtgtgcaccacccagctaacttttttattttttgtagagactgggtctcattctgttgttgcctaggctggtctcaaactcctggactcaagtgatcctcctgcctcagcctctcaaaagtgccaggattacaagcataagtcaccatgcccagctgattaaatgcagttttaatcaaaattccatcttcacagttttcaaaaaatagttgagatacagacctaaaaatttaaaactttaagat

SEQ ID NO: 721055 - DNA, 649 bp, Homo sapiens
ttttcaaggctcctcatttacaacacagactccttatgtgtagggttttatcctgccagctctcagggtatttctcttggggcaagacttggcacagaagggagccatgtagttattctttgctgtatgtaagtaataacaatccgttctattctggaaatctgtgtgtatattcagaaaaatagtaataaatatagatagtaagaacttaaagayaatattgtaatgatgttaattctccctaaattgacctataaattcagtgcatttttttccccctgagatagggtcttgctctgttgatcaggctggagtgcagtgacatgatcatggctcactgcagcctcaatctaccaggctcaagtgaacctcctgcctcagcatcctgagcagctgggatgacaggtgtgcaccacccagctaacttttttattttttgtagagactgggtctcattctgttgttgcctaggctggtctcaaactcctggactcaagtgatcctcctgcctcagcctctcaaaagtgccaggattacaagcataagtcaccatgcccagctgattaaatgcagttttaatcaaaattccatcttcacagttttcaaaaaatagttgagatacagacctaaaaatttaaaactttaagat

SEQ ID NO: 721056 - DNA, 988 bp, Homo sapiens
atgaaaggtgtccaaattggaaagaaaaaagtcaaattatccttgtttgragatgatatggtcttatattttggaaaacctaaagactccacacacacacacacaaaaacttattcaaactgatgaacaaattcagtaaagttgcaggatacaaaatcaacatacaaaaatcagtagcatttctctatgccaacagtgaacaatctgaaaaagaaatgaaaaaagtaatcccatttacaatagccacaaataaaattaaatacctaggatttaaatcagccaaagaagtaaaagatgtctacagtgaaaactatagaacacaaatgctatggtcaaatggcataagaataaaatgctattatttatttgtcccctacaaaaaaatgtaaaaattcatcaagttatctatgtgtattttttaattgaagtatataaacatacatgtgaggtatgcacacacacacacatacatcaatatactgatgaaacactgatgaaagaaactgaagaggacacaaaaaactgaaaaaatattcaatgtacatgggttagaagaatcaatactgttaaaatatccatattgcccaaagcaatctacagattcaatgcaatccctgtcaaagtattaatgacattctttcacagaaatagaaaaaataatcttaaaatttatatggaattacaaaagacccagaatagccaaagctatcccaagcaaaaagaacaaaactggaagaatcatattacctgacttcaaatgatactacagagctacagtaaccaaactagcatggtactgacataaaaacagacacatagattaatgaaacagaataaagaacccagaaggaaatccacatacatacagggaactaattttcaacaacggtgccaagaatgttagggaaaagacagtctcttcaataaatggtgctgggaaaactggataaccatatgcagaagaaggaaatttgatccctatctctca

SEQ ID NO: 721057 - DNA, 988 bp, Homo sapiens
atgaaaggtgtccaaattggaaagaaaaaagtcaaattatccttgtttggagatgatatggtcttatattttggaaaacctaaagactccacacacacacacamaaaaacttattcaaactgatgaacaaattcagtaaagttgcaggatacaaaatcaacatacaaaaatcagtagcatttctctatgccaacagtgaacaatctgaaaaagaaatgaaaaaagtaatcccatttacaatagccacaaataaaattaaatacctaggatttaaatcagccaaagaagtaaaagatgtctacagtgaaaactatagaacacaaatgctatggtcaaatggcataagaataaaatgctattatttatttgtcccctacaaaaaaatgtaaaaattcatcaagttatctatgtgtattttttaattgaagtatataaacatacatgtgaggtatgcacacacacacacatacatcaatatactgatgaaacactgatgaaagaaactgaagaggacacaaaaaactgaaaaaatattcaatgtacatgggttagaagaatcaatactgttaaaatatccatattgcccaaagcaatctacagattcaatgcaatccctgtcaaagtattaatgacattctttcacagaaatagaaaaaataatcttaaaatttatatggaattacaaaagacccagaatagccaaagctatcccaagcaaaaagaacaaaactggaagaatcatattacctgacttcaaatgatactacagagctacagtaaccaaactagcatggtactgacataaaaacagacacatagattaatgaaacagaataaagaacccagaaggaaatccacatacatacagggaactaattttcaacaacggtgccaagaatgttagggaaaagacagtctcttcaataaatggtgctgggaaaactggataaccatatgcagaagaaggaaatttgatccctatctctca

SEQ ID NO: 721058 - DNA, 988 bp, Homo sapiens
atgaaaggtgtccaaattggaaagaaaaaagtcaaattatccttgtttggagatgatatggtcttatattttggaaaacctaaagactccacacacacacacacaaaaacttattcaaactgatgaacaaattcagtaaagttgcaggatacaaaatcaacatacaaaaatcagtagcatttctctatgccaacagtgaacaatctgaaaaagaaatgaaaaaagtaatcccatttacaatagccacaaataaaattaaatacctaggatttaaatcagccaaagaagtaaaagatgtctacagtgaaaactayagaacacaaatgctatggtcaaatggcataagaataaaatgctattatttatttgtcccctacaaaaaaatgtaaaaattcatcaagttatctatgtgtattttttaattgaagtatataaacatacatgtgaggtatgcacacacacacacatacatcaatatactgatgaaacactgatgaaagaaactgaagaggacacaaaaaactgaaaaaatattcaatgtacatgggttagaagaatcaatactgttaaaatatccatattgcccaaagcaatctacagattcaatgcaatccctgtcaaagtattaatgacattctttcacagaaatagaaaaaataatcttaaaatttatatggaattacaaaagacccagaatagccaaagctatcccaagcaaaaagaacaaaactggaagaatcatattacctgacttcaaatgatactacagagctacagtaaccaaactagcatggtactgacataaaaacagacacatagattaatgaaacagaataaagaacccagaaggaaatccacatacatacagggaactaattttcaacaacggtgccaagaatgttagggaaaagacagtctcttcaataaatggtgctgggaaaactggataaccatatgcagaagaaggaaatttgatccctatctctca

SEQ ID NO: 721059 - DNA, 252 bp, Homo sapiens
ttttctattttaactaaatattttagctaaattgttgaaccatggttacctgtagctgggcctcaactttcagacataaaatttggaaggccagcatttctgcatatgtatattaacatgcctaacyctccatttgtaaaccagattcagttcttcgtatagcatctgactgacataccaggcttttgagttatcacatggtgatgttcctactaggagaaaaaggagctatgtagttgattcattggcaga

SEQ ID NO: 721060 - DNA, 622 bp, Homo sapiens
tggctaatttttgtatttttagtagagacgagatttcaccatgttagccaggctggtcttgaactcctgacctcaagtgatctgcccacctctacctcacagggtgctaggattacaggcatgagccactgcacccagccaaaagtgatttcataaaaattgttaaaaatctgtagctgctttgttaccttcattaactctttgtgattaaagttgcaagtttattgcagtaatgggaatgtgttagattaatgtttaggtgagttatattttaaaatctgtgtagtatatttatagttcacccagtaattagaacaccgtatcttaattccttattgttcctctagtgtgtcacaggaggtagagtttattgatgctgggattgcggatgtgaaaataacattctcagggtatcttatgacttaaaaggccgattttttaaccagtgatattttctgtgattgtctataatttggtttaaatttatacttaataagggccagaatacatggctatattcttagyatcctttagaacattatttcttagtcaaagtttatgaggcatctagcaacattttacatgatatataaaattggaggtaaattgctttttcttggga

SEQ ID NO: 721061 - DNA, 854 bp, Homo sapiens
gattacaaaatcctgtgctatattttagtggcatgttatccatgtcacatacttaggaacttaagagctttattctttcacatgttagatgtttctctctaaaaggaatcgcaacaatttaagaaaagaaatccttgcacctcatctagtattccaaacagagaatacataaaaacacttgaaatacctgctctcctgtcttgcaaatgagcagtacaggctcatgtattttactttatttcaagcattaatctccttattctgtttttactattsaaatccatttaacatgtactctgatcttctctcctgagtcccatattaaggcttcacaatgatacaataccgggtcccctcctcagaaattcatagcacagtggagagagcagccacacatatagactcaagagtacaaaggctcaaaacaagtgcacaagaaatgtttttctgatctctaaagatgtgttgtccaatagggtagcctctagacacatgtggctatttaaattctgaatttaaatcctaatcacactagcaatatttcaagtgctcaacagccacatgtggtaagtagcttctgtaatgaacaagacagacatagaccatttttgtcattgtagaaagttctatcaggcttctgttcaaatgcgctaaacttctacttagccctgcagagggactgcaggtgatatcagtggctctaacattcttttgggtgtttctttcatattattgtattaggccattcttgcattgctataaagaaatgcctgaggcttgatgatttataaagaaaagaggttaattggctcgcagttctgcaggttgtacaggaggtatggcgccagcatctc

SEQ ID NO: 721062 - DNA, 645 bp, Homo sapiens
ttgccctatcttgtttatactatttaccaaaaaaggctaaatgttattaactcattatttctattcaaaaagcatttgataaatagcagaaattcagtcaagtacttactactttacaaaaagctcaggtaaataaatataaatggaaaactgagaaactaggttccactataagcagagtcttcaccagctatgggtagctctaatggaacagtaaaatcttctaatggatttaaatacgatctgatgtgcgacattagtaatttaatttggagggacatttatttctagcaaaagtgatcaggcaagtcccttctacaccctaaaacccatttcttttttgcccccaattttaaacctgcctcactattaaagcttcaagacaaactctacaatcattttatcaagctccaaacaagctgcagaagtactraaattgtttttaaattataaatcaatttgggaagaagtgacattgataatattccagtttctcacctagagaaaatggcatttcgcttcatttaaatctctttttctttattttgaaacagggtctcgctctgtcatccaggctggagtacagcggcacaaatgtggctcactgtagtcttgacctcctgggctcaagtagtcctcccacct

SEQ ID NO: 721063 - DNA, 1585 bp, Homo sapiens
caagcgattctcctgcctcaacctgctgagttgctgggattacaggcatgcgccaccactgggggtaattttgtatttttagtagagatgaggtttctccatgtttgtcaggctgggcttgaactctcaacctcaggtgatccacccgcctcagcctcccaaagtactgggattacagatgtgagccaccacacccggcctactctgttaatttaaacaactattaaatgagacaatacactgcaaagcacttagaaaagtgcctgacacaggaataagttttcttttttctttttttattttatttatttttttattatactttaagttttcaataaatgcgaatgtttgttattacataaatttaaaaaaaaaaaatagccacctggctccattcttggccacaaactctgaagaggtggagttaaagtgtgtgaggtatgtcggataacctcccatgcaagtcactaccacagctgacatcccggagccagagaacttgatgaatgtcttcaatggtcacagctgaaaagggaactaactccaggtccccaggctgacttgccctccgagcctggagggcaaactctgctaattaactctctttgcttgggttcgcctctgtcatcttcacccctgtgccaacaggctatctccacagatagcctgctctcgtgtgccctctactggagggctgtggttccagagttgctccagcctcggactcggctccccgcagacggaatgtcctcctccagggagaggctcgagtcaagtgctaatgtgttgtcaacctctgactccagagaagcggattatatgatttaatgatagttccgcctcagaaaagattttgaaacgtgtagctcaaaacagtaaaatttcacagtgattatctgaaactgaagtagtccaaaccgctgacggtgtaacctgagcaacttgttttaactcctctgaggctgtttcctcatctgtacggtgggaatagcagtacttacctaaccaggctgaggattaaatgaattagtatctgtaaagtgcttagaatggtacatagcacagagcagtgttcttaaatatttcttgaaaaaaattaataaaggagaagcctaccttaaaccttcagagaaaatctgaagtcgaaatttttaaaagctaaattttagaatcaattgcattttaaagtcatcatgaaacatgaggttgctgctacacagtcacttgtgctggattatataacaggtgaaaacttattctcttgggaatttccagaactmtgtggcacagccaaaatacaccgaccttgaatacattgttctggaacaaagtggatgtactgaacactgaattgatgttactacttcgtaccaagcacacagcactgaatgctctcacgctcaattatctgacagtgatgctagtaagaataaaacataatttttaatcttatttaaaatgtattatgcactcccagagtacttacaagaaactactcttctgcttttcatggatatctattcataagaagaaagacagctggttttggggctggtggtgggtttttccattgttttcaaaagac

SEQ ID NO: 721064 - DNA, 1706 bp, Homo sapiens
acaaagtgaaacaattattcacaatttatcccaaagctggaaacatttttgaagaggataaagatactgacaaataatacggaactctttcaactttaggtttcaaaattaataaagagctatttcactgtagttatttacttcggtggctaacatctcccartatcttattattttcaacttatttttaagatgaatatatcttataccaccaaatgctttacctttggttattctgagctcctcaaggagaataccctaacatcattcttccccatgccaggctatcccacgtacctttcccaaacaattcccaaacaacatggatgtggtatctgtgtgtcctcacaacttcattactgcacagaaatagtacctcaccaccaaaaaatcatgttcattggaactgttctcagaaaaaactccaatcataaggcaatgttttataatgagagtttatggatcagatattctgactaaattcaccaaaatgatttcagaaggaaaattactattatcttacagctgctattgtttcctctaaacttatactatgtcagacagaaaatccgactgcttgaaagaaggacccataaacggcaaggagacagggtatacactaatgacaacaaagctatgacaaaagtgaagtggcttccacatacacagtgtttcactatggcccaggccctgctgtaaactcctcacagggattagctcatttaaacctcacagcacaacaatccctcactattaatgccatcttacagagagtgaaacagaggcatgagtctcaaaaatggcagcacaaggataaaatcccatctggctgctgagtggatgttttggtccttatcctatctcagagaatgcattcaaacctaaaactatgccaggagtctaaatttaactcaaacaagctgaagaaaaccaaaacgtctcagatatcacaaagcagtgcatttattgcataatgttgcacaacaaggaaagtttctagaaagctgcccgaacttacatggttactaccaacatccaagcaaaagaaagtcccaaaggacaaagaacgtgtcccacatgtacacgatctggttcatctattcatatatccaggatgcagcctgtgctcagcgccctacttacaggaatctgagctttacgattagtatgattttagctgctaaaaatgtgacacctacctctaagtcatttggatttataaaaatcccaccatgctacaatcaagaaagcatttcactgagcaactgtaagccaggtacagggcgtgagctgaagaatgtcccaggtgagtgaggccgttctaatttcaacacctaaagaacaggtcacatcagacgttataaattctccaattttcttttcttttttttcttttgagacggggtttcaccatgttgcccaggttggtcttgaactcctgacctcaagtgatctatccacctcggcctcccaacgtgctgggattacaggtgtgagccaccgcgcctgaccaattctccaattttcatgacattaatgatcacgttaggcttagggtcagctgtgccctaaagctctcacatcaatgttttatggatgtatgggcctaacactggtatacagatacccttggctatatccctcttactaatgccagagaacgggtgtttcttgccacagtgccactcctggctgtccagcacatg

SEQ ID NO: 721065 - DNA, 660 bp, Homo sapiens
ggctgaggcaggagaatctcttgaacccgggaggcagaggttgtggtgagccgagatcacaccattgcactccagcctgggcaacaagagcgaaactccacccaccacccccccaaaaaaaaaattatctgggcatagtggcgcaaacttgtagtcccagcttcttgggaggctgaggcgtgagaatcgcttgaacctgggtggtggaggttgtgaggagtcaagatggcaccactgcagtccagtctgagcaagagagacagactctgggtcaaaaaataaataaatacataaaataaatcgcatgggacgaaaggtttcatcggtagaaaagcatataaaagggaaatctgttattatttatatattgtaatcaccaacagaaacgcgtcttctaacggcatatttccttgcattttggttctcatatttttgtaaaaaacaaagaaatgaaaacaaagtgcccttatggtactgttctgaactagaagatttgaatttcagggccgctaggagagtttcctctgccccccttttaaaaaatgtctkcaggcctaacaaatgataacatctattgttatgaatttgttttccttccacagtgtgaccttggagatacctcatcatatcacacaaaggtgagctttttagaaacctgtc

SEQ ID NO: 721066 - DNA, 660 bp, Homo sapiens
ggctgaggcaggagaatctcttgaacccgggaggcagaggttgtggtgagccgagatcacaccattgcactccagcctgggcaacaagagcgaaactccacccaccacccccccaaaaaaaaaattatctgggcatagtggcgcaaacttgtagtcccagcttcttgggaggctgaggcgtgagaatcgcttgaacctgggtggtggaggttgtgaggagtcaagatggcaccactgcagtccagtctgagcaagagagacagactctgggtcaaaaaataaataaatacataaaataaatcgcatgggacgaaaggtttcatcggtagaaaagcatataaaagggaaatctgttattatttatatattgtaatcaccaacagaaacgcgtcttctaacggcatatttccttgcattttggttctcatatttttgtaaaaaacaaagaaatgaaaacaaagtgcccttatggtactgttctgaactagaagatttgaatttcagggccgctaggagagtttcctctgccccccttttaaaaaatgtctgcaggcctaacaaatgataacatctattgttatgaatttkttttccttccacagtgtgaccttggagatacctcatcatatcacacaaaggtgagctttttagaaacctgtc

SEQ ID NO: 721067 - DNA, 743 bp, Homo sapiens
ctcattaactttccacttattcagaatattagagacatgtcaagatttaacaacattaatttttattgcttcatcaaagacgttcttaagaaattcaggctatgttttttacctgtaggggacagtgaagaatagaatgactactaatgtaattggtaccactgccttgatttatgctgagaaaccagccattgtacctacttttgcttttatacaatcatggcaagtgtcaacgaaaaagcaggcaatgactttgtattactttcacaaatttttaaaatttttcatcagstttctcaggtttaattagtatgattcagaacagtgttggccaggcacagtggctcaggcctgtaatcccagcactttgggaggccgaggcaagtggatcgcctgaggttaggagttcaagaccagcctggccaacatggtgaaaccacatctctactaaaaatacaaaacttagccaggagtggtggcaggtgcctgtaatccctgctacttgggaggctggggtaggagaatcacttgaacctgggaggcgaaggttgccatgagccgagatcgcaccattgcactccagcctgggcaacaagagtaaaacttggtttcaaaaaaaaaaaaaaaaaaaaaaaaaaagaacagttatgacctcttaggccttctggaaggggtcttcgggatcccgagaggtccacagagcacatttggagaaccactggtttatacacaggcacaatgca

SEQ ID NO: 721068 - DNA, 633 bp, Homo sapiens
acagcatgcaaaaggtcacttacacatagtattaagtcccattgttaactgctcactatacatttgttaagtaaaaagctgtcttcgtatttaaaaggtttcattagtactttataaactcaaggctttcaaataccaccacccttaacaaacacttactgaaagagtaaatagcttcttgctaatacagcatatatccaaaagagataactgaggagaacagcaaatcttccyatatgcttgttgctttttatcattatcaatatccacacaacaccagcctagcaaaaccctgacaggatgatgtcctcaatgatgtacagcaggagagaaaacccattctccagcaaggacaaataacccacagggaagggggagcacaaaggcataaagggcagctttctgtcgtctgaaaggcgatttgttttagaggaacaggaggattttattgttcacctgatgtctttcattaagaacaggaaactacacttctctgaatggttcaactccccattactccatggagtgctgcgggggccctacccaggggcaggtgagaagagtaacacccagagtaggtgggaaagagccagatagggccaaaggcaggagagctagggaaacagagcaaag

SEQ ID NO: 721069 - DNA, 633 bp, Homo sapiens
acagcatgcaaaaggtcacttacacatagtattaagtcccattgttaactgctcactatacatttgttaagtaaaaagctgtcttcgtatttaaaaggtttcattagtactttataaactcaaggctttcaaataccaccacccttaacaaacacttactgaaagagtaaatagcttcttgctaatacagcatatatccaaaagagataactgaggagaacagcaaatcttcctatatgcttgttgctttttatcattatcaatatccacacaacaccagcctagcaaaaccctgacaggatgatgtcctcaatgatgtacagcaggagagaaaacccattctccagcaaggacaaataacccacagggaakggggagcacaaaggcataaagggcagctttctgtcgtctgaaaggcgatttgttttagaggaacaggaggattttattgttcacctgatgtctttcattaagaacaggaaactacacttctctgaatggttcaactccccattactccatggagtgctgcgggggccctacccaggggcaggtgagaagagtaacacccagagtaggtgggaaagagccagatagggccaaaggcaggagagctagggaaacagagcaaag

SEQ ID NO: 721070 - DNA, 633 bp, Homo sapiens
acagcatgcaaaaggtcacttacacatagtattaagtcccattgttaactgctcactatacatttgttaagtaaaaagctgtcttcgtatttaaaaggtttcattagtactttataaactcaaggctttcaaataccaccacccttaacaaacacttactgaaagagtaaatagcttcttgctaatacagcatatatccaaaagagataactgaggagaacagcaaatcttcctatatgcttgttgctttttatcattatcaatatccacacaacaccagcctagcaaaaccctgacaggatgatgtcctcaatgatgtacagcaggagagaaaacccattctccagcaaggacaaataacccacagggaagggggagcacaaaggcataaagggcagcttyctgtcgtctgaaaggcgatttgttttagaggaacaggaggattttattgttcacctgatgtctttcattaagaacaggaaactacacttctctgaatggttcaactccccattactccatggagtgctgcgggggccctacccaggggcaggtgagaagagtaacacccagagtaggtgggaaagagccagatagggccaaaggcaggagagctagggaaacagagcaaag

SEQ ID NO: 721071 - DNA, 755 bp, Homo sapiens
ggtgggagaatggcgtgaacctgggaggcggagcttgcagtgagccgagatcgcaccactgcactccagcctggacgacagagcaagattctgtctcgaaaagaaaaaagaaaaaagaaaactgacagccaatgaagttaaggaaattgactaagtttctacagctaacaagagacaagagtcaaaattagaatctaaatgaactggctctgatccctgactactcagctatgctgcctcttccactcagagtgaggacagttatcgtgtcctttgcaaaatgctggagacttcacgaagtaatgagattcacccaagatcatgcagccagagagkgatggaaccaagacccaaggcagacctttggattccaaagtcctgccttttatgtcacactccattggctcacttggaaagggtaatatgccacctgtagttgtggagggagacagctgtggagatgtccaccaggcaggtagaacgttggacttggatcttaggtgcttggtgatgcagtagagagaagcttctgggagtgatttgtgagcaagagagagcaagttaggccagaaagcaggcagctgggaagctgtgacaatgtctagggacagagcttgatggggagcaagtgactcagcacacatgagatcggaggagaaaggaagattatgggcaggaaggctcctgaagggttctggagtggcaggcacaggcagtcagagggcagccactggacatggggcatcttggtcaaa

SEQ ID NO: 721072 - DNA, 578 bp, Homo sapiens
gggcacggagaagactcatttctacaatctccattcactacacaccacctggcaactggcagctgtccacaatattgaatatggagaggacaggtcaggaaggcacatgtgtggagggaagtatgtttaaacggtggctaatatagcagatatctcctatttgttatctgttcatcaatctctcttccttttttctggcagcataccctatttctttgacaccagaagtgggtatgtgacccaggatgggtaaataatttcactgatgtgaccakggtcactgttctgaggggtacactcaaagtgagccaagctgagctaacttgtgttttcctgcggttttgaaattggagctgggaggaaagctcttcctctctggttggagagctgctaaagatgtgaatcagagctgctcccatgaacccaccccagtgagaaagtggattggctgggtgaagtccacacagaaagagaaactgaggccagagcacagtgggtgaaccccgatggggtctgagtccccagcttggtggtctgcgtggctgtctcctcttctgcctgtccttctcttggtttgc

SEQ ID NO: 721073 - DNA, 578 bp, Homo sapiens
gggcacggagaagactcatttctacaatctccattcactacacaccacctggcaactggcagctgtccacaatattgaatatggagaggacaggtcaggaaggcacatgtgtggagggaagtatgtttaaacggtggctaatatagcagatatctcctatttgttatctgttcatcaatctctcttccttttttctggcagcataccctatttctttgacaccagaagtgggtatgtgacccaggatgggtaaataatttcactgatgtgaccagggtcactgttctgaggggtamactcaaagtgagccaagctgagctaacttgtgttttcctgcggttttgaaattggagctgggaggaaagctcttcctctctggttggagagctgctaaagatgtgaatcagagctgctcccatgaacccaccccagtgagaaagtggattggctgggtgaagtccacacagaaagagaaactgaggccagagcacagtgggtgaaccccgatggggtctgagtccccagcttggtggtctgcgtggctgtctcctcttctgcctgtccttctcttggtttgc

SEQ ID NO: 721074 - DNA, 578 bp, Homo sapiens
gggcacggagaagactcatttctacaatctccattcactacacaccacctggcaactggcagctgtccacaatattgaatatggagaggacaggtcaggaaggcacatgtgtggagggaagtatgtttaaacggtggctaatatagcagatatctcctatttgttatctgttcatcaatctctcttccttttttctggcagcataccctatttctttgacaccagaagtgggtatgtgacccaggatgggtaaataatttcactgatgtgaccagggtcactgttctgaggggtacactcaaagtgagccaagctgagctaacttgtgttttcctgcggttttgaaattggagctgggaggaaagctcttcctctctggttggagagctgctaaagatgtgaatcagagctgctcccatgaacccaccccagtgagaaagtggattggctgggtgaagtccacacagaaagagaaactgaggccagagcacagtgggtgaaccccgatggggtctgagtccccagcttggtggtctgcrtggctgtctcctcttctgcctgtccttctcttggtttgc

SEQ ID NO: 721075 - DNA, 2624 bp, Homo sapiens
agcacacacatacacaaccctagagctatcatcataaaattttagaatgccaaatatgaagtttccagacagaataagttgcctacaaaggaaccagaatcatattggcattagatttttaatcagcaatcttcaatgccataggacaataaagtattacctttaagttttgacgaaataacataaaaggttatagcttcctgagctatcaatcaagaataaaaataaaacctagatattaatggataagcaaagactctgatatttatcaaatagtgatcttctctgagagcactactcaagtatgcaccccagccaaacaacaaaggagtgcaagaaagtgacagacacagtagtgttaacccaggagagcgtgaaaagatactctagggtgatcgctgtgcaacagctagatccaaattagaacctagaaaaataagaaaattcagaagctctaaactaagtgtattcataaagaaaattgattccctgcaagaaactttaacacttaaaagtggataattttagttataagatggatgcataaaataataaaagtaagccaggcatgtatctgtagtcccagctactcaggaggcagagatgggaagatcgcttgagcccaggagttcaatttagcctgtaaaaaaaaataataataaaggtaaatagttaaaatatgctgtccctcttcctgtctcctaaaaatcactctcttaagtacctgggtttataagcataggatctcatttccttctctagttacacaatcacattacgtggttcttcattgaacaaatatttatataatcttattataaactacagatattggctttcagtttttagaatcaacctctaggcaaagcataaaggacacatatggttatagaacacaatatgtgttgtaaacctagacggtgaaatgatgacagcagccaagagacagatggagctggaacagtgaagggaaatgcaggggaaccaattttctcattttacagagtgaaaattcaagggaaactctaaccaataggtcaggatgtaaaagtccaaaaatactacttaaagctacagtggtagccaagagaggaactaaaaataaaatgtgtcaagcagaaactaaagtggaagaaaagaaagaaacataaattaatcattgttgtaatggggagacaatagatactgtcaaaaaattataaatcaaggaacagaggtaaaatcacatcattgcaagcacggcagtaactaccagaagaaccaaaaagaggaagtttaaaaacttgtatctctaaggagaaaaacaggctgaggtggctgaagaaaaaggaaggcttggacttttttttttttttttttttggcgtctctgtcacccagtctggagtgcagtggcacaatctcagctcactgcaaactctgcctcccaggttcaagcaattctcctgcctcagtctcccaagtagctgggattataggcatctgcccacgcccagctaatttctgtatttttcttttttcttttttttttgagatggagtctcactttgtctcctaggctggagtgcagtggcgtgatctcagctcactgtaaactccacctcccgggttcatgccattctcctgcctcagcatccagagtagctgggactacaggcgcccrccaccacgcccggctaatttttggtatttttagtagagacgaggtttcaccgtgttagccaggatggtctcgatctcctgacctcatgatccgcccgactcagcctcccaaagtgctgggattacaggcgtgagccaccacacctgaccaatttttgtatttttagtaaagacgaggtttcaccatgttggccaggctggtttcaaactcctgacctcaagtgatctgcttgcctcagcttctaaagtgctgagattacaggtgtgagccactatacctggccccagacttttcagttatgtctttcataccattttaaatatctctgtaccattaccatgagaaggtattttttaataagttaaaacatatttgcaaaattaatgtgcaatttaaaattaagataataattctctagatataagttaaataccttcaaggactgaagttcatcattgaccagatgacctgtaagaaatccagatctaacattctaaactacctggaaagttacctggaaagtctacgaatttaacttcacaaactgccaacatcatctcttctggaagtacattgtcagagctcctgaccccaaccttataagcagaggttgtctccaggaacatttctgctccctgctctgatttaaaataccagggagagaatctgttttgaaaacaatccacaagacaatattttccctaaggtcagctttaggagaggtggttctctttcttagaggatttatactgcactttcacataccgtaaagtattccatttggtgctcacagtacacaactctgaaaggcggagacagtgtgtactactacatccatttaacttaggaggaaactgagtcccaaatatgtaagttaccagcccaaaaattcttagcactaaataataaagatcagagctcaaacatgtctctgatcccaagtactgatctctccattaacc

SEQ ID NO: 721076 - DNA, 995 bp, Homo sapiens
  misc_feature 605, 606, 607, 608, 609, 610, 611, 612, 613, 614, 615, 616,617, 618, 619, 620, 621, 622, 623, 624, 625, 626, 627, 628,629, 630, 631, 632, 633, 634, 635, 636, 637, 638, 639, 640,641, 642, 643, 644, 645, 646, 647, 648, 649, 650, 651: n = A,T,C or G
  misc_feature 652, 653, 654, 655, 656, 657, 658, 659, 660, 661, 662, 663,664, 665, 666, 667, 668, 669, 670, 671, 672, 673, 674, 675,676, 677, 678, 679, 680, 681, 682, 683, 684, 685, 686, 687,688, 689, 690, 691, 692, 693, 694, 695, 696, 697, 698: n = A,T,C or G
  misc_feature 699, 700, 701, 702, 703, 704: n = A,T,C or G
atctccccctgaaaagccattcgcagtcacttccctttgacacctgtccccacctcaacaactgctaacctgcttcctgcctctgtggatgcatctcttctggataccttgcataaatggaaaaatctggcttccatttagcatattttcaaggatttagcatattttcaaggttcctccgcattgcagcatgtgtcagtctttcaatactttttacagctgaataacgttccattgtgcggctataccgcattttgtttatccattcatctgttgatggacatttggactgtttccattttttggctactgtgtatagtgctgctgtgcacattcctgtacagtgctcctgtgctctcatttctcttgggtgtgtacctaggagcagaagtgctgggtcatatggaaactatatgtttaactctgaggagctgccagactatttcccaaagtggctgtgccatctcacattcccactagcactgcgtgagggtttgggactaactttttaaattgtatttatgtactgcttctaaccagcactcttggaagacaggtccaggtacgtastgaggacctgctataaaatagctccctttggccannnnnnnnnnnnnnnnnnnnnnnnnnnnnnnnnnnnnnnnnnnnnnnnnnnnnnnnnnnnnnnnnnnnnnnnnnnnnnnnnnnnnnnnnnnnnnnnnnnntcaagcaattctcctgcttcagcctcctgagtagctaggattacaggcatgcaccaccatgcccagctaaattttgtatttttagtagagatggggtttctccacgttggtcaggctggtctcgaactcccgacctcaggtgatccgccggcctcggcctcccaaagtgctgggattacaggcgtgagccaccgcactcggacgcctcttacctttttaacacccactcatcctgatatttcaagatcaagtttgctcatgagttaactatatttggctacagcaatgata

SEQ ID NO: 721077 - DNA, 662 bp, Homo sapiens
ggctcaagtgatcctcctgcctcagcttcccaaagtgctgggattacaggtatgtgccatcgtcaccagccagaatatgcattttctttttttcagacggggtctcactctgttgcccaggctggagtgcagtggtgtgatctcagctcactgcaacctctgccttctgagttcaagcgattctcctgcctcagcctcccaagcagctaggattacaggtgtctgccacaacacccggctaatttttgcatttttagtaaagatggggtttcaccatgttggtcaggctgatcacaaactcccgactgcaagtgatccgcttacctcggcctcccaaagtgttaggattacaggcatgagccattgtgcctggccgaatatgcacttttaataagcatcagccaggctaggcaggccgggggccacactcgagaacatttgcaccacagccactggctacctgcccctttttccataaggttccactgccctctctcccctctatctgggtctgttcttcaggttcttccctgggagctctctgagtgacataactgtccccaagtgctgggagatggagagaggaatcaccagactggagcaggyccccagagcggagatgggaaggggaggctggtgttctgaggctcccgaggcagtga

SEQ ID NO: 721078 - DNA, 1067 bp, Homo sapiens
gaggaaaagtcagtctagaatggtacacccagcaaaaattactttcaaaaactaaagcaatggcaccttaggtgaagtagtgaactatttcataatgttcccggggcacagagtatcacaagcacagtgatatctaaggatggaaaaacttctaaattaactgctgacttcagagccatgtagtaactgctcaatccacaccagcaatgtggatggttcatgtactactgcctctttccccacttaactctgttctgaattacagtctcctatatatgcacctgattggaacaacataaattgcatctaaaagcctaactgcaagagttaaaaaaatgtaattaacgttccagcctttgcagtcacaaaatacgaaattaaatttcaaacagatattgaccagacgccatctactttatgttccatatcagcaaaaatgtacactaggaacttcctagtatatacgttcctatatcagtgtgaatgtccctttgtgcccatcagcatattgtttttagcacatactagaatctggattccatttttatccattggcctgttggcctctcccatctaaatagataaccatatgttgttgttgttgtcgtttttcatggcctgaggaactttctacaatgtctccaaaatggtagatgttccaaatatattcatgcaattaaactacatttgttgattagttcatttaataaatatttattaagctcttactatgtctaggtgccaagaactgttctacagagttgaaatagagcagtgaacaaattagacaaatttactggcttcatggatttaacattctagtggtgagcagaataaaaataaataaataaataattgtgatataatattaagactgcccttaagaaatctgaaatagaacaaggagagcaagacaagggctgctcacctattttaggtgagattgtcaggaaaggcctctttgaggaggtgacatttgagcagagatctgaatatagtgagggacccagccatgtagccagctgtagtgatagaatactaagtgcaaaggtcctgagccaygggca

SEQ ID NO: 721079 - DNA, 1531 bp, Homo sapiens
tggtcttaattaatggaagttcaaatatcttagtctgcaaatttgtgaagctcaaaggctttattcttaaccattctactatagctgccctccatagagactaggccacaacattaaatcctgaggtctggttggttttgaaaaactcattctaatcccatgtctctctcagagctcctgttctgaggatgggaaatgtcaggaactacggagaatagtatacttctaatttctctcttgggttttagagagtggttctcaagataaaattcatatatgcattctctgttttcccaggtctctcttagggtttcagctggttccaatccttataatgcttgctccccgctcagtccatttcatagaaaatatctcattttttctcccctgatggtcttaggaatattctcacatgtgctcctgaatgaattatattggtttcccaaggtaatccacaaaatattcattgtcgattatctctgccaagtatgtarcatgacaatgttctcagtggacaccatacaacactctcctagaaaaccagctcctccaggggacttctgtgggctgcagccacctctcctagctctagaaatgtttctaaagggatctacaggtggagctatctaaaacttagtggtgctgctatcctggagtaaaatagataaatgtcttgttccttgctgatggacaatgtgattaattgctttctaaaatcaaaccatcaaacatgctaagttaacatgcttagcacaaacatgctaaggtgctaacagcatgaaggacccttgtaagtataatatttccctttccagctgaggggggtgagttttagaggcaattatctggtccttatttccccaagagggatcctctaattctaggaagcatcttctatacattattaagatgtatggaatgtggtttgaatgacagttatcctgctgcccagtgatgaagcaccatgcaatctgtgggtgcatgactgttcattggaagggaaccctataattatgaactttaggacacaatttggtcttatacttggtcttattatgttcaacatggagataaaaaatcaaatgtattacatttgtgaaaaaaagaaagttgaaaataataatatactctatagtagaattaataatacaaattattaataatttttggaaccaataatttcacctccagcactgattctaggaaaataatcagtgatgtgtagcaggatgtacaaatgttatttattaaataaacattgtgagtagtagttgctgtattaatttgctaggactgccataacaaagtaacacagactgataacttaaactgaaggcatctattttctcacagggctagaagtccgaaatgaaggtgtcagcaagactggtttcttctgaggctgctctcattggcttgtatctagccatcttctctttgtgtctttatatgatctttcctctatttgcttctgtgtcctaatctcttcttataaggacaccagtcgtattaaattaaagcccaccctaat

SEQ ID NO: 721080 - DNA, 1718 bp, Homo sapiens
agtaacagcaaaatggaaaattacaggctgggtatggaggctcgtacctgtaatcccagcactttgggaggctgaggcaggaggattccttgagctcaggagttccagaacatcctgggcacactctattatttaaaaaaaaaaaaaaaaaaaaaaggactgtggaagaaaaacaacaatccttttaatcctgggcttcttaggactagaaactatataattatgataaagctcccttaattaggccaaagcaatagttctgtgtgtgctctttgaattttcacaactgggatttagccttttcctgtctaagaaaaaaacagaaaagtgamcttataagaaagcttgaatttaactgaagttggcaggacacaggtgggcttttaaatagtctatgaactattttgcacagatatgctaaatattttctcttagtaagatatatttaacttcttattaatatctaaagttttaatattggctttttatttctagaaaaacagaatttaactcattttaagttatcttcagaaaatgtttcacggcaattacccaagtccaaggcagctctttcccagactcctggcagagcactcacctgataatagtgttcccacagaggattccagtcatctggaaaagcattgtcagaaaaacctcctcagatcatgtcaagatgaaataatattagaagtgttgcctctgctgggttatccaaggcacacatttcagagctgattcctcccaaatgctacttaaagatcagtgacatgcttcctgaacacgtatcttttctccataatcttatttctttatgtgcttactacagagaatatctctttaaaaaaaaaaggcttagcggcttagctcacattttgctttaatagctcttttttgttttcagtgagactcctttacatttctctctctctctctctctaacattaatctagaaaaggatatttctcagcagaacacacattattaagggtcatcctcatatggagccatcagcagctccacacagtttagctatctatgaggctttaatgcaaaaacacttgctttcatttgttcctaacattaagctttggaaaaattcattaaactgtatagaagagtgatagagctcattgattcttctgttttttatctgtgaaatgaggagagtagatgaggtatttgtataatttctatggatattagataacccactattagggaatgtgtaagtttcttcttgctgctctcacaatttgccacacacttagtggcttaaaacaacacaagtttgttatctacactcctgaacgtcagaagcccaaaatgggtcttatgaaactaaaatcaaggtgtcagcaaaactgcattcattatttctggaggccctgggggaaaatccatattctcaccttttccagttagtagagaccatctgtactctttggcttgtggccctttcctccattttcagggccagcagggtagcatcttcaaatctgtatttctgatctctgctttctgttgtcacacctccttctctgactgtgccactcctgctttcttccatcttataaggacccttgtgattacactgggcatactcaaataatatagattaaccctcccatatcaagattcttaaccttatcacatctgcaaagtcgcttctgctgtgtaaggtaacatattcacaggcttcagaaattttgaggcag

SEQ ID NO: 721081 - DNA, 1718 bp, Homo sapiens
agtaacagcaaaatggaaaattacaggctgggtatggaggctcgtacctgtaatcccagcactttgggaggctgaggcaggaggattccttgagctcaggagttccagaacatcctgggcacactctattatttaaaaaaaaaaaaaaaaaaaaaaggactgtggaagaaaaacaacaatccttttaatcctgggcttcttaggactagaaactatataattatgataaagctcccttaattaggccaaagcaatagttctgtgtgtgctctttgaattttcacaactgggatttagccttttcctgtctaagaaaaaaacagaaaagtgaccttataagaaagcttgaatttaactgaagttggcaggacacaggtgggcttttaaatagtctatgaactattttgcacagatatgctaaatattttctcttagtaagatatatttaacttcttattaatatctaaagttttaatattggctttttatttctagaaaaacagaatttaactcattttaagttmtcttcagaaaatgtttcacggcaattacccaagtccaaggcagctctttcccagactcctggcagagcactcacctgataatagtgttcccacagaggattccagtcatctggaaaagcattgtcagaaaaacctcctcagatcatgtcaagatgaaataatattagaagtgttgcctctgctgggttatccaaggcacacatttcagagctgattcctcccaaatgctacttaaagatcagtgacatgcttcctgaacacgtatcttttctccataatcttatttctttatgtgcttactacagagaatatctctttaaaaaaaaaaggcttagcggcttagctcacattttgctttaatagctcttttttgttttcagtgagactcctttacatttctctctctctctctctctaacattaatctagaaaaggatatttctcagcagaacacacattattaagggtcatcctcatatggagccatcagcagctccacacagtttagctatctatgaggctttaatgcaaaaacacttgctttcatttgttcctaacattaagctttggaaaaattcattaaactgtatagaagagtgatagagctcattgattcttctgttttttatctgtgaaatgaggagagtagatgaggtatttgtataatttctatggatattagataacccactattagggaatgtgtaagtttcttcttgctgctctcacaatttgccacacacttagtggcttaaaacaacacaagtttgttatctacactcctgaacgtcagaagcccaaaatgggtcttatgaaactaaaatcaaggtgtcagcaaaactgcattcattatttctggaggccctgggggaaaatccatattctcaccttttccagttagtagagaccatctgtactctttggcttgtggccctttcctccattttcagggccagcagggtagcatcttcaaatctgtatttctgatctctgctttctgttgtcacacctccttctctgactgtgccactcctgctttcttccatcttataaggacccttgtgattacactgggcatactcaaataatatagattaaccctcccatatcaagattcttaaccttatcacatctgcaaagtcgcttctgctgtgtaaggtaacatattcacaggcttcagaaattttgaggcag

SEQ ID NO: 721082 - DNA, 833 bp, Homo sapiens
tctaagtgattattttaacacaaaactaccctgttaagtctagctggaaagagaagagcaaagggagagaaagcagatccactatggaatggcagggctccaggtcacctgctcttctggaaaggtccccagaaattctggcatctgtgttgactcagattcttgttaacacttgtattgtacacattaaaaaggaggaaacctwtaaaacactagtaggaggggtcagttgcttatgtcacccagaatacatggtgctgtcatgcctgcccttcctccttctccaggcaggtatagctggaggagctgcttagagccattctcctgctggaagatctgtcattttctcagatgtgctatcaacagtgtcttgccactaaacctgctgagatagtcactggcccatgagagacaaagcttgtcaccagttaaccagagcactttggttgcaagatgtgaccaggtggttccatgaacacttaggtcctaacccccagattcagggaaatttgagcttcttctgagtgatatagaaatacaggcccgctaagactgtgggactttagccagtgtttctttctcttggtggacactggccaacatccatcatcgaaagagccatctctgccctgagcttgccaaccacagaaaactctgagaagaataggcttctacaatctcatggctaatctgtgggtcttttcccagacggtaaaagatctaaacattaaacacaaattcaaaaaagcaaactaacaaaccaatcatgaagccaaacaaatgcaaacactggatatagtttcaggatgaatggatgaatcccatgtgctatt

SEQ ID NO: 721083 - DNA, 833 bp, Homo sapiens
tctaagtgattattttaacacaaaactaccctgttaagtctagctggaaagagaagagcaaagggagagaaagcagatccactatggaatggcagggctccaggtcacctgctcttctggaaaggtccccagaaattctggcatctgtgttgactcagattcttgttaacacttgtattgtacacattaaaaaggaggaaacctttaaaacactagtaggaggggtcagttgcttatgtcacccagaatacatggtgctgtcatgcctgcccttcctccttctccaggcaggtatagctggaggagctgcttagagccattctcctgctggaagatctgtcattttctcagatgtgctatcaacagtgtcttgccactaaacctgctgagatagtcactggcccatgagagacaaagcttgtcaccagttaaccagagcactttggttgcaagatgtgaccaggtggttccatgaacacttaggtcctaacccccagattcagggaaatttgagcttcttctgagtgatatagaaatacaggcccgctaagactgtgggactttagccagtgtttctttctcttggtggacactggccaacatccatcatcgaaagagccatctctgccctgagcttgccaaccacagaaaactctgagaagaataggcttctacaatctcatggctaatctgtgggtcttttcccagacsgtaaaagatctaaacattaaacacaaattcaaaaaagcaaactaacaaaccaatcatgaagccaaacaaatgcaaacactggatatagtttcaggatgaatggatgaatcccatgtgctatt

SEQ ID NO: 721084 - DNA, 415 bp, Homo sapiens
tccaatgtcaccaacttgccaaagcacaagtaaaattaaactaccattaaactgtattaagattaaggtccaatacgtatcggtcaatttcctaatttatgctatcgagttaaggaagatatttagaagacagaacattctgttctttcaactttaggacaaacaagaaacaaagattagtggttcttaaatgtaggcacttaygaatcacctggaaactaggtgaaagtttttttaaaaactgcacatacatggggcagaatgctctgtgtcctaatgcaattcagtacagcagtgctaatctctacaagcaccactttgtaaggaattacaatagaaaagagataggagcatgggtgatagaaaagacaggaaaaagggacatgggattattgtttcctgggatatcgccata

SEQ ID NO: 721085 - DNA, 651 bp, Homo sapiens
cattgatatgtttggtcttccttctcttgtcttttagatttattttatttgctcctggtttcctagtgatttagatagtacatatcctattttaatttcattagagatacttctaacaatctaatcatttttaatgtccctctcccactaaaacgtcccattatgccccctatttaaaacttctaacagttayatttttcgaattctcttattttactaaattcagtgaatgttagggggtaggctggagactccaaatacaattgtacatttctttatacaaatatcaatatttagacttaactcttttactgatttccttacccacagccaatccttatttattgcaataccaaaacatacttttacttaaactttccaatgagcaatacgttcacatgagtcaaaattcaaaaggtctacaactaagtttctttcccctcccatctcctcaagccacccagtttctatcctggaagcaaccaatgttatcagtttctgctacgttattgcagaaaaactatgtattgaatcatccttgcttccttttctaaaacaaccccactatcgctgaagtattactctttcgtgctgttggaaatcctcatgctaataaatatttttaaaagattttttgtactgacatttata

SEQ ID NO: 721086 - DNA, 617 bp, Homo sapiens
tgtaacataaataacatttttattaaaaataactatattttccaaaacaaagaaaaatttaatgagaaacgtccggctgtttctcatatctgctaatacactgaatttactgagacatcacacatcatgcagccttggaaaactccactgtatccttgagagagaataaaagcaaaaaaggcaaataacatcttagtattacgatgaaaatagttttaacctcacagaccgcactttaagtactgctggattaatttatgttttctacattcagttctgataaactgtaatttttaagaaaattttctggatcatacaagtgttcaaatatatttttggggtcaagcaaaatagtccatttcgattcttatattttctctttatctgtggtgttttcccctcttaktttttgagtatgcacgttagctccattcaatctttaagttagctagcaacttatctcttttattgcaaacaaccagctcttagttacagagttctacttttattttagtttactagttcattgattgctgttttttatctttaacaactactttatcttttcttagtgtattttgatattatttttctaatttcttgagttggactactta

SEQ ID NO: 721087 - DNA, 640 bp, Homo sapiens
agtcaaaaggccagaaatcaaatggaataggtggttgtcagaagaaacactatacagattcaggagttcataaataggttattgagttataatctttacaaagtgtcaaattttgacactgtggaagaggtttggtctatagaattaacaataacagtgggtaagaaattgtaagtaagattctagagtaaattttatttgcctattgacatttccttttctcttgcacagattttctccttatttctttttttgttttattcacactttgttcttcaatattgctatgtattctcattagtttaacataagaataaaataattttgttttttcaacctacagaaatatgagtatacaattgtagagtatacaaatataaagcaatatactattagtaaacatcrcaattgcacagagagtaccttccttttgataattaagaattactttctaggttgaatacaattagtttttattatttagtatttcattaggaaaggacattggtctatgaaacacctctatcaattgtgaaaactgataattgagtgtacctgcatggtttgataattgttatctaggaataacagaataataaattcatctgtcttctagaaatttttatatttgtgcttttcc

SEQ ID NO: 721088 - DNA, 619 bp, Homo sapiens
ataattttccccttagggtcaaaatacaaaattctagttaggtgtagtggttcacgcctataattccaacagtgttggaggccaaggtgggaggatcccttgagaccaatagtttgagatcaggctgggcaacctggggagaccctgtctatacacacacacacacacacacacacacacacacacacacacacacacaatagcgagcatcgtaatgcacaactacagtcccagctactcgggaggctaatgtgggaggatcgcttgaggccaggtcaatgccgtagtgacctatggtggtgccacaccactccagcctgggcaaaagagcaagcctctgttycaggaaaaaaaaaagtaatctaaaatcatgtctagaaggcagagttggatatgcttcctctggtctaaacagtcaagttacccatgcccttccccttcccccaaagacatccaatgttgcgctagatatgttcattacatacatgtaacaaccttcagagttagaggggctgatagttttgcagctgttttactacaaaataataagggttatctttttttcatcttatcagaataattttctcaccttcatttacagattatgcacgtttttcta

SEQ ID NO: 721089 - DNA, 1907 bp, Homo sapiens
tgccccaggctggaatgcagtagcctgatcttggctcactgcaacctttgccactgggttcaaacaactctcctgcctcagcctcccaagtagctgggattacaggcgtgtgccaccacacccggataatttttttgtatttttagtagagacggggtttcaccatgttggccaggctggtcttgaactcctgacctcaagtgatccacccgcctcagcctcctaaagtgctgggattacgggtgtcagccactgtgcctggtctgggcctccattttctaccccagattccaacacctggttcccatgactatactgttattagatcttattgcctctacaatattaatattggcttcaatattctcctaaatatccagccccatttgatccccttatttcagtatttattgcgttgttccccaaatacttgattattgtctcaatattgtactccagtcttccttgacactcaccccatcactgctgtctccaatattaaactcactccagcccccaaattcattttcttcccatacccccatattctctcctatcagcccatctctcttccccatacttctcccgatttcactctccttcaaattcctggttccatagagctccagtacctggcctgtattttctaatcaatattaaatttccattactctcacgccatctacacaatgagataccacttaatcctcactaagtattaagtgtacacttaatcctaagtattaatcctaagtattaagtgtacacttaatctgtacacttcaatgtgtacacacaataagcgtgtacttttagtatcatcatgcatctaaggtggccaattttcctcttatatagtttgagttatagtttacgtatcccaggaatatgtgatgacatatctccctactgcccacctaatttcacagttactgcttacctatattgagcttgcaactgtcctccaatttctgggagtccagtaagagtttcctttgtccaaaatatcaagcctttccctgtctgcttagtatacacggacagccttttagaccataaaaacaaatgggcccccaagccaggtgcagtgatgcacacctgtagtcccagctacttgagagactgatgcaggaggatcccttgaggccagacatttgaaaccagctaggcaacatggcagagaccccatctccaaataaaacaaaaggaaaaaacaaacaaacaaggacccatttttggggtccttgtgctgtgctgctcaagaatcgaattctagagtcttattagcctggctggggtcacatgcccatctttggctaaaaggcagaagagttatcttaataggcaatcctgtgaaaatagcatgcaataggaaaggaatagttcccagaggaaaactgaagagccatggatgctaggcaggtgaaaatatcagatatccagtaaactgactttcrgtaagtcacaaaggatgaaggtaaagccaactgtttcgggcaatttgggttgtcagtggtaggtaaatatatggagacagtgaagtaagcagtggttctgaatatcatggaacagtagtaagtttaagttgttgagaaacagttgaaatttagctatttgaaacagtagaaactgatactgggaaaattgattttttttttttttttttgagacagtctcgctctgttgcccaggctggagtgcaaaggtacaatcttggctcaccacaacctccacctccgcctcccaggttcaagcaattctcctgcctcagcctccggagtagctgggattacaggtatgcaccaccatgcccagctaatattgtatttttttagtagagatggggtttctccatgttggtcaggctggtctcgaactcctgacctcaggtgatctgccttcctcgg

SEQ ID NO: 721090 - DNA, 615 bp, Homo sapiens
tgggcctcgtaggtcattggatccacagacatcttggcttattttgctatgttgttttcagtcgtgaaaaacctgcaaatgtaaaaaggaaataattcatttggaaaaaaaaaatcttctgcaggaagtaaccaatcacattacagatagcaaacaaagaagcaaatcaataaaaaataaggagtttgtgttcctttatacctgatgccactcccacaacaggatataaactcttgcctctctgaggctccttccatcagcctataccctcccttttcccctcctcgttgttcacttcccttacctgtgactttggcacagatcagtcttctgaattatcatcctagacaactttgaagtctagacagatgacttaaccaatgccctagagactcagtttcttgagcttcaatgacctatagctccaccttttagccacctggctcttgatatttgtaactactcttccaaactgcttctactttttgactactgcctcctacacaattcttccaattcttacycatatactcatattataccctaatcttcaagatttacagcccctccaccctctctttctgttctcagcctctgccacttctcttctttcct

SEQ ID NO: 721091 - DNA, 2364 bp, Homo sapiens
caaaaaaccagctcctggattccttaattttttgaagggttttttatgtctgtatttccttcagttcttccctgattttagttatttcttgccttctgctagcttttgaatgtgtttgctcttgcttttctagttcttttaattgtgatgttagggtgtaagttttggatctttcttgctttctcttgtgggcattcagtgctataaatttccctctacacactgctttgaatgtgtcccagagtttctgttatgttgtgtatttatttgtttaaggcggagtcttgctgtgtcgctcaggctggagtacagtggatcgatctcagttcactgcaacctccacttcccaggttcaagcgattctcctgcctcagcctcctgattggctgggatcacaggcgcctgccaccacacccaggtaatttttgtatttttagtagagaagaggtttcaccatgttggccaggcttgtcttatactcctggcctcaagtgatccacacgcctcagcatcccaaagtgctgggattacaggtgtgagccaccgtgcctggcctctatcttgtatttgatgatgaaaatctgttattgacagtcacccggcctgtttcttgtgttttatgatgaaaatctgttattgacagtaagagcatgggggcttaggttaacaacaaggtgtgagaaaagcatcagtgaaattttggttctcaaaacatttgatgtcttattcctttttttgaacatgggtaatgctaaaaaaagccagccattttgaaacttgattttattgtcatgttctcattttgaaattcatcttattgtttgtacgaattggcagccgtatgtgggaaatttcagttttgcatattttcagattattttcatttttacatcagagattttgaacagatgctatacaaaagtattcatttatttattcaacaaaatttagtgctggttatgttgcaagcagttagtgaacttcatgctgtacgtgcctgagatactttcgtgaatgtaatggcaacatcaaaaactttgcccttatgcatcttataaacctttaatttcaaggcatgttgataagtgaacatctgctataacatactttcattgtcatttaattaaccattatttgggtataccttatattaaagctgattattaaaaactggaaaatatttaacacatctttatcttgcctttttccttaacatatgtagatcaagggagtcgctgagaatcaattttaaggatagttataaaaatcttaactttgcaactataactttgtcctcaatgtaataactggaaaaaataatttacgtttcaaaggctttaatctttgtatttttttgaaaaggagccttcaccgagattctttaaaaattcttgctctgtcctacagtaggaaccgatagactcatggatatggtcctctaatggatcggtaccacctcagctctctgattgttgccctcctgtggtgaaaattaaagtttattttcatttcatgtctaggamgtagtatgttcttgtttggaaaaaatgatgtttcttgagaaataagtgccttcagtatcactgtgtgtcacttaataaatatgactaatatctacttttaccaattgctgcaatttgatccttaaacagccatctttaaattatactttttctttggttaaagaaaagtaattacaatagacattaattatttttacataattttcttatgtggacacccattcttagaactaaaactttcagatgtttatattacaagtacaattattgtttattattattaatgtcagtagccaaatgtaatcaactctcttccttttacttccttttttgaatcaacatgtcacacttatacaagcaagagcaacagctctctatctggatcactgcagtgcctagaagatacaacagcacaatttacaaatccaaatttccaggaagtctctgcacatacctctagtacaaaagatgtttcagagactagagggtcagagggcaaagagaggaaatattcaactcccagttcaggtcaaaagggaagaaagcctggtgttgaaacaaatccaagaatgactgtgtctgcaactcgctcctttctgtaaagtattcatggtgttttacttaaaatatttgctcttatgatggtcaataatattaatagttatgctttgtaaaagaatttattctttacttataattaatggatcattctaagttattatatgtttagttggtatagtaagatgatgtgaaagatttgttgcctgttaaatgtttctgggatctttgctttatttttatattatgatctgtgcttccaaagttgagctgtaattttatt

SEQ ID NO: 721092 - DNA, 864 bp, Homo sapiens
tcccacaactgtgagaaacaagtatatgctgtttaagccactcagtctacagttgtttgtggcagcagcctgagcagacaaagacatagggttccttttattttcagaattcggtttagctgtaatcacctaccatcctgagatgctgtttcctcccttgaaatataagctctgggactatagcttcatggacaaattctgaagaatttgtctctgttcttgtgggatgctaaactaaccaatcaaggaatgtttgctcaatggaatgaaacatcttaatgcagctcgccagccaatgtctgcagagcacacctcatgggttctggctggcttgaatttctgagactacttcatcctaatcatcagactgtggactcagattcaaccaggaggcccagattctagcgtcagttttgcccttggggtacaaatgcacgtcctgcttcactgaacatgaaaccctgaatatttggccattactctggcagttgtcctytctccctgtgccaattgccaatcaacccaactcccaggcagccttggcagttatgtctgcttggcctgctgtagcagccaatgacttagtaaaagtcagaacagagatctgctacctcccagtccaggatttccccataactcgcccatgtttatattaaacaactaggtttgcttttaaaattctttttcatttagcctcttcttagaacttatcgttttgagaatcctgacctgccaatattccataactttctgaaagtggcacagcaaatacgatgtatgcacactgctaactgcagctgatttctttttccatcatctataaagcacattaggtaatttctaaaccagcagcaaaatctattt

SEQ ID NO: 721093 - DNA, 657 bp, Homo sapiens
tgtgtctctgccagattttggtgtcaagatcatgctgtcctcatagaatgagtttgggaggagaccatcctcctcaatttttggggatagtttctgtaggaattgtacaagctcttctttgtacattttgtagaatttggctgtaaatccataaagtccagggcttttatttttttgattggcaagctacttattacctatataatatcagagctttttattggtccattcaggaaataattgtcttcctggcttaatcttgggagagtgtgtatatctagtaatgtatctatttctttaaagttttctagtttgtgtgtataaaggtgttcatgttaatactgaccccacataaataaaaacaaccattagaaaccaytaaagttgaacacttatgtctttaatctatttttatttaatttttgtacttggaatgtgataaagattcaactttactggtttaaatgtggacttgttttcccagaatttattgtggaacaaactgtccctttctttacataatgactaaggcacccttgtcaaaagacaatcaataatttatgcaagggttttttggattatctattttatttatttgatctctacaattgttcttatgccactagcaaactgttatagtagctttgtatgttttca

SEQ ID NO: 721094 - DNA, 657 bp, Homo sapiens
tgtgtctctgccagattttggtgtcaagatcatgctgtcctcatagaatgagtttgggaggagaccatcctcctcaatttttggggatagtttctgtaggaattgtacaagctcttctttgtacattttgtagaatttggctgtaaatccataaagtccagggcttttatttttttgattggcaagctacttattacctatataatatcagagctttttattggtccattcaggaaataattgtcttcctggcttaatcttgggagagtgtgtatatctagtaatgtatctatttctttaaagttttctagtttgtgtgtataaaggtgttcatgttaatactgaccccacataaataaaaacaaccattagaaaccactaaagttgaacacttatgtctttaatctatttttatttaatttttgtacttggaatgtgataaagattcaactttactggtttaaatgtgracttgttttcccagaatttattgtggaacaaactgtccctttctttacataatgactaaggcacccttgtcaaaagacaatcaataatttatgcaagggttttttggattatctattttatttatttgatctctacaattgttcttatgccactagcaaactgttatagtagctttgtatgttttca

SEQ ID NO: 721095 - DNA, 1323 bp, Homo sapiens
ttcctgtattttgttcatgcactcagcatgcacatttattgtttgtctcatgtgtgtcaggcactgggccacagtactcagcagaggacactaagagccagccaccagtccctggcagagatcacaaggtggtgatgggagcaaacacaccaaaagccagtgcgatgtaactagcctttaacacagacattctcccaagcaactgattcacattttccccacattcttccaaccaagtctttgacccaagaggaacatgtgggtgttcctaaggtaactctgaaaatttctcaacaggcaggaattgctcacarttctcacccttccaattccctaacaaaagaaccaaggctgggcacggtggcttatgtctgtaatcccagcacactgggaggtcgaggcaggaagattgcttgggcccaaggagttgcagaccagcccaggcaagatggtaagaccccatctttaaaaaaaaaaaaaaaattaaaagaagaaaaaatttttttaagaaaagaaaagaaccatgttcttttgggacaccccagccaatagggtcacattttcatccacacctgtgtgtttaaaaaattctttgttaaaggcccaccagtccccactgaacctagtttcaaggaaaatctaggccacgatgctcagtttagagggtaatatgaagtaaggaagacaggcaaaatctatccgaaacctgaaccgtgttttacactgtgatcacggttagatataattcatctgattctctgagcctttctggaattttataaaatcttctgatgggtatggagaatagtatagtgtcccacacacagaaaaaaatttccccaacaaatgtcttatttacagcagaccggtcacattctgtggatttcttttaaatgaaaacacttccttgaaattggaagaacacttagaaatctcatggctgtcttcccttaattcatttctttctttccccaacaagttcactcctaaaaagctcaacattgcctccctcctcagccattccaattggggtttgggcgagggggtaaaaaacaccattttcagcctcacaggatgagatgggcccctcacgtggaagagctggcagtgggagggaaggaaccggaacaaatcacgagggtctgtcaggttgtggttctcagttatgccttgtttagcaccctatgggaagacagaaacccacacacactaggtttagaaaccagaggcttcaaccctgcaagtatttgttttgtgccaccagtagctattgtatttcacacaccaagtcttcatcatcccttgtagtccttttcgccagaa

SEQ ID NO: 721096 - DNA, 1184 bp, Homo sapiens
gaccaaaccagaacatgcaggccactgatgctctcccacctcctagagaactgtgcaattcagaactgccctagaaatctcgagcagcttctagccgggtgtggtggcacacacctgtaatcccagctactcaagaggctgaggcaggagaatcgcttgaacctaggaggtgagggttgcagtgaatggagatcttgccactgccctccagcctgggtgacaaagtgaggctctgtctcaaaaaaaaaaaaaraaaaaaaaaaacaaaagaaaaaagaaaactgtagcagcttcatgaggacatttaatatctagtgaaggattttggaacaaatacccctacacaactcttggacaagttccttaatctcctttataaagagagtaattagttagggtgatgataggtgcggtaacaagtttatttctcccttacaagagtccactgtgggccaggcgcggtgggtcacgcctgtaatcccaacactttgggaagccgaggcaggcgggatcatctgaggtcaggagttcgagaccagcccggccaacatggtgaaacttcatctctactaaaaacacaaaaattagctgggcatggtggcttgcgcctgtagtcccagcaactcgggaggctgaggcaagacagtcgcttgaacccaggaggcagaggttgctgtgagccaagattgcaccactgcactccagcttgggccactccgtctcaaaaaaaaaagagagagaatccactgtggatgctcctgggtcaaaggcagcagcactctgctgtgaacagtccttcagggacccaagttgatgaggggcctgccatctctaatgctggctctcaaaatcccctgggcattggtctcccgctggtagaacaggaaaaggagcatgcatgggaggtttttatgggccaggcttggaaatggtgccattatattccgccaactagaactcagtcacatggccacacctgtgtatctgcaaggcaagctgggaaatgtcatttatctctgtgcccagagaaaaagagggcatggatttggcaaacagagagccagaaccagtctctgccacaagaaatcacatatttacactgaaaaagttgtgataaagattagagataatgtggtgatatatccttggcctacggggtcatggagtttgggaaagacacatca

SEQ ID NO: 721097 - DNA, 1072 bp, Homo sapiens
  misc_feature 81, 82, 83, 84, 85, 86, 87, 88, 89, 90, 91, 92, 93, 94, 95,96, 97, 98, 99, 100, 101, 102, 103, 104, 105, 106, 107,108, 109, 110, 111, 112, 113, 114, 115, 116, 117, 118, 119,120, 121, 122, 123, 124, 125, 126, 127, 128, 129, 130: n = A,T,C or G
  misc_feature 131, 132, 133, 134, 135, 136, 137, 138, 139, 140, 141, 142,143, 144, 145, 146, 147, 148, 149, 150, 151, 152, 153, 154,155, 156, 157, 158, 159, 160, 161, 162, 163, 164, 165, 166,167, 168, 169, 170, 171, 172, 173, 174, 175, 176, 177: n = A,T,C or G
  misc_feature 178, 179, 180: n = A,T,C or G
agctacttgaggaggctgaagcaggggaactgcttgaacccgggaggcagaggttgcagtgagccaagatcacgccactgnnnnnnnnnnnnnnnnnnnnnnnnnnnnnnnnnnnnnnnnnnnnnnnnnnnnnnnnnnnnnnnnnnnnnnnnnnnnnnnnnnnnnnnnnnnnnnnnnnnnttaataattttctctcttttttttggatataggatctcgctgtcacccagtctggagtgcagtggtgtgaacttggctcactgcaacctctgccccccaggctcagggagtcctttcacctcagccacctgagtagctgggtccacaggtgtacaccaccatgcctggctattgttttgtatttttagtagatatggggtctcaccatgtttcccaggctggtcttaaactccttagctcaagtgatccgtccccctaggcctcccatagtgctagaattacaggtgtgaaccactgtgtctggccaatatttttcttattaaagttccttttataagtttttcaaccttataaatataaaatgaccccagtgattttggcatagcttttcagttctgaaagttgctgacggggtcagctgtgagaatgagactcctgtttagcatttttatttttatgtggcaggctgaagacttgaagatgctaatcagacacatggagcactgggsacataggctattccctaaactgcagtttgaggattttattgacagagttgaatacctgggaagtaaaaaggaagttcaggtaagtgttgagatgattataaatatcattcacatgctaaatggtagggtagatttagttgaggctaaattgctgtttaaagtgttcattttgaaatctcttttggtagagagggaaaagtaatagcaaattatctccccccaacatgattggtaaagaggtaaaaataaataatctcttttcattttcagacctgtttaaaacgaattcgacttgatctccctattttacatgaagattttgttagcaataatggtaagaatataggtttatctactttataacaattttgcttttagaaata

SEQ ID NO: 721098 - DNA, 543 bp, Homo sapiens
tgccatggccaggtggcacatacctggaagcattcaccatcaggcacagctgccctgaccatacccccatcctcctgtggacccccatccccacagtgggggcctttcttggtgaaatggcacagcagggtggtgaaagggcctccttggaaccagactgcttgagtttgaatcacagctckgcctcttaccagccacgtggcctcgggcaggctgcatgatctctctgagctccagtgtcctccactccacagtgggagccgcacaagcttgcctaccagaaagaaccgtcagtgaggcggtacaggcgctgggcacttcacacagcctcctggggccagcacacagagccatttctcccgagtgtggttcctgggtctatgggggcccgcgtgccctagtgggcctctgtggttggccttctgggcctgcccctgcacatctggtagccagctcacccctgcttcccctagtctaacttggaatttggctagggctgccaatcaagatgccctgcccaccatgggcatgtgaccagacctg

SEQ ID NO: 721099 - DNA, 543 bp, Homo sapiens
tgccatggccaggtggcacatacctggaagcattcaccatcaggcacagctgccctgaccatacccccatcctcctgtggacccccatccccacagtgggggcctttcttggtgaaatggcacagcagggtggtgaaagggcctccttggaaccagactgcttgagtttgaatcacagctctgcctcttaccagccacgtggcctcgggcaggctgcatgatctctctgagctccagtgtcctccactccacagtgggagccgcacaagcttgcctaccrgaaagaaccgtcagtgaggcggtacaggcgctgggcacttcacacagcctcctggggccagcacacagagccatttctcccgagtgtggttcctgggtctatgggggcccgcgtgccctagtgggcctctgtggttggccttctgggcctgcccctgcacatctggtagccagctcacccctgcttcccctagtctaacttggaatttggctagggctgccaatcaagatgccctgcccaccatgggcatgtgaccagacctg

SEQ ID NO: 721100 - DNA, 1207 bp, Homo sapiens
gttccgactcaccgtgcgagggctgggcctgaaaagagctccaagtcccctcgtatggggtgtggggaagaccaggaggcctctgagggacaaaccctgggtgaagggaggccgtggtcaggagcaggggtgtggatgctgatgagggggtgcaggggggcccttcctctggtggggaggggctaatggccatggggaaggggggtatggcaggaggttgtgctggggaactagagccatagggcaaaggtcaaccttgcgggtgaggctttctcacagttggggtgcgaggggcatggtccggggtccagaggtgatttagttgtggattccatggctaaaaatgaagtccagtggggacggccaatgaggaaaatctgaagagggcactgctgtgggagaggtcggcagaggctgtcacggagctccctgccctgtggtcaccggcttcggctcccctggtctgggcttcggccggcccaggtatagccaatggagccccagctggcagggagctggctaggagatcaggcaagtcactcgggcccctggtgcatcagatggggaggatggtacctgcctctgtagtcacaggggacaataaatgtgaccctaaaggaagccaccattttcaaaaatgccctgggacatgggaaatgccgtggaaaagcacggcccgtccgcaggacagcgctgtctctgcagctcagacggacgctattaaccctgataacaggtaaacagtgtgcctgcttcagctgcaaattagacacggctttatctctgttcggtaaggctggtgaaagtgacagaggcctcctgaggaggcctggttatcgctggtggcccatgtcctcgttgccgctcagcccatatccccccaagtgccctctggcccgggtgtsatgctcgtgcagcctcatgagtctgacctggacgctgccctcccctgccgcttgatgccattcctgcatactacttctctgacgcctctcctattttcccgtctgcacatgtgtgccttctcctactcctggaatgttctggattattcataacagactcagggtcaccagagagtagagttgggtcagcaggagagctcagtgttggcttgtgcctctccccaggaaggtctggtatgtgtgtgtgtgcatgtatgtgtgtgtgcatgcatgtacttgcacttacgcacacatgtgcatat

SEQ ID NO: 721101 - DNA, 1207 bp, Homo sapiens
gttccgactcaccgtgcgagggctgggcctgaaaagagctccaagtcccctcgtatggggtgtggggaagaccaggaggcctctgagggacaaaccctgggtgaagggaggccgtggtcaggagcaggggtgtggatgctgatgagggggtgcaggggggcccttcctctggtggggaggggctaatggccatggggaaggggggtatggcaggaggttgtgctggggaactagagccatagggcaaaggtcaaccttgcgggtgaggctttctcacagttggggtgcgaggggcatggtccggggtccagaggtgatttagttgtggattccatggctaaaaatgaagtccagtggggacggccaatgaggaaaatctgaagagggcactgctgtgggagaggtcggcagaggctgtcacggagctccctgccctgtggtcaccggcttcggctcccctggtctgggcttcggccggcccaggtatagccaatggagccccagctggcagggagctggctaggagatcaggcaagtcactcgggcccctggtgcatcagatggggaggatggtacctgcctctgtagtcacaggggacaataaatgtgaccctaaaggaagccaccattttcaaaaatgccctgggacatgggaaatgccgtggaaaagcacggcccgtccgcaggacagcgctgtctctgcagctcagacggacgctattaaccctgataacaggtaaacagtgtgcctgcttcagctgcaaattagacacggctttatctctgttcggtaaggctggtgaaagtgacagaggcctcctgaggaggcctggttatcgctggtggcccatgtcctcgttgccgctcagcccatatccccccaagtgccctctggcccgggtgtgwtgctcgtgcagcctcatgagtctgacctggacgctgccctcccctgccgcttgatgccattcctgcatactacttctctgacgcctctcctattttcccgtctgcacatgtgtgccttctcctactcctggaatgttctggattattcataacagactcagggtcaccagagagtagagttgggtcagcaggagagctcagtgttggcttgtgcctctccccaggaaggtctggtatgtgtgtgtgtgcatgtatgtgtgtgtgcatgcatgtacttgcacttacgcacacatgtgcatat

SEQ ID NO: 721102 - DNA, 1207 bp, Homo sapiens
gttccgactcaccgtgcgagggctgggcctgaaaagagctccaagtcccctcgtatggggtgtggggaagaccaggaggcctctgagggacaaaccctgggtgaagggaggccgtggtcaggagcaggggtgtggatgctgatgagggggtgcaggggggcccttcctctggtggggaggggctaatggccatggggaaggggggtatggcaggaggttgtgctggggaactagagccatagggcaaaggtcaaccttgcgggtgaggctttctcacagttggggtgcgaggggcatggtccggggtccagaggtgatttagttgtggattccatggctaaaaatgaagtccagtggggacggccaatgaggaaaatctgaagagggcactgctgtgggagaggtcggcagaggctgtcacggagctccctgccctgtggtcaccggcttcggctcccctggtctgggcttcggccggcccaggtatagccaatggagccccagctggcagggagctggctaggagatcaggcaagtcactcgggcccctggtgcatcagatggggaggatggtacctgcctctgtagtcacaggggacaataaatgtgaccctaaaggaagccaccattttcaaaaatgccctgggacatgggaaatgccgtggaaaagcacggcccgtccgcaggacagcgctgtctctgcagctcagacggacgctattaaccctgataacaggtaaacagtgtgcctgcttcagctgcaaattagacacggctttatctctgttcggtaaggctggtgaaagtgacagaggcctcctgaggaggcctggttatcgctggtggcccatgtcctcgttgccgctcagcccatatccccccaagtgccctctggcccgggtgtgatgcycgtgcagcctcatgagtctgacctggacgctgccctcccctgccgcttgatgccattcctgcatactacttctctgacgcctctcctattttcccgtctgcacatgtgtgccttctcctactcctggaatgttctggattattcataacagactcagggtcaccagagagtagagttgggtcagcaggagagctcagtgttggcttgtgcctctccccaggaaggtctggtatgtgtgtgtgtgcatgtatgtgtgtgtgcatgcatgtacttgcacttacgcacacatgtgcatat

SEQ ID NO: 721103 - DNA, 1207 bp, Homo sapiens
gttccgactcaccgtgcgagggctgggcctgaaaagagctccaagtcccctcgtatggggtgtggggaagaccaggaggcctctgagggacaaaccctgggtgaagggaggccgtggtcaggagcaggggtgtggatgctgatgagggggtgcaggggggcccttcctctggtggggaggggctaatggccatggggaaggggggtatggcaggaggttgtgctggggaactagagccatagggcaaaggtcaaccttgcgggtgaggctttctcacagttggggtgcgaggggcatggtccggggtccagaggtgatttagttgtggattccatggctaaaaatgaagtccagtggggacggccaatgaggaaaatctgaagagggcactgctgtgggagaggtcggcagaggctgtcacggagctccctgccctgtggtcaccggcttcggctcccctggtctgggcttcggccggcccaggtatagccaatggagccccagctggcagggagctggctaggagatcaggcaagtcactcgggcccctggtgcatcagatggggaggatggtacctgcctctgtagtcacaggggacaataaatgtgaccctaaaggaagccaccattttcaaaaatgccctgggacatgggaaatgccgtggaaaagcacggcccgtccgcaggacagcgctgtctctgcagctcagacggacgctattaaccctgataacaggtaaacagtgtgcctgcttcagctgcaaattagacacggctttatctctgttcggtaaggctggtgaaagtgacagaggcctcctgaggaggcctggttatcgctggtggcccatgtcctcgttgccgctcagcccatatccccccaagtgccctctggcccgggtgtgatgctcgtgyagcctcatgagtctgacctggacgctgccctcccctgccgcttgatgccattcctgcatactacttctctgacgcctctcctattttcccgtctgcacatgtgtgccttctcctactcctggaatgttctggattattcataacagactcagggtcaccagagagtagagttgggtcagcaggagagctcagtgttggcttgtgcctctccccaggaaggtctggtatgtgtgtgtgtgcatgtatgtgtgtgtgcatgcatgtacttgcacttacgcacacatgtgcatat

SEQ ID NO: 721104 - DNA, 586 bp, Homo sapiens
caaatggcaaatatatttgcattttgtgataaaatctaaggctagattcagttaagtcactatttcaaatattaattactttttattattaattactattacaggtaaatataacaagatatagtcaaatgattaaggaaaaaamccctcacccttggaaaagagccatgtatttaactgggatggtggtttacttattctttaaactgttttatctttgtaggcacaattccatctttgtatccattatatcttttatctttgtagctactggagtataaagctgtcatgtaacattgactttaaaataaaaatgatcataaatctctaaataatgcttgctcatagtatcaattatgtagccctttaatataatagctctagtaataatgaaatgtttcccaaatatcatttgtcaagtattttttagtatggatatttaaaaacatatctttaattatcagggcttcaaagacaatgtctaccgtaaacgtcgaaagtattttgcggacttggctatgaactataaacagtaagtatatttaaaaaaatatagtcaactttgagataataaaataagtgaata

SEQ ID NO: 721105 - DNA, 1318 bp, Homo sapiens
ttgtttttcaacttaaaaataaataaaatcaaaaccaaggcttcattatcaagtagcacaaagtctccaatctataacctcctttgtctggatatctgcatttaactaccattgccagagctaatcctgacaatgcattcatatttttaacactgaaacacagtaaacagggaaaattttgctcctctaaaacagggcatcttcaggcaatcagaacaactcagaaagtttctgtctgttgcataaaactcccctgtgcaaagagttacacaaaatgctgtcatagtaaaggtagttaactaacggcactaattgttcttgggcagtggccaagtggaacttcagagacctggcattgccagccagaaatcacttgtcatgggaattgtctcctggaatcactttggttgtcccagggtaacgyagggaaagtggttaatgggtcacttgggggtggcatcttcatcagtaaatcacatttactttctcctactaagaattttatttttggccatgaagccaaaagtcagctcttaaataacaagggaagcaaataatcattgaataaaaatagcagaaagaaaaagctgtgcaaagaaatttatgtttttaatttgttatatatgtatatttttatcatactttaagttctagggtacatgtgcacaatgtgcaggaataaaatttatgtttttaaaatttattctacattatgaattctacattagaaaaataaaccatagcctcatcacaggcacttaaatacactgaagctgccaaaacaatctatcgttttgcctacgtacttatcaacttcctcatagcaaactgggagaaaaaagcaatggaatgaataaaatgatagccacaaaaatcaaggtgggagaaatacttattatatgtccataaaaaattttaattaatgcaaagtattaacaccaatgattgcagtaatacagatcttacaaatgatagttttagtctgaacaggactatccaaaagttaattttctatagtaacagtttttaaataaaatatcaattcctgaaacacataaaatggtccatgagtatacaacgagtgaaaaaaaacaaattcagagcaaagataaattaagaagtatctaatattcaaacatagtcaaagagagggagatttctggataatcacttaaacccatggttaaacataaatgcacatatgttaatgtttactgaataacttatctgtgccaagtggtgtattaatgattcatttttatttttcactaaatcttttctctaaagttggtgtagcctgcaactaaatgcaagaaat

SEQ ID NO: 721106 - DNA, 1318 bp, Homo sapiens
ttgtttttcaacttaaaaataaataaaatcaaaaccaaggcttcattatcaagtagcacaaagtctccaatctataacctcctttgtctggatatctgcatttaactaccattgccagagctaatcctgacaatgcattcatatttttaacactgaaacacagtaaacagggaaaattttgctcctctaaaacagggcatcttcaggcaatcagaacaactcagaaagtttctgtctgttgcataaaactcccctgtgcaaagagttacacaaaatgctgtcatagtaaaggtagttaactaacggcactaattgttcttgggcagtggccaagtggaacttcagagacctggcattgccagccagaaatcacttgtcatgggaattgtctcctggaatcactttggttgtcccagggtaacgcagggaaagtggttaatgggtcacttgkgggtggcatcttcatcagtaaatcacatttactttctcctactaagaattttatttttggccatgaagccaaaagtcagctcttaaataacaagggaagcaaataatcattgaataaaaatagcagaaagaaaaagctgtgcaaagaaatttatgtttttaatttgttatatatgtatatttttatcatactttaagttctagggtacatgtgcacaatgtgcaggaataaaatttatgtttttaaaatttattctacattatgaattctacattagaaaaataaaccatagcctcatcacaggcacttaaatacactgaagctgccaaaacaatctatcgttttgcctacgtacttatcaacttcctcatagcaaactgggagaaaaaagcaatggaatgaataaaatgatagccacaaaaatcaaggtgggagaaatacttattatatgtccataaaaaattttaattaatgcaaagtattaacaccaatgattgcagtaatacagatcttacaaatgatagttttagtctgaacaggactatccaaaagttaattttctatagtaacagtttttaaataaaatatcaattcctgaaacacataaaatggtccatgagtatacaacgagtgaaaaaaaacaaattcagagcaaagataaattaagaagtatctaatattcaaacatagtcaaagagagggagatttctggataatcacttaaacccatggttaaacataaatgcacatatgttaatgtttactgaataacttatctgtgccaagtggtgtattaatgattcatttttatttttcactaaatcttttctctaaagttggtgtagcctgcaactaaatgcaagaaat

SEQ ID NO: 721107 - DNA, 1071 bp, Homo sapiens
tcttctttagccatgctcttgggggcactgagatggtgctgctcatagccatggcctttgacagatacatggccatatgtaaacctctccactacctgaccatcatgagcccaagaatgtgtctatactttttagccacttcctctatcattggccttatccactcattggtccaattagtttttgtggtagatttacctttttgtggtcctaatatctttgacagtttttactgtgatctccctcggctcctcagacttgcctgtaccaacacccaagaactggagttcatggtcactgtcaatagtggactcatttctgtgggctcctttgtcttgctggtaatttcctacatcttcattctgttcactgtttggaaacattcttctggtggtctagccaaggccctctctaccctgtcagctcatgtcactgtggtcatcttgttctttgggccactgatgtttttctacacatggccttctcccacatcacacctggataaatatcttgctatttttgatgcatttattactccttttctgaatccagttatctacacattcaggaacaaagacatgaaagtggcaatgaggagactgtgcagtcgtcttgcgcattttacaaagattttgtaaatggcttggctgtcaagatgtgtaactatggattactcctcatgctgattgcataaaagaaactgcaatttcagagaaatactgaagactcaggccatactatatgcctgaaaatttatgaaatcatggtaacaatttcaccattaaattagaagtgatgttatcctttggcacagtgtgcatcaaagtgctaaatattaaatcttaatgtcttttgtaacctaccactttgaaagaccttgttctaggtgagtgccatgtaaytgaacaaataacaatactatgtcttttattttttctactggacagattattctattgatagacaaactacacattcaatctgtttaccacctaactcctatttatttatttatttagttagttagttacttatttgagttggagtctcgctctgtcacccaggctagag

SEQ ID NO: 721108 - DNA, 882 bp, Homo sapiens
ttcctgtccctctttttcatattttaagtggtgtcctgagccctttctacccatctttatcggagtgacttcaaacaatgatctacatttaaaaaaccttagaattatcatcctcatttggattggtgataagctcacatgactttaattcatttcccatttytgttgggcagcacagggctgagcaacctgagcagaggacagagtgagttgatcagtagatgatctctggagtatctttttttgttacattctaggcttaatagtaggagtgtgggagaggtctgtgctctgtgttaaacacaatcatgagcttcagaacactgcaaaggcacactgggattgagttgcttatcaccactgataatcttttttccttttgtaagagtgagctaagtggagagcttaattctgtcttcatggaaaagatcagatttaaacaactattctgccctgcttaaaaaagtgttcagtggggactaatacaaagtgtggtacataaagaccttaagttttaaatagagatagaacatgaaagactggctggaaggcagtagtaccaacaatgagtggacaaacctgttttccaaatttttagcaacactaggaataatctaatataaatctttgctaaccttatatataaaaataaagtgttattttaaagataaaacaaaagtcttgtgtaaaaattaaaacagttttaggagtaagtggaaattggagacattgatagagtaactttcagcttctagggagcaatttagaatttaatcattcacttaaataaattgcttcagtaggaaggttgctgatgataatcagtgtgaaaggaacttaagttattccaagctgagttgccctttatgaatgtaaatgcca

SEQ ID NO: 721109 - DNA, 1653 bp, Homo sapiens
ccccgtctctactaaaaatacaaaattagcagggcgtggtggtgcatgcctgtaatcccagctactcgggaggctgaggcaggagaattgcttgaacctgggaggcggaggttgcagtgagccgagatcgcaccattgcactctagcttgggcaacaagagtgaaactccgtctcaaaaaaaaaaaaaaaatatatatatatatatatacacacacatggacaatttctgcgtctgatctttgggttttcaggaacctgggatctgcctggaaataaccctggtgaaactttcttcttggccttgaggattcaataccaccaagaatcagtggcccagctgagctatagcaaatccagttggaatttaattcagctgccccaaatccttcacaaaccaaattctgaaaatggacccacctgactaatttgaaataaaatcacttgagcaaaaaccagctacccagaattataagcctaagaggacagatgtgccaccattcaattcaattgggtagaactagtcttaatccttttctccttttgtacttaatattttttttttatttttaatgatttttcaaatttagctagaaagaaaaaaaggccaggcatgctggctcactcacgcctgtaatcccagcacttcgggaagcctaggtgtgcagatcacctgaggtcaggagttcgacatcagcctgaccaacatggtgaaaccgcatttctactaaaaatacaaaattagctgggcgtggtggcacatgcctgtaatcccagctacttgagagactgaggcaggagaatcgcttgaacccgggaggtggaggtttctgtgagccgagattgcgccattgcactctagtctgggcaacaagagcgaaactctgtctcaaaaagaaagaaagaaagaaaaagaaaaaccaaaaacccaggaactgtaggtcagtaattacggattgcactagggcttagacactgaatatttctttgggatggggtgggcaatatagggggaataatcttattgtgttaaaaaaaaaaaaaaaagcagccgggtgcagtggctcacacctgtaattccagcactttggaaggcagaggcaggcggatcatctgaggtcaggagttccagaccagcctgggcaacatagcaaaaccccatctctactaaaaatgcaaaaattagccaggcatggcagcgcatgcctgtaatcccagctactcaggaggctgaggcagaagaattgcttgaaccccggaggtggaagttgcagtgagcagagattgtgccactgcactccagcctgggtgacagagcgagattctgtctcaaaaaaaaaaaagggggggggcatttcctaggaccctccaraagcagtgttctcatccagagagcctgagaaaatagcctctcaattaagattaatatcagagcacataaagaataatggtttcattaaatattcaattataagccaaactccttttctctggctggaaataccttctcaatctcacaaagattttgacattagagagtaaaggacaagaagtacagacaaaacaagcttataagaatagtatgtataagattcctgtcatctttgtgtgggacagaaaatctaaggaaaagagctggaagttgggttttcatg

SEQ ID NO: 721110 - DNA, 784 bp, Homo sapiens
cctctctcatatacccatgcctcaaagtctagttttacgttaaagttttggattcatgcacaccatcccaagctgtggtgtgctttagatgatcttgcctttaatggttttcttattaaaactttattcgtatcagtgtaaaagttcataatggatatttcatatcttgcagtgatgctactggttggtwgtatgaccacctttaggggctattcataatctctttttgggacctggttttaagagtagctattatttttagatgtacatagtctctgtcttaaatatcagcttaattctcaacaggtcccaacctgtgttgacagaattacagctgttaatctgatttgcctgatcttgcagagacgctaaaccatgggaattgtattctcctgcagcaaatataagcttgcaccaacaggctggcactgtgaaggaactgaagcatctctgtatttagtgtctgtgctgaagtgctgacaaagcatcaaccccatgctctgcaaaatagtaattactaaagcggggagatgtaaagaaggaaacaaacctctttaccttgtcagcgcataaaagcaagggtctgagaaatggagcattccctctcacttatgtttctcaagttccctggctaaaagtaaacaatctcccagagtaacctggatttctgtgcttatctacgctttcagcaaatactgccttagtgcatgtttgaggatgagggagagagaagagagttggtcctccttgtggacatccttacctccccactggcctgaaatga

SEQ ID NO: 721111 - DNA, 1656 bp, Homo sapiens
tgtgatcccagctattcaagaggttgagctgggagaatcacttgaacctgggaagtggaggttgcagtgagccaagatcctgccactacactcccgcctgggggacacggtgagaccctgtctctctctatagatagatagatagatagatagatagatagatagatagatagatagattacaataaggtctttttaaacaaattcatctcagggtggactcctcatctccagtgatacgagtggccattcctttcctatacrggggtgggaaacagagggcaccttcacaaagggaaattcatgcttttaggcagataagggagggcagagactacttcctgcctctgttgattctcaattgccttcccttcaaaataatcctcatgccagtgtcagatgttgcagaggtatattctgatccgcttcaaccacacgtgtggtttttagtttaatcttcctgagccttactttcctcacttccaaaatgggataaaactttgcagatgtacagttaaaataaaatgcaacaatccatttaaactactcaagacaacagtaagtgctcaacaaacataaatcatcatcattttaaaaatcatgcaccactgtccaatcacccctaggggataggggcaagccaagctggccagtccaccccacatgcgcatgaggtcctgcaggcgagggcacccagatgaccaggagtaaagagagccagaaaatgaggggggaagtgtcctttgggtgccaaggtcaaagctagaaaagccaaaatctgtcttcaaggttaggggactaacacagagacagaaataagaaacaaggaagctcaggcagattcaggaactgagtaggacctagccaagagcaacgtgctgagagggaaggtctggaacatgctcctgtaggcggggctgaagaacccagcctggggtggccccagtgggtctgcttgattccaaagacaggaaggaactgagcagacactactgaccatcacccaccagtgagcttggagacacctgccaacaaaagactggagaaccttgttataaagactctttctactttctggaaaaagagaacattaaaccttcccccaaacccccaaggtaatagggggaatattcggtacttctcattgtttcccccatctgaaactgaagatatgaaggaagagatcattgaacaaaacaagagcctttaacagacggactgtgtgccaagcctttttctaaatgtttttcctacattaatcctcaaatccccacaaccctatgaagtagacactgtcatcatccccactttgcagatcagtaacgtgaggcttagtgatggtgagtaacctgccctaaggcatcccgccctcagaccccaggctgcctgacatcaaaccaccccaaccactctgcttgactgcctgtgctgaggcggagccttggagggataaaaacctggacagaaggaaggacctcttcctctgagggcggagggaaagtgggcaaggtcaagtctggcattggaaaaggaagtcagctgaggtctggcttctatgaaagagttgaaagaggagtgatcgtggtgaacactaaggctgaggatttcctggaaggggctggggccctgagaggctgggagaaggagcagggagggg

SEQ ID NO: 721112 - DNA, 1656 bp, Homo sapiens
tgtgatcccagctattcaagaggttgagctgggagaatcacttgaacctgggaagtggaggttgcagtgagccaagatcctgccactacactcccgcctgggggacacggtgagaccctgtctctctctatagatagatagatagatagatagatagatagatagatagatagatagattacaataaggtctttttaaacaaattcatctcagggtggactcctcatctccagtgatacgagtggccattcctttcctatacgggggtgggaaacagagggcaccttcacaaagggaaattcatgcttttaggcagataagggagggcagagactacttcctgcctctgttgattctcaattgccttcccttcaaaataatcctcatgccagtgtcagatgttgcagaggtatattctgatccgcttcaaccacacgtgtggtttttagtttaatcttcctgagccttactttcctcacttccaaaatgggataaaactttgcagatgtacagttaaaataaaatgcaacaatccatttaaactactcaagacaacagtaagtgctcaacaaacataaatcatcatcattttaaaaatcatgcaccactgtccaatcacccctaggggataggggcaagccaagctggccagtccaccccacatgcgcatgaggtcctgcaggcgagggcacccagatgaccaggagtaaagagagccagaaaatgaggggggaagtgtcctttgggtgccaaggtcaaagctagaaaagccaaaatctgtcttcaaggttaggggactaacacagagacagaaataagaaacaaggaagctcaggcagattcaggaactgagtaggacctagccaagagcaacgtgctgagagggaaggtctggaacatgctcctgtaggcggggctgaagaacccagcctggggtggccccagtgggtctgcttgattccaaagacaggaaggaactgagcagacactactgaccatcacccaccagtgagcttggagacacctgccaacaaaagactggagaaccttgttataaagactctttctactttctggaaaaagagaacattaaaccttcccccaaacccccaaggtaatagggggaatattcggtacttctcattgtttcccccatctgaaactgaagatatgaaggaagagatcattgaacaaaacaagagcctttaacagacggactgtgtgccaagcctttttctaaatgtttttcctacattaatcctcaaatccccacaaccctatgaagtagacactgtcatcatccccactttgcagatcagtaacgtgaggcttagtgatggtgagtaacctgccctaaggcatcccgccctcagaccccaggctgcctgacatcaaaccaccccaaccactctgcttgactgcctgtgctgaggcggagccttggagggataaaaacctggacagaaggaaggacctcttcctctgagggcggagggaaagtgggcaaggtcaagtctggcattggaaaaggaagtcagytgaggtctggcttctatgaaagagttgaaagaggagtgatcgtggtgaacactaaggctgaggatttcctggaaggggctggggccctgagaggctgggagaaggagcagggagggg

SEQ ID NO: 721113 - DNA, 1656 bp, Homo sapiens
tgtgatcccagctattcaagaggttgagctgggagaatcacttgaacctgggaagtggaggttgcagtgagccaagatcctgccactacactcccgcctgggggacacggtgagaccctgtctctctctatagatagatagatagatagatagatagatagatagatagatagatagattacaataaggtctttttaaacaaattcatctcagggtggactcctcatctccagtgatacgagtggccattcctttcctatacgggggtgggaaacagagggcaccttcacaaagggaaattcatgcttttaggcagataagggagggcagagactacttcctgcctctgttgattctcaattgccttcccttcaaaataatcctcatgccagtgtcagatgttgcagaggtatattctgatccgcttcaaccacacgtgtggtttttagtttaatcttcctgagccttactttcctcacttccaaaatgggataaaactttgcagatgtacagttaaaataaaatgcaacaatccatttaaactactcaagacaacagtaagtgctcaacaaacataaatcatcatcattttaaaaatcatgcaccactgtccaatcacccctaggggataggggcaagccaagctggccagtccaccccacatgcgcatgaggtcctgcaggcgagggcacccagatgaccaggagtaaagagagccagaaaatgaggggggaagtgtcctttgggtgccaaggtcaaagctagaaaagccaaaatctgtcttcaaggttaggggactaacacagagacagaaataagaaacaaggaagctcaggcagattcaggaactgagtaggacctagccaagagcaacgtgctgagagggaaggtctggaacatgctcctgtaggcggggctgaagaacccagcctggggtggccccagtgggtctgcttgattccaaagacaggaaggaactgagcagacactactgaccatcacccaccagtgagcttggagacacctgccaacaaaagactggagaaccttgttataaagactctttctactttctggaaaaagagaacattaaaccttcccccaaacccccaaggtaatagggggaatattcggtacttctcattgtttcccccatctgaaactgaagatatgaaggaagagatcattgaacaaaacaagagcctttaacagacggactgtgtgccaagcctttttctaaatgtttttcctacattaatcctcaaatccccacaaccctatgaagtagacactgtcatcatccccactttgcagatcagtaacgtgaggcttagtgatggtgagtaacctgccctaaggcatcccgccctcagaccccaggctgcctgacatcaaaccaccccaaccactctgcttgactgcctgtgctgaggcggagccttggagggataaaaacctggacagaaggaaggacctcttcctctgagggcggagggaaagtgggcaaggtcaagtctggcattggaaaaggaagtcagctgaggtctggyttctatgaaagagttgaaagaggagtgatcgtggtgaacactaaggctgaggatttcctggaaggggctggggccctgagaggctgggagaaggagcagggagggg

SEQ ID NO: 721114 - DNA, 1656 bp, Homo sapiens
tgtgatcccagctattcaagaggttgagctgggagaatcacttgaacctgggaagtggaggttgcagtgagccaagatcctgccactacactcccgcctgggggacacggtgagaccctgtctctctctatagatagatagatagatagatagatagatagatagatagatagatagattacaataaggtctttttaaacaaattcatctcagggtggactcctcatctccagtgatacgagtggccattcctttcctatacgggggtgggaaacagagggcaccttcacaaagggaaattcatgcttttaggcagataagggagggcagagactacttcctgcctctgttgattctcaattgccttcccttcaaaataatcctcatgccagtgtcagatgttgcagaggtatattctgatccgcttcaaccacacgtgtggtttttagtttaatcttcctgagccttactttcctcacttccaaaatgggataaaactttgcagatgtacagttaaaataaaatgcaacaatccatttaaactactcaagacaacagtaagtgctcaacaaacataaatcatcatcattttaaaaatcatgcaccactgtccaatcacccctaggggataggggcaagccaagctggccagtccaccccacatgcgcatgaggtcctgcaggcgagggcacccagatgaccaggagtaaagagagccagaaaatgaggggggaagtgtcctttgggtgccaaggtcaaagctagaaaagccaaaatctgtcttcaaggttaggggactaacacagagacagaaataagaaacaaggaagctcaggcagattcaggaactgagtaggacctagccaagagcaacgtgctgagagggaaggtctggaacatgctcctgtaggcggggctgaagaacccagcctggggtggccccagtgggtctgcttgattccaaagacaggaaggaactgagcagacactactgaccatcacccaccagtgagcttggagacacctgccaacaaaagactggagaaccttgttataaagactctttctactttctggaaaaagagaacattaaaccttcccccaaacccccaaggtaatagggggaatattcggtacttctcattgtttcccccatctgaaactgaagatatgaaggaagagatcattgaacaaaacaagagcctttaacagacggactgtgtgccaagcctttttctaaatgtttttcctacattaatcctcaaatccccacaaccctatgaagtagacactgtcatcatccccactttgcagatcagtaacgtgaggcttagtgatggtgagtaacctgccctaaggcatcccgccctcagaccccaggctgcctgacatcaaaccaccccaaccactctgcttgactgcctgtgctgaggcggagccttggagggataaaaacctggacagaaggaaggacctcttcctctgagggcggagggaaagtgggcaaggtcaagtctggcattggaaaaggaagtcagctgaggtctggcttctatgaaagagttgamagaggagtgatcgtggtgaacactaaggctgaggatttcctggaaggggctggggccctgagaggctgggagaaggagcagggagggg

SEQ ID NO: 721115 - DNA, 1109 bp, Homo sapiens
gacgaggtttcaccatgttggccaggatggtctcaaactcctgacctcaagggatccactcacctcagcttcccaaagtgctgggattacaggcttgaaccaacatgcccagcctctcagaatgaacttttaataccatttggtgcttggcttcttccgtcctagcggcgaagagcctttctctgcttatagggtcaccagcatggccaggggacctgcccagggcacaacgcagccaggctcaaagagctgttggagaccttgctgggtcaacytgagacccttgtaactaacctttgtgaaaatcgacaaaaatatgacaggaccacccgaatgcaaaagctggtcatcttctttttaaaaatgcatgaatgtatactcagttgtctgaagagtagttggctgtatcctatacttgcagtgctgggatcctcaagaagcatcggtttcatgattttacaggtcatgaaaaagagtctacagatcagctggaggtacacagctggttagcagcagagcctagacaaagaccctgccctccgatcccatcacaggggtgcctccaatacatgaagtgcagctctctgtggtgcagaagtgtgccaagaagtggccatgccaaactgttcttataaagacagctctgaaacctcttaaaaacagggagagttgaaattgtatgcgaacaagatttgtatggctctctctggaaacatccgaagatcctaattcttttgatccgtgagactttgggatagcatcttcctcagaacgtgatctcgagcagccacatgtcacagcacttcccccaggtgctgctgaaatgtttgtgccatgatgcaagaagggtcaggaaacttcccattattatatttgctattattttttgtaataaccttagaatatatcaacgttggtgaccaccactttccagcacttcaaccccctggcaatctttcttgtttcttggagagcttggcagagtcatcttggaacagagaatgtacacttcagtgctaaaggaaagatgctctatgtggcaggcaaagagcccagaggacattctatgttggaagaaggagaacatcctctcactcagcatccacctt

SEQ ID NO: 721116 - DNA, 1197 bp, Homo sapiens
tcaaatcccaaaacaaaatttcattgttattcattggaaaaaacatatctgccaaggcaggattgggagggtatggaaaaaatgtgaactcctataaatggctggtaggaatataatttggtatgcatgttatggagatcaatttggaagtatctggtgaaactgaagattaagaatatcctgttggccagtgattcaagttctagatacatatctcaagaaatgctcacatgtacacaaggaaatatgtcaattatttcattgcagcattgtttataagtcaaaaattggaaataactgagatgctcatcaagaagaaaatggatacattgtgataaacttattcaatgaactacagcatttaaatgaatgatttagagaaagatggtagtgtggatacatctcaaaaacatgagtggtaaaacaagtcccagaaggttttgtacagaatgataccatttatatgaagtttcaaaatcagaaaaacaatcctaggtatgcatacatataataaggatataaaaccactcatggtatcattctgataaacatcaaattcagagctgcaattacttatgtggagtaaagggagacaaatgaaatgagacagggctatacagatttcaggcacaactgtgatcattcctttctaaaagaaaaaatatataggtaaaaataagactataaaagttgggtgatagatacttaggtatttgttacattgttttctgcatttttctgtattcttgaaatgtttcataataaaaaaggcacaatacgaatactagcagtttcgttaataaatgttggctgacaattaggtggatcaaggtgacttaacaaggtgaattaactcattaatacaacaatagttgaagacaactattttcaagtgtaggaagactactgattcttccagtgcttacatttactaatacataatataatatgtgccaggcattatggaaagtggtttacatgcattaacttatttatctccataatcactctatgaagatgacgctagcatcattctcattttatagttagagaacaggctaagagtggaaaggtaaagagtgaaaggtcacataggtggtaagcrgcagaactgggagacaagcaagcccatgtgtgtctaagtcccaaacctatgcacttaatcactatattatgctatgaaaggtttcaacttta

SEQ ID NO: 721117 - DNA, 1181 bp, Homo sapiens
tgccgggcgtggtggctcacgtctgtaatcccagcactttgggaggccaaggagggaggatcaggaggtcaggagatggagaccatcctggctaacacggtgaaatcccgtctctactaaaaatacaaaaaattagcagggcgtggtggcgggcgcctgtagtcccagctactcgggmggctgaggcgggagaatggtgtgaacccgggaggcggagcttgcagtgagccaagatcgcaccactgcactccagcctgggcgacagaacgagactccatctcaaaaaaaaaaaaaaaaaaaaaaaaacaaggagtgacttggtttcatagacacaaataaaactgatatgccaagtttaattttacaaaatatatatgtattaagttctactctcaactacagatattctccaatgtcatttttctaattgaatataggtttagtccagacatatcttttctgtaatttttaaaacatagatgttattaaatacataaatttcacctgaatatttttaagaagtccctcctgtttctttagagattcttggactttagttgtaagacctccatagactcgatctagttcagtaacagaaagagcttcttcatttatcatgccatcttgagccagggctgtcaaaaacttgcttgtcatgtcaaaattcacagatttcaagtcattctccagaccctctctttccttctttacttcatcaagatttgacaataaggattttaagacatttacaacctaaacaataaaaaagacactttagtttaactgaaaaaaaaagccaatttcaagaaggaaataatatataaaggttcatttgggctgagagagagatgagttctcagagagccaaatataaattgaacatcaggtttatgtagatagacactgtaccttcagttgactcatattaaaacaaaagcagcattaataacagtagccaacagctacaatttactgaactcctatgtgttaggcaccatgctaaacacttcagaaatataattttatgtattccttacaataccccatggggtatatatatttatgacctctcttccaaagatagggataacgagtctcaaaaaaattaagtgacatggttatacagttactaaggggcagaggtgaaatttgagacctaagtctgactagttccaaaacca

SEQ ID NO: 721118 - DNA, 1181 bp, Homo sapiens
tgccgggcgtggtggctcacgtctgtaatcccagcactttgggaggccaaggagggaggatcaggaggtcaggagatggagaccatcctggctaacacggtgaaatcccgtctctactaaaaatacaaaaaattagcagggcgtggtggcgggcgcctgtagtcccagctactcgggcggctgaggcgggagaatggtgtgaacccgggaggcggagcttgcagtgagccaagatcgcrccactgcactccagcctgggcgacagaacgagactccatctcaaaaaaaaaaaaaaaaaaaaaaaaacaaggagtgacttggtttcatagacacaaataaaactgatatgccaagtttaattttacaaaatatatatgtattaagttctactctcaactacagatattctccaatgtcatttttctaattgaatataggtttagtccagacatatcttttctgtaatttttaaaacatagatgttattaaatacataaatttcacctgaatatttttaagaagtccctcctgtttctttagagattcttggactttagttgtaagacctccatagactcgatctagttcagtaacagaaagagcttcttcatttatcatgccatcttgagccagggctgtcaaaaacttgcttgtcatgtcaaaattcacagatttcaagtcattctccagaccctctctttccttctttacttcatcaagatttgacaataaggattttaagacatttacaacctaaacaataaaaaagacactttagtttaactgaaaaaaaaagccaatttcaagaaggaaataatatataaaggttcatttgggctgagagagagatgagttctcagagagccaaatataaattgaacatcaggtttatgtagatagacactgtaccttcagttgactcatattaaaacaaaagcagcattaataacagtagccaacagctacaatttactgaactcctatgtgttaggcaccatgctaaacacttcagaaatataattttatgtattccttacaataccccatggggtatatatatttatgacctctcttccaaagatagggataacgagtctcaaaaaaattaagtgacatggttatacagttactaaggggcagaggtgaaatttgagacctaagtctgactagttccaaaacca

SEQ ID NO: 721119 - DNA, 1181 bp, Homo sapiens
tgccgggcgtggtggctcacgtctgtaatcccagcactttgggaggccaaggagggaggatcaggaggtcaggagatggagaccatcctggctaacacggtgaaatcccgtctctactaaaaatacaaaaaattagcagggcgtggtggcgggcgcctgtagtcccagctactcgggcggctgaggcgggagaatggtgtgaacccgggaggcggagcttgcagtgagccaagatcgcaccactgcactccagcctgggcracagaacgagactccatctcaaaaaaaaaaaaaaaaaaaaaaaaacaaggagtgacttggtttcatagacacaaataaaactgatatgccaagtttaattttacaaaatatatatgtattaagttctactctcaactacagatattctccaatgtcatttttctaattgaatataggtttagtccagacatatcttttctgtaatttttaaaacatagatgttattaaatacataaatttcacctgaatatttttaagaagtccctcctgtttctttagagattcttggactttagttgtaagacctccatagactcgatctagttcagtaacagaaagagcttcttcatttatcatgccatcttgagccagggctgtcaaaaacttgcttgtcatgtcaaaattcacagatttcaagtcattctccagaccctctctttccttctttacttcatcaagatttgacaataaggattttaagacatttacaacctaaacaataaaaaagacactttagtttaactgaaaaaaaaagccaatttcaagaaggaaataatatataaaggttcatttgggctgagagagagatgagttctcagagagccaaatataaattgaacatcaggtttatgtagatagacactgtaccttcagttgactcatattaaaacaaaagcagcattaataacagtagccaacagctacaatttactgaactcctatgtgttaggcaccatgctaaacacttcagaaatataattttatgtattccttacaataccccatggggtatatatatttatgacctctcttccaaagatagggataacgagtctcaaaaaaattaagtgacatggttatacagttactaaggggcagaggtgaaatttgagacctaagtctgactagttccaaaacca

SEQ ID NO: 721120 - DNA, 1181 bp, Homo sapiens
tgccgggcgtggtggctcacgtctgtaatcccagcactttgggaggccaaggagggaggatcaggaggtcaggagatggagaccatcctggctaacacggtgaaatcccgtctctactaaaaatacaaaaaattagcagggcgtggtggcgggcgcctgtagtcccagctactcgggcggctgaggcgggagaatggtgtgaacccgggaggcggagcttgcagtgagccaagatcgcaccactgcactccagcctgggcgacagaacgagactccatctcaaaaaaaaaaaaaaaaaaaaaaaaacaaggagtgacttggtttcatagacacaaataaaactgatatgccaagtttaattttacaaaatatatatgtattaagttctactctcaactacagatattctccaatgtcatttttctaattgaatataggtttagtccagacatatcttttctgtaatttttaaaacatagatgttattaaatacataaatttcacctgaatatttttaagaagtccctcctgtttctttagagattcttggactttagttgtaagacctccatagactcgatctagttcagtaacagaaagagcttcttcatttatcaygccatcttgagccagggctgtcaaaaacttgcttgtcatgtcaaaattcacagatttcaagtcattctccagaccctctctttccttctttacttcatcaagatttgacaataaggattttaagacatttacaacctaaacaataaaaaagacactttagtttaactgaaaaaaaaagccaatttcaagaaggaaataatatataaaggttcatttgggctgagagagagatgagttctcagagagccaaatataaattgaacatcaggtttatgtagatagacactgtaccttcagttgactcatattaaaacaaaagcagcattaataacagtagccaacagctacaatttactgaactcctatgtgttaggcaccatgctaaacacttcagaaatataattttatgtattccttacaataccccatggggtatatatatttatgacctctcttccaaagatagggataacgagtctcaaaaaaattaagtgacatggttatacagttactaaggggcagaggtgaaatttgagacctaagtctgactagttccaaaacca

SEQ ID NO: 721121 - DNA, 1181 bp, Homo sapiens
tgccgggcgtggtggctcacgtctgtaatcccagcactttgggaggccaaggagggaggatcaggaggtcaggagatggagaccatcctggctaacacggtgaaatcccgtctctactaaaaatacaaaaaattagcagggcgtggtggcgggcgcctgtagtcccagctactcgggcggctgaggcgggagaatggtgtgaacccgggaggcggagcttgcagtgagccaagatcgcaccactgcactccagcctgggcgacagaacgagactccatctcaaaaaaaaaaaaaaaaaaaaaaaaacaaggagtgacttggtttcatagacacaaataaaactgatatgccaagtttaattttacaaaatatatatgtattaagttctactctcaactacagatattctccaatgtcatttttctaattgaatataggtttagtccagacatatcttttctgtaatttttaaaacatagatgttattaaatacataaatttcacctgaatatttttaagaagtccctcctgtttctttagagattcttggactttagttgtaagacctccatagactcgatctagttcagtaacagaaagagcttcttcatttatcatgccatcttgagccagggctgtcaaaaacttgcttgtcatgtcaaaattcacagatttcaagtcattctccagaccctctctttccttctttacttcatcaagatttgacaataaggattttaagacatktacaacctaaacaataaaaaagacactttagtttaactgaaaaaaaaagccaatttcaagaaggaaataatatataaaggttcatttgggctgagagagagatgagttctcagagagccaaatataaattgaacatcaggtttatgtagatagacactgtaccttcagttgactcatattaaaacaaaagcagcattaataacagtagccaacagctacaatttactgaactcctatgtgttaggcaccatgctaaacacttcagaaatataattttatgtattccttacaataccccatggggtatatatatttatgacctctcttccaaagatagggataacgagtctcaaaaaaattaagtgacatggttatacagttactaaggggcagaggtgaaatttgagacctaagtctgactagttccaaaacca

SEQ ID NO: 721122 - DNA, 1626 bp, Homo sapiens
ttaattttattaaaaggtaattggcatctgcaatttcatgcagtctaagtgaaacccataaagaaatgtgtatgaaataggaaagcaacaaaagctcataacattttaaaattagaaatcagattcaaaaccaatcatgatctattttaaatttctctctataacatttcaattgagacataaaacacactttatacaacatgcctcactattttattaacagcatgacttccctttccccaatccccaaaccatgttcccatctacaccccaccccacccaactctcacctcttccattagcattattacaaacatattttacaaatcttatatcaagcttttccactctgtctcttttaaatgtagaaatatcttatatataaacccgaataccacaaatcttcacatttatattttctaaagcagttaaatcgttatagacaattctacctaaaaagcaaaatgygcttgacaatatgtcatgttatgttaagttgaccagacacagaagtcatttctgtcggatttcttgtcgatgtttgcattaagttggagctttctgatctcggctcctgttgtgccagtaatttgaaaggtcacctctctgttggcctttggcttatgcaatgcagtctgtcaattaaaagtctcagccgggcgcggtggctcacgaggtcaggagatggagaccatcctggctaacacggtgaaacccagtctctactaaaaatacaaaaattagccgggtgtggcaggcgcctgtagtcccagctactcgcgaggctgaggcaggagaatggcgtgaacccgggaggcggagcttgcagtgagctgagatcgcaccattgcactccggcctgggatactgagtgagactccgtctcaaaaaaaaagaaaaaaaaaagtcttgtaaatttgtacatagaatattgaagttagaagaggcttttcactctctgggctctaatactgcccagaggttgtttcttgttcccataagaaaatcctgtatgtctctccattaccattcctgatacttacctccaattcaaaatgtggccagttccaccttctaagcctttataccaaattgactgggtaggtttattatgaatctgtgtctttgtccaaactctacattagacctcccaggagagttcaaactaaaaactaatgagtaagtgcaatattacaattgaaacgggagcaaacataatttcaagtaggactcataaaaactgtgggaccaaaagaggaaaagtgcacgccgaatgttctcagttctgaaatggctcttgtgaaatatctatgtgaaaacacttcaaggacctaaaaaaaaaatggtgaaaaagagaacaatcttccttgcaaaacaactccagagttaatgccagagctttctatcaaaacatccatgctaaattcaccagaaagattcagaagatcaatgacaggagtaagggaaaaacaaggacattttgtgagtggaacatataatgaccctgcagcaggagacccagagagtgggaaaaaagaaatggagggtgtaagtaaattaattgcctgtaacatgtttaatgaaataagtagacgtgtgatgcaaatttcttaatagtcaaacatt

SEQ ID NO: 721123 - DNA, 456 bp, Homo sapiens
cttaaagatgagtgtgttttgtttttggtttcgttgcctgctgataaaagtaacttcagctcttttgatttgtctttgcctggtacatcttttactatcctttacattttagctttttcatgtccttcatttttacatgtttttcttgtagayagactattcagtagctatttgttgaatgtcccctggaagccatattcttggttaggcactaggaatgcaatgaagaagagacattaggttcctgatactctggaatgtacattgacatgagagaaataaatacataagtacacaacaagtaactaaatggttatggattgtgatcagtactatgaaatacagaaacaaagtgttaggataaaggataatgagtatagactatctaagatggggtggttagggaagatgaccaagaggagccaatgtttaagctaaaacctgaaggacaaaaag

SEQ ID NO: 721124 - DNA, 948 bp, Homo sapiens
ggatttttttttaagatataagggtcttgccatgttgcccacactggactggaactcctgggctcaagtgatcctccagcctcagcctcttgcatagctggaactataggtgtgggccactgcacccagctatgccccccaattcaaagcaaagagttttcttcttytttttctcttcttctttttttttcttcttcttcttcttttttttttttttttttttttttttttgagacatagtcttgctatatcacccaggctggagtacagtggtgcaaccttggctcactgcaacctctgcctcctgggttcaaatgattctcctgcctcagcctcccaagtacctgggattataggcatgtgccaccacacccagctaatttttgtatttttagaagaaactggggtctcaccatgttggccagtctggtctcaaactcctggcctcaatcaatccacccacctcagcctcctaaagtgctggaattacaggcgtcagccactgcgcctggcaaagcagggagttttctactgattttattctcggagactcaaggtgaatgttactcagtaatcaatgttgagcaatattctactattgagtagtggcaccaactgaagatgagtttattaacataatattttccttaatcccacaaatattattgagattctactttgttctaagctctgctgtggacactgtagatatcaccgtttcttttctccccaacactcaagagccaaccactctcatgaatctaaagtgtaagtttcctatgggtgctgttatatccccattttacaggtgaagaaattgaggctcttgaggaaattaaggaaattgcccaaggtcagaaggttggtaggtatcagaaccaggtgatacatacaggtgatataagtgagatgaagaataaaaggcgggtcaacaagaggggcctgagg

SEQ ID NO: 721125 - DNA, 948 bp, Homo sapiens
ggatttttttttaagatataagggtcttgccatgttgcccacactggactggaactcctgggctcaagtgatcctccagcctcagcctcttgcatagctggaactataggtgtgggccactgcacccagctatgccccccaattcaaagcaaagagttttcttcttctttttctcttcttctttttttttcttcttcttcttcttttttttttttttttttttttttttttgagacatagtcttgctatatcacccaggctggagtacagtggtgcaaccttggctcactgcaacctctgcctcctgggttcaaatgattctcctgcctcagcctcccaagtacctgggattataggcatgtgccaccacacccagctaatttttgtatttttagaagaaactggggtctcaccatgttggccagtctggtctcaaactcctggcctcaatcaatccacccacctcagcctcctaaagtgctggaattacaggcgtcagccactgcgcctggcaaagcagggagttttctactgattttattctcggagactcaaggtgaatgttactcagtaatcaatgttgagcaatattctactattgagtagtggcaccaactgaagatgagtttattaacataatattttccttaatcccacaaatattattgagattctactttgttctaagctctgctgtggacactgtagatatcaccgtttcwtttctccccaacactcaagagccaaccactctcatgaatctaaagtgtaagtttcctatgggtgctgttatatccccattttacaggtgaagaaattgaggctcttgaggaaattaaggaaattgcccaaggtcagaaggttggtaggtatcagaaccaggtgatacatacaggtgatataagtgagatgaagaataaaaggcgggtcaacaagaggggcctgagg

SEQ ID NO: 721126 - DNA, 2268 bp, Homo sapiens
  misc_feature 581, 582, 583, 584, 585, 586, 587, 588, 589, 590, 591, 592,593, 594, 595, 596, 597, 598, 599, 600, 601, 602, 603, 604,605, 606, 607, 608, 609, 610, 611, 612, 613, 614, 615, 616,617, 618, 619, 620, 621, 622, 623, 624, 625, 626, 627: n = A,T,C or G
  misc_feature 628, 629, 630, 631, 632, 633, 634, 635, 636, 637, 638, 639,640, 641, 642, 643, 644, 645, 646, 647, 648, 649, 650, 651,652, 653, 654, 655, 656, 657, 658, 659, 660, 661, 662, 663,664, 665, 666, 667, 668, 669, 670, 671, 672, 673, 674: n = A,T,C or G
  misc_feature 675, 676, 677, 678, 679, 680: n = A,T,C or G
agtacccaaaatagaatgatgattgatattatttaatactggagtgcctctccagtattaaataaaatgtgctaagcattatctagagcaaagatttagcccatcctcccgaagagcccatgctcaacaaaaaacacagacctcagccgggcgcggtggcttatgcctgtaatcccagcactatcggaggccagggcgggcggatcacctgcattcaggagttcaagaccagcatgaccaacatggagaaaccccgtctctactaaaagtacaaaattagccaggcctggtggcgcatgcctgtaatcccagctgcctaggaggctgaggcaggagaatcgcttgaacctgggaggcggatgttgtggtgagccgagatcatgccattgcactccagcctgggcaataagagtaaaactccatctcaaaaaaaaaaaaatacagatctcaggaatgcttttgggaaaaaatgaaatagtaatgaggtttcagatacttagaagtgtgaaagccatacagttctggtgaagttattcccgtcagttgcctagaatataaaatgtgctcacgtgatgtagaannnnnnnnnnnnnnnnnnnnnnnnnnnnnnnnnnnnnnnnnnnnnnnnnnnnnnnnnnnnnnnnnnnnnnnnnnnnnnnnnnnnnnnnnnnnnnnnnnnntgaggctgggcaaggtggttcacgcctgtaatcccagcactttgggaggctgaggtgggcagatcatgaggtcaggagttcgagaccagcctggccaacacagtgaaaccccgtctgtactaaaaatacaaaaattagctgggtgtggtggcacatgcctgtagtcccagctactcgggaggctgagacaggagaatctcttgaacctgggaggcagaggttgcagtgagccgagaccacaccattgcactccagcctgggtgacagagtaagactctatctcaaaaaaaaaaaaatcgttgaagcctcatgatggagatgagagttcattatactgttcgttctgcttatatacatgtaaaatccaattatttcagcaccaagctgtgattaaggaaagaatagctttgtaattttaagaaagagcaaagaaacragtgctcagcaattctatcccagtgtttctgctgatttgtcacatggatttaaaataagttccattttacttacatgcctccttaaaagtggtcttccttgtggcctacggcaaggtaggcgcttggagagattatttcccattcccaaattgttacgcaatcttatttgctttcctcacagatttcgatggggtcctctatcatatttcaaatcctaatggagacaaaacaaaagtgatggtcagtatttctttgaaattctacaaggaacttcaggcacatggtgctgatgaggtaagatccacatcattttccttgggactcttgtttcctcacctttcattggcagtttgccattcatggaagatccatggcactaaatcacccccacatgactacttgctcacctaactaggggctcttgacttgattcctataatgaattgtgtttcctagaaaaggttttgactcttgcttgcttgctttaaaacaatggaaacaaaaatagctttagttctccaaaaacatagcaaagaatacttttccttgatcagtacaaaaatagctgttgcaagaattaggttctgttctatttttgtaatattatcaaggcagatagataacttctagcttgtttaaattttatagtctcaggttctcattctggaggcttaggcacaaatagctgtcttttgaaatttttaattaaagctctttaaagctaccgtctttaaatatctcttctttataactaccataggggaaataagaaagatgtccagacattatgaaacttcggtggccatgccttgttcactggcttctttaaatagttaagtagcaggtttggttcctgttgaactgtatttgctctgaggagagccatttatggaagaaagaaaatgctattacaccagtttgtgcacgctgtggttgggtctcaaagcaggaaatatgactcagttcctgaatcagttttcaaatttcttagttttaacaaactaggttctccttaatctgttaaatgaagatataaccatagctgtttctttctgaaaagtagtagcttttgaattatttaaaacttatataataaaagatgatttgtaaaggaatatggtcaaaagcttgtttaattttttagcataaaa

SEQ ID NO: 721127 - DNA, 590 bp, Homo sapiens
accctctggtcctaagcaacttcataagtcaacaaatacaatcattgtgaaaatggctgtgtatctaaagcctcataaaactcacgttttgtcactccacccttgtacaggcaacagaagcattgcttgtcaaatgattatgacctagcatctttctttaaaagctattctttacccctccgctgtgtttatgcggagatagtcctggattctgttctcttccattgcaattgtatatatgtgagtcattcttgattttcttctattttattggtttaattatctatttttgtactaataatgtagtttttcaatttactataggtttgtagtaactctttatatctaatgacataactccttcacgtttgttcttgcttcaaaattgcttttcctattcttggttcttttaatttccatctgtatgtcaaaatcatcagcttgccagaacccactgagtttttkattgagactacattgaatctatgctttgattggaggagaactgacatcttaacaatattcagtcttccagttcatgaaattgtgtctattaatttagatctttaatttccaccaataatttgaca

SEQ ID NO: 721128 - DNA, 670 bp, Homo sapiens
cttcactttggggctcatattattaagaggatactgcagaggaaaaataaaccccgtttggtaaagtaaatggtatgcctgcctctgtagctacccatggtttattactgctgtatgttatttccagcagtgcttataacagtgatcataagggacctttaaagacttactgatgcctcttgggcagtttcagaataataccgtttataaattattctgcctacatatcttatgtcttcaggattccttttgccttgctttgtctgttgtgagtatatttgcatgaaaacaggtgtgtgacaaaattcaacaytcattacaatgaaacacacccacacttatacacactttattttgcaaatgaagaaataaagagaacttcttaaatctgatttttaaagacaatctataaacatacatatagcaaagattatacttggtggcaaaatgctgaaagcatcctctgaggtcaggaaaacaagacaaggatgctgctttcaccaactttcaatatttcactggaggtccagtctagcctaataagttaagaaaaagacttactggaaataaacatattaaactgctattattcctagatgacatgattatttgtctaggaaatctaaaagaaggtatatactattagaactaataagtaactttagcaagg

SEQ ID NO: 721129 - DNA, 599 bp, Homo sapiens
tatgaagaaagcttatggtactcaaatgagtgatttgtaaagctctgaaagttgatcatgcaatgcacaaccacaaccatttcctatgaagctaaagaatgactttccttccatacactgagttcctgctacacaacatatggcagtgtgatggtgtagtgctcgtttagtgaaggaatgmgggaacaatgaataaatgaatggccatcagcctcaaatatatatctagacactactcttaatctatatactcaaataggccatttagagatggtctttcaaagaatactgtaaaatttagcaagtaaaagtagatcctatatgttaactaaagtcaaatatttacctgatcagttactatgggtgggctattccactttgtgccacagcgataaaatccagatgtggctcctgctcttaagggccttaaaggagcaaaggacccatattccaattaccataagtcaagattcaatatgccacgaccataaagagatacgcttaaggcactacgcacgttctggaaatggattaaagctccacgaaggagaatggaatggagttttgaggagtagccagggttgtaccagacagagata

SEQ ID NO: 721130 - DNA, 599 bp, Homo sapiens
tatgaagaaagcttatggtactcaaatgagtgatttgtaaagctctgaaagttgatcatgcaatgcacaaccacaaccatttcctatgaagctaaagaatgactttccttccatacactgagttcctgctacacaacatatggcagtgtgatggtgtagtgctcgtttagtgaaggaatgcgggaacaatgaataaatgaatggccatcagcctcaaatatatatctagacactactcttaatctatatactcaaataggccatttagagatggtctttcaaagaatactgtaaaatttagcaagtaaaagtagatcctatatgttaactaaagtcaaatatttacctgatcagttactatgggtgggctattccactttgtgccacagcgataaaatccagatgtggctcctgctcttaagggccttaaaggagcaaaggacccatattccaattaccataagtcaagattcaatatgccacgaccataaagagatacscttaaggcactacgcacgttctggaaatggattaaagctccacgaaggagaatggaatggagttttgaggagtagccagggttgtaccagacagagata

SEQ ID NO: 721131 - DNA, 688 bp, Homo sapiens
gctcagacagaagggagaggaggagaaaacgtgccaaagatgaagggctgtagacacaggccaactcaatctttctctttaaaaaatctttttggggctgggcacggtggctcatgcctgtaatcccagcactttgggaggccaagggggtggatcacgaggtcaggagatgaagaccatcctggctaacatggtgaaaccccatctctactaaaaatacaaaaaattagcctggcatggtggcacgtgcgtgtagtcccagctactcgggaggctgaggcaggagaatcmcttgaactggggaggcggaggttgcagtgagctgagatgctgccactgccctccagcctgggcgacagagcgagactccatctcaaaaaaaaaaaaaaatctttttggtaagccccactggaagacttccaatgacctgttattggccagaagtggatcacatagtcaccccaacacagaaggtgagcacattgctaccctgaacaaaatctagattctgtgatgatgaaagatggggagagtgaatttggcattggaaactagccgtgtctgccaaagcgatggaactcgactgaaaactggggaaggcagattttcttccttcttccagctctattaagatatatttgacaaataaaaattacatatatttacagtgcacaatgggatgttttga

SEQ ID NO: 721132 - DNA, 744 bp, Homo sapiens
gatgaaccttttcaaagcttctagctccctaacctctattctgcagttgggaaattgaaatgctttaggtgtttggcatgacatgcctttctttacttattttacttgcaacatatatataactttatttaatagtaaaaaaatccactttgttccattaaaaacatatcaaacctatatttattgaactatgaactatgatagcttgtgcacccaggtttaccaggaaattatgggtgaacacttgtactctaagaagattatttatgctgaaaactgtcccggtctgcaaagtcctatcttgctttgtgatcctgtcttgccaaaggcaagttagcttctgaacacaggtgagaggtaatgcaaattggtgtctttgtagctttgtagctcaaggtaagacttacctatgtagctcaaggtaagactttttactaaagactcaatttgtgatgactaaatctagatatagtagcttatcatctgggagtgagaatcatcagttcacactgtataatgattgtgttgctaaaggcccatgtgagtaccagaaacacatgcagaagacagacatattatgctgctacagaaaataatgagttcagggccagktgcagtggcccacacctgtaatcccaacactttgggagtttgagatccaagagttgaaaccagccagggcaacatggaaagaccctgtctttactaacaaaacaaaacaaaacaaaaaaattagcctggcat

SEQ ID NO: 721133 - DNA, 624 bp, Homo sapiens
ggtcaggctggtgtcgaactcctgttgatccacccacctcgacctcccaaagtgcttggattacaggtgtgagccacagaattctatgattctttataaggcattcatgaatcatgcagactttgagaagctagctttggcatgttggaaaggcagagtgaaattacacagtcctcatttaggcaggagatttttagcttccttatctgacgtgtccaacatttggccagggctgaatgcctgatttttacatacatgccacagcatatctggctatacgttaccactgctactcagtgtgctgttagtagcttttgtctaaatacatttcatttgaaatggtaactgaaacgtgctatatgcctgaaggaaccattgcatttagtgctccatttcaaaggaggaactacatttccatttaagatgaagcagaggaaactgtagagaaaccactttcacataaacccatcgttaaggatttgaatgacaggttgtataaggctggcactaggaaatccagaactgctaaacaagaattcttatataaaagaaatytgtagaatattcatgttgcaatgcttacaagatagaggagatactcctaaaactctatgtaatttaatc

SEQ ID NO: 721134 - DNA, 1369 bp, Homo sapiens
atagccctaaaatgagaagaactcaaatggtcatgaacttctgtatgcataaataaatcatggcacatctataatatgaaatattacaaagtagtgaaaaagaataaattactgataaatgaagcaacatgattccatttatatgrcattggtatataagtaagcttatccggacagaaatgaggtcattggttgccaagggctggaggtgtgagaagtggattgatcccagacaggcactgggaactttttggagtgatggaaatgttatacatcttgattgccattgtggttatacagctgtatatatttattaaaactcattgaagtgttaacctagaaaggtaaattttactgcaggtatattatgcctaaataaaccctatttttaaaaagactattgcagtggtttaaaggaaagatggcttgggctacgatggtggtggatgatggtaagtggtagagaaacccatgtattagaaggtaaaataaacagggccaggttaatggattgacacaggggatgaagcaaaaggagttgtatttctttcttacgaaaaaacaccatagtacatctaaaattataatcaattttctgtatatccatcaatcttatcaggatgcacactctaagaagtggagagaaggaaagagatcagaacaagaccttacaaatggcaatgttggtacagctcaaaatagagtccacacatccacactataataagggctaagtctaatttaaaactatagaaaatatgtagagaaaaattaggacaattacatcatcattacgcttaacaaactatgcacagagcacataacctgtgaaaagcactctgctatgcagggtgtaattaaaagaccatatggtaggttggggaaaaaaaactccaaaatagagtatgagatgagatgtggctacctctctgtacatgagtactcataaatattttgatcttggtcaagacttttaacttgttaaaagggatgtttaagtaacatctcttttgactttatccttcttatatattgttgtagggtggccattaggagattacaatataattatttaaaattacttatgattacatttgacaactactttacaagtgtgctaagttttagggatgcaaagtccttaaggagatttgtctagtgtgacaagatatgaaagcaatccaaatgcaattgagagatagatgcaaatgaagtttactttaaacctaaaatatgtgtatattttacctgtgattagattcctcaccttcactttctacacatgagcaaagcataatgtgtatcatcaatgaaagccagactcactgcatgccccatttttagaatgtatccatatatatatatatgc

SEQ ID NO: 721135 - DNA, 627 bp, Homo sapiens
acctcttgaggttgtgtcacaggcacatccttaaccttggcaaaataagccttctaaattgattgagacttggcttagatgtttttttgtttacaattggcaatgatgaagggattctgaattgaggtgcctctgaccttgacaaatctcctcttggtgcttggaaccagcttgagcaatctttattgctcaaaccaataggacaatttgctgaggcctgggagctcccccatccagagaatccctgatgtcccccaatttggttgtgatctaaggtttattttgctgtacaactccttttctggagttttactctaacaaaggaccctaaaagtttgtgtctttgagaattggatcttgtgaattatatcattggaatcccttgtgagttgccttctgattgggttcaaccaatgggagattggtgggcaggagagagatgtctcctgtgtagcagtgtcccacatctggtaatagctgcatccctccgggtagcctgttctccttcaggktgcttgtcttcacagagctctggtagaagcttttccttcatttgtccctttagccatagggggtagtaatccttccagctgttgctggtcttttggtttttcacttgcacctctc

SEQ ID NO: 721136 - DNA, 408 bp, Homo sapiens
tcctaaaaaggtacatcattatgagaacacgtggccaatttggctatgattatatcttacaatgttatatttgtggttagaataatttggttttgaaaagaaaggaggataagcacagcataatctatgtgctcaaattgtttttcagtcacccagcttgcttgggaaacaactatgcagactatgatgttctgtgtcaatgcctggacatcatgaaattgctcaacaagaagtcacctccayattcatcctgtttgacttctatacttcatgcctcatgcaggaatttttctactataattccggaatgtgttttctctgtcttcacttgaatgctccaaagtacgttattgtttcagacagaagtacatttgctcataagacggcctaaattcatgtatgacttgc

SEQ ID NO: 721137 - DNA, 2030 bp, Homo sapiens
ctgcatggttggatgcagcactctttttatctttctaatgtatttattttctcatttagttcttataaacaccaaatgaaataactacaataacaattcagaaaaaataagtcaawgagaagtaaatttccagatttttgattcaggtctgcctgactgtcgcaccccggatccttcttttacgttgtgaaaggaatcaacaggccaggctcatcaccaccggcaccgtcccattcatcacagacacacgtgcgcgcacgagcctgtgcaaggcccatttaaaaactcatttcaactgcggagaaacataatgggtacggaagaggtcaattcaggcaaacagatgaggcaagcattgcctgtgatattttaagatgataattaatcacccttaatatcgcaaccatctaaatattgcagacatttgctctctatccttatctaattctgattacttctcataaagagattcattttgaaaatgaccatttccttaatgtagtggaaatacattttcaattttctatctgcttcaaacatatctccaatgaatctgagatttaatttagtcagtaagttgctgaatggggcaaccaagatgaatggattgaataaaacagttccatcatcattcttttcttctgctctaattattagaattagtcataagatatctgcacatgtaaaaaattaacatggggaaatttgctccgggccaaaaagaaatcaggcaaggtataaatagaaactggcagtggcatgaaagctcctatagcattgataaatttccatgaggacatgaaagcaatacttaagagtcagaaacgtgtgcttccagttcaatcctgtccacaaagcaacgccttcccccaaatctgtgcttgctgaaacgctaccactccttctatctcctttcaaatgctacttcctccaagaagctggctcagattctcctcaactgaatgtgactccacgtgtttttaaagacatacacgtattatgcttgcttgtgttgcagtccttctttgctagcccaattaatcagtgttacgatcatctctcccacgacattgctttgtgcatgaaaagcatgtgttattcagctttgcctatgtcagagcccagcaatgtatagtagttctgtcagtcggtgatggttgaatttttctgtccagacgttttcaccccatctgcctatctgagccacagattgctacatgttcaatcctcctaataataaaaccaaaaacccaacaaacaaaaatgaggactatcacaataaaggtgcaatcaaaacttttcgctagatttccagaactccaaaatcaaatgtcaatctagaattcgccaaatttttctataaagggccagaaaacaaatatttttggctttgtggaccttagggcttctgttgcaactagtctattctgctgttatagcatgaaaggggacataaatcatccataaacaattgagtatggctggaatccaataaaactttattcacaaaagcagacagttggctggatttcacctgcaggctcacacttgccaacacctgatttttagttcaaggatgtttaatcatttttggtctgtggagctttctcttccaataaaatcttaaatgattctcatcatattcacataataaatgctgcaagcaatgagacatcattttatcagtctcaagttgtctatctccaatccttaattctttcagttccctctacctgcacagccctgtctccttgctttttaagcataaacaagaacatccctgagaaatctttccttattcattcagttaaattagattgtgatttaaaaacaaaaaagttctcccatagtgtattactctggcttccccgattctttgcatatagtcatatatttatctcaaatatacggccccctcctagtcgtcagccttcagaagcgaagctcactgcttgcatctgttggacgtttatttcttgaattcaactttaattgctattcatcctatatgctcagatgaggtgtccctt

SEQ ID NO: 721138 - DNA, 2030 bp, Homo sapiens
ctgcatggttggatgcagcactctttttatctttctaatgtatttattttctcatttagttcttataaacaccaaatgaaataactacaataacaattcagaaaaaataagtcaaasagaagtaaatttccagatttttgattcaggtctgcctgactgtcgcaccccggatccttcttttacgttgtgaaaggaatcaacaggccaggctcatcaccaccggcaccgtcccattcatcacagacacacgtgcgcgcacgagcctgtgcaaggcccatttaaaaactcatttcaactgcggagaaacataatgggtacggaagaggtcaattcaggcaaacagatgaggcaagcattgcctgtgatattttaagatgataattaatcacccttaatatcgcaaccatctaaatattgcagacatttgctctctatccttatctaattctgattacttctcataaagagattcattttgaaaatgaccatttccttaatgtagtggaaatacattttcaattttctatctgcttcaaacatatctccaatgaatctgagatttaatttagtcagtaagttgctgaatggggcaaccaagatgaatggattgaataaaacagttccatcatcattcttttcttctgctctaattattagaattagtcataagatatctgcacatgtaaaaaattaacatggggaaatttgctccgggccaaaaagaaatcaggcaaggtataaatagaaactggcagtggcatgaaagctcctatagcattgataaatttccatgaggacatgaaagcaatacttaagagtcagaaacgtgtgcttccagttcaatcctgtccacaaagcaacgccttcccccaaatctgtgcttgctgaaacgctaccactccttctatctcctttcaaatgctacttcctccaagaagctggctcagattctcctcaactgaatgtgactccacgtgtttttaaagacatacacgtattatgcttgcttgtgttgcagtccttctttgctagcccaattaatcagtgttacgatcatctctcccacgacattgctttgtgcatgaaaagcatgtgttattcagctttgcctatgtcagagcccagcaatgtatagtagttctgtcagtcggtgatggttgaatttttctgtccagacgttttcaccccatctgcctatctgagccacagattgctacatgttcaatcctcctaataataaaaccaaaaacccaacaaacaaaaatgaggactatcacaataaaggtgcaatcaaaacttttcgctagatttccagaactccaaaatcaaatgtcaatctagaattcgccaaatttttctataaagggccagaaaacaaatatttttggctttgtggaccttagggcttctgttgcaactagtctattctgctgttatagcatgaaaggggacataaatcatccataaacaattgagtatggctggaatccaataaaactttattcacaaaagcagacagttggctggatttcacctgcaggctcacacttgccaacacctgatttttagttcaaggatgtttaatcatttttggtctgtggagctttctcttccaataaaatcttaaatgattctcatcatattcacataataaatgctgcaagcaatgagacatcattttatcagtctcaagttgtctatctccaatccttaattctttcagttccctctacctgcacagccctgtctccttgctttttaagcataaacaagaacatccctgagaaatctttccttattcattcagttaaattagattgtgatttaaaaacaaaaaagttctcccatagtgtattactctggcttccccgattctttgcatatagtcatatatttatctcaaatatacggccccctcctagtcgtcagccttcagaagcgaagctcactgcttgcatctgttggacgtttatttcttgaattcaactttaattgctattcatcctatatgctcagatgaggtgtccctt

SEQ ID NO: 721139 - DNA, 1515 bp, Homo sapiens
agagactttacaaatttgaaactgaactcttggtatgcaactagcccaggattctacagagagtgactagtagtactggttctagaacagcattgcccagtgaaaatttctgtgataatggaaattccatgtttaacatcttgctaatgaggctaatgaagccaaagctaatgaggccaaagccagcactagcgcaactgaaaaccagataaactttattttactaatttaagttgtattgtcaacaatcacctataagtagtggttgccatattggacagagttgccatattggacagagtcgctctatagctgagtcacctgtgtcctgacacacttaatattgctcatctttatctaaagggaggaagaagcaaaatgtgacatcagatgaagaaaactgaccatatcttttatccatataaattgctcccagagacttcccaacctcatatttgtcactgtttgtttctttcagtgatatcttaaatggagtatgaagttataagaggttgtaagagccctgagcatttcataggttttgcttagtaagcagcttctaccacaaattaatcaaaaagggttctgcctggaagtcactgacttttattttctcctttacctctttcctccttccaaaatcaagctaaaatgttgatcaacacattcccacttgcttcatttgtaggcttataaagaaactctggataagtaggtctgagctatatattgagttggaatatctaaattcaagtcctttatttccaacctgaacaaatcagtaagcctcagtaattttatttataaaatggggacaaaaacatctacctaagtgaaataagttttgtaataatgcacatatagacacttagaaaagtaagagttaatccttgcgtaatgaatggaataagtaaaacaagccctaaactggaagtcaattattagaaattaaacatttatcagaataaaagaaatgccctgtaaaattctatcctttcaagtatttaaagtggaaattrtgatgttttcagagagaatatcactttttcaatttactcatgtttcatggcaacacacatcagccaggtggatggtgtcaagcttaaatgtcagtactttgcaaatatagaaaggccatgttaattcaaccaaacctagaactggtgtgcaaggctctctgtaacttgcaaatagtgagtctcatcaagtaaaaaaaatgtcagctttagtagatgacattttctgttttgataagactagcaaaagccatagctctcataaggtgtgtatttaattaaaaatttaaatgttcttttttgttgtagatttaccacatatttcatcatgaatagaaatagaattacctaattcaaaacgaaagaagttaaataagaattatattattttgttttatttcatcagcaaaaatttattgatcatctactaaatgctcgatactgcaaagtctgcagatagaaatgtttatagtacatagttcctgttctttaagagctg

SEQ ID NO: 721140 - DNA, 1148 bp, Homo sapiens
tcaagattaaatactaaaattaattatttggggctagctaaaaaatatataaattctttaagggcacacctatatttccctggactttgtattttagatgctaacaatgatgcttcaaattggtactcaagcagttagaaactacacaattataaggattcttctcaccaactccctttcacctatgtcaggccaagttccaagtaccgttcactaagattcatttcttcaatcttagtttcttcattaatttccttctcacatgctgatgtaaataaaaaaattccagaaagtcaagtggtcaaacagaagctgtgatgataccaattagcaaaggaaagttgcctggatactctcagagacataacagccttgtgcttaaggatttggattctggagttaaactagctttggaatcatcactttctgcctttgtaaccttgagagaagaatttagccccattaatcttcattcattttctcattggtgaagtgagcctcataatatcttcctcaaatgttttatgaggattacatacaataatctatctgaagtgtttaacgtagtgcctagcacacatcattattaaataaaagttgactatttgtgcttgtttgtgtaactttgattactgttccagaaatgcaaagtgaaaggtataccatacctttcccccagccagttctatattgcctgttggagtaacaagaaatcactcacaatttgactgattatggatgattttccatcaatgatcccatttaatccactactaacataggacataggccctaatattaccattttgagggtgaaaattgagattgaggaaaatgagaaagctttcttgggattttcttgtgatgtttccaaaggctaatgaaagcactgaattatattaatgayatcttcttgaactacaaaactttctttattttgtaggcttaaaaattttaaacaataagttttactatcactaatttactaagattgatttttattaattattacttcaaaatatttgcttcatttaataagataaagtcagccccattgcatttcaatattagctataattaatgatgatattatgaaaattaatgcttttccattatccattatgacatcatcagtgctaatgatctgt

SEQ ID NO: 721141 - DNA, 640 bp, Homo sapiens
  misc_feature 540, 541, 542, 543, 544, 545, 546, 547, 548, 549, 550, 551,552, 553, 554, 555, 556, 557, 558, 559, 560, 561, 562, 563,564, 565, 566, 567, 568, 569, 570, 571, 572, 573, 574, 575,576, 577, 578, 579, 580, 581, 582, 583, 584, 585, 586: n = A,T,C or G
  misc_feature 587, 588, 589, 590, 591, 592, 593, 594, 595, 596, 597, 598,599, 600, 601, 602, 603, 604, 605, 606, 607, 608, 609, 610,611, 612, 613, 614, 615, 616, 617, 618, 619, 620, 621, 622,623, 624, 625, 626, 627, 628, 629, 630, 631, 632, 633: n = A,T,C or G
  misc_feature 634, 635, 636, 637, 638, 639: n = A,T,C or G
atagtaaatgtcttgagttcaccttgaactttgaggatttcatttgctgacaataactaggtcttactgacttctcctctagaatattgctgtttttccacaaaagaatttttcatgcaaagtgccctcagagtacctaaaagaatagtgagttgagattttttttcaagctatatgactgtctttttatttgcttgataacaaatgtttgttttcaaaatatcttatggagcagtccttgtatgattgtactggtcacttgcagtaggaatgaccaattaataatgccccagctcctcgaagctcatgatctgccaagaagacaacactaatgggtgcatgaataattacataatttgtgtccatgatatgggagggacccttctgaaaggggcagagccagtcccctcctggcctgtggtcctcackgggagccacttccctctgctcccttgttccatggttcaccctctttatcctctagttttgatggtgggctaacactcttcaactcaagttctcctggcttttctgctagannnnnnnnnnnnnnnnnnnnnnnnnnnnnnnnnnnnnnnnnnnnnnnnnnnnnnnnnnnnnnnnnnnnnnnnnnnnnnnnnnnnnnnnnnnnnnnnnnnna

SEQ ID NO: 721142 - DNA, 631 bp, Homo sapiens
tggttgaatctttgtaacagtgaggttggttcatcrtgatcatcctcattttgaagatgagcagatctagactccataaatcctcttgagtgaggtcacacagggagtaagtgagggagctgggatgtgaactttctcctcgccccccttcattgactggcctagatcaccctgggagtcaagtgcaggccaggcttagcaggaggtgagtgctgggactggcatcagcagtggacacactgatgacattggcgggttctgatatcagcatcaggtgtgtccagggagggaaaggcatcgtgttggctttgggactgcccccaggtgtatgcgaggatgggaaacaagttggcactgaacttgacaccaggagaatattgaagtcatgtttggtgccaagagggctctgtgtgttgtctcaggtgtcattgagggcataagagagtcctgcttcaggagggcataagagtggcaccatatagggtctgaggttggtcccagtgggctctgacatgagcatgaggcaggtgttgatattggtcctatgtgggtctgagatgagcctcagccagaccctgagaggggctccagatgggcacaggacaggctctgatgtttggaccttccactg

SEQ ID NO: 721143 - DNA, 629 bp, Homo sapiens
aacaagatttctattgcacgatatgctcaccaaacaccattcttcacaatagtcactctttatgtagaaaactaggtattaaataaagttttctagtagaggggctaaaaattgcatttcgagtggtttatgaatgcatttggcttaatgctctcctttgagcacccaaaatctccggccatctttcacatttgtggaggaataaagggcctcagtgagatggttatgaaaggctgttggatttaaggatgtgaagaagttggaggtatcttcatcatccacttttcatctagcaatttcaggctattgctaataaaataggcagaggtggccgggcacggtggctcacacctatratcccagcactttgggaggccaaggcgggtggatcacgagtccaggagttcaagaccagcctggccaagatggtgaaacctcatctctactaaaaatacaaaaattaaccaggagtggtggcaggcacctgtaaacccaactcctcaagaggctgaggcagaaaattgcttgaacccaggaggcaagagttgcagtgagccgagatcatgccactgcactccaccctgggcgacagagagagactctgtctcaaaaaaaaaaaaaaaaaaaaa

SEQ ID NO: 721144 - DNA, 641 bp, Homo sapiens
ccaacttcacatctctctgattttgaccttcatgcctacctagttataagaacttttgtgattatattgggcccacccagttaatccrggataatctcaaaatctcaagatctttcatttaatcacatctgcaaaatctcttttattacataaggcaacatagtcacaggttactaggattgagatatatctttggggacaattgtcagcctaccaaagtgacattttatactgtaagctgttttgataaaagttgacttttctaagatttactgtcttactttttgtgtgaatctattgaaactcagaacacgtaaattggatctgccagaaatcccatctggaccttgataaagctcaatgttcaattacactaaatcattctttttccattaaaatgatgactctttcctctattgaggtctttgtgcaggcttgctaccttggcatagaatgtccttcctccttctcaaattgttggtaaatctctgactagacctcaagctataatttaatggttacctttttcttttgtttgctctgagtccctttttcttcccacaaagagtagttaggtgatttttttttctcatagcactttggcagtctccttatgtaagattccccatgcaaaatatgca

SEQ ID NO: 721145 - DNA, 2177 bp, Homo sapiens
aagataagtatataccatagcaagctggcaaaatagacataactgtactatagtgactactatcctcacttggtaagattatgaagaaaggcaaggaaatgtctgttacaaaaatcaatataacatagttacatttacaggaagcaatgtaatttggctggggcatgatggagggcttttgggtttgttgcaaagttctgttttttgtttgtttttgttttttttctgagacggagtctcactctgtcacccaggctggagtgcagtggcgcgatctcggctcactgcaagctccgcctcccgggttcacgccattctcccgcctcagcctcctgagtagctgggactacaggtgcccaccaccatgcccggctaattttttatatttttttagtagagacggggtttcaccattcacaggatggtctcgatctcctgacctcatgatccgcccgccttggcctcccaaagtgctgggattataggcgtgagtcaccgcgcccggccaaagttctgtttcttgacctgggtagttgtgacaaagacatttgccttataatcataattaactaatctctacatttttttgggtctggttttctgtttcatcttaaaacaaaaagataaataataaataatgcatacataaatccaaggaaaaaagttaatggggcatgtgttctggaaatcgagggaagaaaacacatatggagcggggarcagagtctcctgtctctgtgtttttctgcacaaatcacaccccaccccacccaccacccagtggccatcagcagggatagtccctcacaataagtttctctagcttccagcttgttcaactgtagagggagcaatggtcagatcctacatgttctgtcccttgttgagtgtgttttggggtctttgtgccttgtgatattctgaattctctctctataatgctgaattaatttttttctctatttttagcatcttattgtttgcctataagaattgccaagtcattcaatcttaaaaccatcaagttattacatctgaagatttctgagtcaatctgagaagcatcattatcttatccttattctgtgctcactgtgcaaatgctcggctataccgattattgcctaagcagtatccattatctttaaaaaggacaaacaaaaattaatctcaatttggaatttcaactgttctgatagatgctatttcttcaatgagctggaactgtagaatcgaatcctctaaggaagcctcaggtacatgagtctcgcagctgcagatacaaccctcttcattcatggtcaaacaagttaaggctggctctagaaatgaacattcctttgcacaattgctagaggttcacatttatgttttctgtgtattgatcactaaaatagaaaatcggtgccatcatatcagagaatcactaagtcatgggttttgaatatctacagaatcatggaatctgagatctgctgagtcatgatatttgaaaattacgtttgcacacaagccttgatttgcattttcaggatattaaaatcaaaactgcagaatcccatagtcattctctttgaaaacttcagctttgattcaaacattctgcagctgccaattcataaattctgagaaattaagagtcagattgagattgtacaatagcagacacatattccattactaaaggaagtccctggagggactaagatattcaaagtggtgagagaaagaaatactaataatttgttctatgttagctacatatcactacttcatataggtcctccactgtatgtggtattatccccatgttagaactgaggaaaccaaagttgaggatgatttgatatcaagtaagttcataggttccagagctaggacttcaactgcacatctatcagaagccttgattgacaatcatgaaatcatggagagagtgagaggatcatggaaaagtcagcctctgtctggccagggtcccatcccagctgcctgcaaagtcttctaatcacttgtacccatgctccattcaggcagaataacaagaccagaccttcagctagctcatagggtttgcaaatgatttttgctgatttatttgatgactaaagtacccacacatccttactcttcccctgcttgaattctggggctattctgggaaagggtctaggagt

SEQ ID NO: 721146 - DNA, 2177 bp, Homo sapiens
aagataagtatataccatagcaagctggcaaaatagacataactgtactatagtgactactatcctcacttggtaagattatgaagaaaggcaaggaaatgtctgttacaaaaatcaatataacatagttacatttacaggaagcaatgtaatttggctggggcatgatggagggcttttgggtttgttgcaaagttctgttttttgtttgtttttgttttttttctgagacggagtctcactctgtcacccaggctggagtgcagtggcgcgatctcggctcactgcaagctccgcctcccgggttcacgccattctcccgcctcagcctcctgagtagctgggactacaggtgcccaccaccatgcccggctaattttttatatttttttagtagagacggggtttcaccattcacaggatggtctcgatctcctgacctcatgatccgcccgccttggcctcccaaagtgctgggattataggcgtgagtcaccgcgcccggccaaagttctgtttcttgacctgggtagttgtgacaaagacatttgccttataatcataattaactaatctctacatttttttgggtctggttttctgtttcatcttaaaacaaaaagataaataataaataatgcatacataaatccaaggaaaaaagttaatggggcatgtgttctggaaatcgagggaagaaaacacatatggagcggggagcagagtctcctgtctctgtgtttttctgcacaaatcacaccccaccccacccaccacccagtggccatcagcagggatagtccctcacaataagtttctctagcttccagcttgttcaactgtagagggagcaatggtcagatcctrcatgttctgtcccttgttgagtgtgttttggggtctttgtgccttgtgatattctgaattctctctctataatgctgaattaatttttttctctatttttagcatcttattgtttgcctataagaattgccaagtcattcaatcttaaaaccatcaagttattacatctgaagatttctgagtcaatctgagaagcatcattatcttatccttattctgtgctcactgtgcaaatgctcggctataccgattattgcctaagcagtatccattatctttaaaaaggacaaacaaaaattaatctcaatttggaatttcaactgttctgatagatgctatttcttcaatgagctggaactgtagaatcgaatcctctaaggaagcctcaggtacatgagtctcgcagctgcagatacaaccctcttcattcatggtcaaacaagttaaggctggctctagaaatgaacattcctttgcacaattgctagaggttcacatttatgttttctgtgtattgatcactaaaatagaaaatcggtgccatcatatcagagaatcactaagtcatgggttttgaatatctacagaatcatggaatctgagatctgctgagtcatgatatttgaaaattacgtttgcacacaagccttgatttgcattttcaggatattaaaatcaaaactgcagaatcccatagtcattctctttgaaaacttcagctttgattcaaacattctgcagctgccaattcataaattctgagaaattaagagtcagattgagattgtacaatagcagacacatattccattactaaaggaagtccctggagggactaagatattcaaagtggtgagagaaagaaatactaataatttgttctatgttagctacatatcactacttcatataggtcctccactgtatgtggtattatccccatgttagaactgaggaaaccaaagttgaggatgatttgatatcaagtaagttcataggttccagagctaggacttcaactgcacatctatcagaagccttgattgacaatcatgaaatcatggagagagtgagaggatcatggaaaagtcagcctctgtctggccagggtcccatcccagctgcctgcaaagtcttctaatcacttgtacccatgctccattcaggcagaataacaagaccagaccttcagctagctcatagggtttgcaaatgatttttgctgatttatttgatgactaaagtacccacacatccttactcttcccctgcttgaattctggggctattctgggaaagggtctaggagt

SEQ ID NO: 721147 - DNA, 2177 bp, Homo sapiens
aagataagtatataccatagcaagctggcaaaatagacataactgtactatagtgactactatcctcacttggtaagattatgaagaaaggcaaggaaatgtctgttacaaaaatcaatataacatagttacatttacaggaagcaatgtaatttggctggggcatgatggagggcttttgggtttgttgcaaagttctgttttttgtttgtttttgttttttttctgagacggagtctcactctgtcacccaggctggagtgcagtggcgcgatctcggctcactgcaagctccgcctcccgggttcacgccattctcccgcctcagcctcctgagtagctgggactacaggtgcccaccaccatgcccggctaattttttatatttttttagtagagacggggtttcaccattcacaggatggtctcgatctcctgacctcatgatccgcccgccttggcctcccaaagtgctgggattataggcgtgagtcaccgcgcccggccaaagttctgtttcttgacctgggtagttgtgacaaagacatttgccttataatcataattaactaatctctacatttttttgggtctggttttctgtttcatcttaaaacaaaaagataaataataaataatgcatacataaatccaaggaaaaaagttaatggggcatgtgttctggaaatcgagggaagaaaacacatatggagcggggagcagagtctcctgtctctgtgtttttctgcacaaatcacaccccaccccacccaccacccagtggccatcagcagggatagtccctcacaataagtttctctagcttccagcttgttcaactgtagagggagcaatggtcagatcctacatgttctgtcccttgttgagtgtgttttggggtctytgtgccttgtgatattctgaattctctctctataatgctgaattaatttttttctctatttttagcatcttattgtttgcctataagaattgccaagtcattcaatcttaaaaccatcaagttattacatctgaagatttctgagtcaatctgagaagcatcattatcttatccttattctgtgctcactgtgcaaatgctcggctataccgattattgcctaagcagtatccattatctttaaaaaggacaaacaaaaattaatctcaatttggaatttcaactgttctgatagatgctatttcttcaatgagctggaactgtagaatcgaatcctctaaggaagcctcaggtacatgagtctcgcagctgcagatacaaccctcttcattcatggtcaaacaagttaaggctggctctagaaatgaacattcctttgcacaattgctagaggttcacatttatgttttctgtgtattgatcactaaaatagaaaatcggtgccatcatatcagagaatcactaagtcatgggttttgaatatctacagaatcatggaatctgagatctgctgagtcatgatatttgaaaattacgtttgcacacaagccttgatttgcattttcaggatattaaaatcaaaactgcagaatcccatagtcattctctttgaaaacttcagctttgattcaaacattctgcagctgccaattcataaattctgagaaattaagagtcagattgagattgtacaatagcagacacatattccattactaaaggaagtccctggagggactaagatattcaaagtggtgagagaaagaaatactaataatttgttctatgttagctacatatcactacttcatataggtcctccactgtatgtggtattatccccatgttagaactgaggaaaccaaagttgaggatgatttgatatcaagtaagttcataggttccagagctaggacttcaactgcacatctatcagaagccttgattgacaatcatgaaatcatggagagagtgagaggatcatggaaaagtcagcctctgtctggccagggtcccatcccagctgcctgcaaagtcttctaatcacttgtacccatgctccattcaggcagaataacaagaccagaccttcagctagctcatagggtttgcaaatgatttttgctgatttatttgatgactaaagtacccacacatccttactcttcccctgcttgaattctggggctattctgggaaagggtctaggagt

SEQ ID NO: 721148 - DNA, 2177 bp, Homo sapiens
aagataagtatataccatagcaagctggcaaaatagacataactgtactatagtgactactatcctcacttggtaagattatgaagaaaggcaaggaaatgtctgttacaaaaatcaatataacatagttacatttacaggaagcaatgtaatttggctggggcatgatggagggcttttgggtttgttgcaaagttctgttttttgtttgtttttgttttttttctgagacggagtctcactctgtcacccaggctggagtgcagtggcgcgatctcggctcactgcaagctccgcctcccgggttcacgccattctcccgcctcagcctcctgagtagctgggactacaggtgcccaccaccatgcccggctaattttttatatttttttagtagagacggggtttcaccattcacaggatggtctcgatctcctgacctcatgatccgcccgccttggcctcccaaagtgctgggattataggcgtgagtcaccgcgcccggccaaagttctgtttcttgacctgggtagttgtgacaaagacatttgccttataatcataattaactaatctctacatttttttgggtctggttttctgtttcatcttaaaacaaaaagataaataataaataatgcatacataaatccaaggaaaaaagttaatggggcatgtgttctggaaatcgagggaagaaaacacatatggagcggggagcagagtctcctgtctctgtgtttttctgcacaaatcacaccccaccccacccaccacccagtggccatcagcagggatagtccctcacaataagtttctctagcttccagcttgttcaactgtagagggagcaatggtcagatcctacatgttctgtcccttgttgagtgtgttttggggtctttgtgccttgtgatattctgaattctctctctataatgctgaattaatttttttctctatttttagcatcttattgtttgcctataagaattgccaagtcattcaatcttaaaaccatcaagttattacatctgaagatttctgagtcaatctgagaagcatcattatcttatccttattctgtgctcactgtgcaaatgctcggctataccgattattgcctaagcagtatccattatctttaaaaaggacaaacaaaaattaatctcaatttggaatttcaactgttctgatagatgmtatttcttcaatgagctggaactgtagaatcgaatcctctaaggaagcctcaggtacatgagtctcgcagctgcagatacaaccctcttcattcatggtcaaacaagttaaggctggctctagaaatgaacattcctttgcacaattgctagaggttcacatttatgttttctgtgtattgatcactaaaatagaaaatcggtgccatcatatcagagaatcactaagtcatgggttttgaatatctacagaatcatggaatctgagatctgctgagtcatgatatttgaaaattacgtttgcacacaagccttgatttgcattttcaggatattaaaatcaaaactgcagaatcccatagtcattctctttgaaaacttcagctttgattcaaacattctgcagctgccaattcataaattctgagaaattaagagtcagattgagattgtacaatagcagacacatattccattactaaaggaagtccctggagggactaagatattcaaagtggtgagagaaagaaatactaataatttgttctatgttagctacatatcactacttcatataggtcctccactgtatgtggtattatccccatgttagaactgaggaaaccaaagttgaggatgatttgatatcaagtaagttcataggttccagagctaggacttcaactgcacatctatcagaagccttgattgacaatcatgaaatcatggagagagtgagaggatcatggaaaagtcagcctctgtctggccagggtcccatcccagctgcctgcaaagtcttctaatcacttgtacccatgctccattcaggcagaataacaagaccagaccttcagctagctcatagggtttgcaaatgatttttgctgatttatttgatgactaaagtacccacacatccttactcttcccctgcttgaattctggggctattctgggaaagggtctaggagt
